United States Patent Application Publication US 2007/0054278 A1 - sequence listing, part 23

SEQ ID NO: 93803 - DNA, 105397 bp, Homo sapiens
  misc_feature (1)...(105397): n = A,T,C or G
caaaaataaaaaaattagccagccatggtggtatgtgcctacactcccagctacttaggaggctgaggtgggaggatctcttaagcccaggaggtcaaggctgcagtgagctatgagtgtgccaccgtattccagcctgggcaacagagtaagaccctgtctcaaaaaacaaacaaacaaacaaacaaacaaaaaaaacgaaagaaaagaaaaaaaaccaaaacaacaaaacacacactcagccctgctcccaccatgtgcaaaaatgtcctgcaccctactcaccatacgtaacacccatcatactgaaaagcttaaaaaagtggtttatgcataaacattacagattagcattttttgagcacaccttgtgggctaggattgtgagaagaagccagagaaagttaagagatgtggtccctctcgtgaaggaggtcccattctaacagggaataccagccacccacaatgtatttgggaagccatctataagcacatgcaaggatcgtttagagggttagccacaagcaccaacaggcaggacaccgataagtttcagcctcctctgatctcgtcccaagcctctgaggacccacctcccttgggcctctgataaacccactcagggcttaggcatctgctggcagagcaccaagcacacgcccttctgtaagtcctggtgttgctactcttggggctccaagctgagttcacttcaaggctgggcccaagaattcctgagcttcaggccctccagcacaccccttgctctgctatcagccttcttcctctcacctcttagaaagctggacacaggccgggcatggtggcacacacctgtaatcccagcactttgggaggctgaggcaggcggatcacctgaggtcaggagtttgagaccagcctggccaacatggtgaaaccccgtctctactaaaaatacaaaaattatccgagtgtggtcatgcatgcctgtaatcccagctactcaggaggctgagatagaagagctgcttgaacccaggaggtggagtttgcagtgaaccgagatcatgccactgcactccagcctgggtgacaagagcgaaactccatctcaaaaaataaaaaaaaattaaaaaaaagaaagctggatgctatatttcaccagcatcattaccactcctccttgactctccatttccctaccaccctccctaactctcccaggccctcttcccttctcagacattctcatcctccctcgtggctctaagtgccacctcgaggctcatgctacctaaaccagtatcatcagccctgacctccccacgaagctccagactccattatccaacctggccaaacatgggtgtcccatcaaccctcacactcaaaatgttgctaaggaattcacctttcccccaaacctcctcctccaacaagccccacttcaatgaacagcaccacctgtgtcacctaaagccagccctggtgggtggatccctcctctccacatgccctacgccatactcatgcatcaggatcctgcccccaccttccacttagacaacaccacagcttctcccaacctatccctgccaccagcctgaccctcccttgctcatcacccatttggtcaccagagccaggttccaaaacacaaatccaatcactaaagtaaaactgaaatacataatttagtcagataattagaaaaaaggtggtttaagaaagtaaacgtagctgggtgtggtggctcacgcctataatcccagcactttgggaggccaaggagggtggatcacttgaggccaggagttcgaaaccagcctggccaacacagtgaaaccccctctctactaaaaatacaaaaaattagccaggtatggtggcagacacctgtaatcccagctactcgggaagctgagaaaggagaattgcttgaacctgggaggcggaggttgcagtgagcccagattgcaccactgcactccagcctgggcaacagagtgagactctgtctcaaaaaaaaaaaaaaaaaaaaaaggaaaagcattagaagaaaacaggcaaggcacagtccccaaacccacatgcagaccgttttttttttttttcttttgagactgagtcttgctctgttgccaatgctggagtgcagtggcacaatctcagctcactgcaacctccgcctcccgggttcaagccattctcgtgcctcagcctcccaagtagctgagattacaggggcccgccaccatgcctggctaatttttgtatttttagtacaaacagggtttcaccatgttggccaggctggtctcaaactcctgacctcaagtgatccacccacctcggcctcccaaagtgctgggattataggcataagccaccacacccggccatgcagacttttttgtttcatcttgagaaaccagtgtgcctctctgtacaataaaaatgttactatgtattttctattcatttaagactttctcaagagaagactgaaacagtaaaataattcctttctcccactcagaaagtccctgctcgtggttgcgtcagtagcaaaagtagctagcaggcttgtttcccttctggttgtgcactgaggggctgctttgtgacccagaaaccaaatccaactaagcagaaaaacataacccaagtctacttattatcctcaagacaaagggaaaaatacaaaagggcaatcaactgcacacttctttgctaatcgccaagggaaggagacgctgtcagaatctagcactttttctccccatctggtctttaaaaagcaggaactagacactggttcacaggctaaaaaatatcacaggataaaatatcagaatcattgtgtctaaaagcctgaccctgggcacctgcatgatgactctgcagcaaggagcacctatccctgcctgcttgttcagcttgttttctcatcacctttgctccagcagtattacatgtctccaggttcccccaagtgcaccatgcctttactcacaatgttccctcttgctgggacgcctgttccattgtccatctagcgaaaacttactcattaagacatcaaatgtccactccctttacaaagcctttcctgactgtttgatcctcttctttttgctcctctttactgtacagaaacacccgttaaaatatctcaggaggctgaggcaagagaatctcttgaacccaggaggcggaggttgcagtgagccaacattgtgccactgcactccagactgggtgaaagggtgagactctgtctcaaaaaaaaaaaaaaaaaaaaatctgcaacaactcttaagctcacaaatctgcctccccctatagactacaagcccgggttgtcatcttcatctcaatattctcagacctggttcagtgcccggtccaaaggaagtatttaacaaatgtctactgaattaatacataaatatgtatctacttccactatactgagctgttggcttttaagtacatagatgatcttagtcttggtgtcctagaatccaggtccagggtagcagcagcccaggagtgctgagtgtgaagaaaaaccccatggccaggcacggtggctcacgtctgtaatcccagcactttgggaggccgaagtgggtggatcacttgaggtcaggagttccataccagcctggccaacatggcgaaaccccatctctactaaaattacaaaaaattagccaggtgtggtggcacacgcctgtaatcccagctacttgggagactgaggcaggagaatggcttgaacccaggaggcagaggttgcagtgagccaagattgcgccactgcactccagcctgagtgacagagggagactctgtctcaaaaaaaaaaaaaaaaaaaacccatgaaccaaacccatctgagttgaagtgcactcactactgcttacacaggttcaactgcaggggcttaggagggcaggagtacagcaatgttcttatacagaaagacaacttcggccaggtgcggtggctcacgcttgtaatgccagcatttgggaggctgaggcaggcggatcacaaggtcaggagatcgagaccatcctggttaacgtggtgaaaccccatctctactaaaaatacaaaaaattagctgggcgtggtggcgggcgcctgtagtcctagccacttgggaggctgaggcaggagaatggcgtgaacccgggaggcagagctttcagtgagacgagattgcgccactgcactccagcctgggcgacagagcaagactccatctcaaaaaaaaaaaaaaaaaaaaaaaaaaagaaagacaacttcaacaggaaagtaaatctactcaactttctctcaattatgctgatggaggaaaatgatggcagcacaaaaaaatccaaccagtggagaatccatagaccaatatcattaagccttgagacatgtattatttctttgcagcaaaattgtcttccagattctatctggctcaagctatgtacacataaaggatgacaggtatctaatgtagggcttcatgaagctcagctgtaatgcagacacctggccaggccaggaagttccccttacctggcacagtcctgggtgcctgcctagatggctcttgcagttccccttcctgatgctggtggaaagcagggctacagagaggtctcgacccaaggccgccccagccagctcagaattggactgggcatgagtgggtttcccatttttcagccttgcatccacagcctggaaaggctatgcacagccacctgctcagtgtactctcagttggcaattgcttgcattgacctaggggctagactcctactacctagcatgggcaaaatgtggaaaaagggaagcttgacaaagattggggagaccctggagaaatgggacattggcagccttgctatctaccaggacactggctcctatgaactccagtgcaccatggcaggggaaaccatgagcaaagggagtaaaatgctctgacccttgcttaaataaatgaggctggagggaaggggtttaaaactagaagaggtggcgggcgcggtggctcacgcctataatcccggcactttgggaggccaaggcgggtagatcacttgagatcaggagtttgagactagcctggccaacatggtgaaacaccgtctctactaaaaatacaaaacttagccgggcrtggtggcgggcgcctgtaatcccagctacccgggaggctgaggcagagaattgcttgaacccgggaggtggaggttgcagtgagccgagatcgcgccactgcactccaacctgagcgacagagctagtctccgtctcaaacaaaacaaaacaaaaccaaaactagaagaggaaaaccactctggtctgggataccttggtcccaaatttccttcttcccccttcccattcagccatcttccttctcacctcaccgtctcttcctcaccccactgcacctccccactcggggcatggtccacaagtcatttcaacctctcccactctcatgccctaatttctccccacaaccagattacccttttctctatgtgtccccatcaccttgcctcagagtctggcccctaattccattttccatttttcttttcccattccactagtctcccttcccagggggtacttcctgccctaagctcacctacaggcacctactatgggccagccacttaatactgactactcccctcaagcccccgggacacatcctccgccccgcctgagctgcaagagatcctcctatacctttaaccaacctccacgtgcgtgttaaccgcggtgacagcatttccttgtctctctgctcccgcccccaaaggcgctacccattggccgctgggttcctctgttctcgctctaattggcctcgttaccgaaaagctccaaccaatgacctctccgtgtctgtctccctcctccgatcctggaaactcattggctccgaggacttaggacctgttagcttggttgggcgactggcaaatccttccttccccggggtagaagtccagggtgagaaattggttccgaactcaaaggaacccartgccgggccacagccgggtcacgtggccggcggccccccatgacgtgctggctgcggggcgtcacggcgacgttcgggcgacctgccgagtggccaggctacctcagtcacctgtgtggtcgcagtgctgccatggacctgggacccatgcgcaagagttaccgcggggaccgagaggtgccgccgctagggccaggcctcctgcaggggcgggggaaaaggggtccccggagtcatctacagcggggaggggagtagtaggagcccctcggggcttctggggccacccggtggggcaaggaggtttgaggatcaccccccgtgggaaaagggggcttcaaagacatcccaccaggggaggagttccggggaaacgcaaatgaagatgggttcaaaaggcagcctttcgtaatgggtaagagctcgaactttggagcctgcctgggttggaatgtttaatgtatctgggcctcagtttcctcatctgggaagtgatagtatctgcctcacggggatgttatggtctaagatgtttgtaaagtgcttagaaccctgctactcgacaggtagcaaggtcaaataacttgctcagtcccacagctagtgatgaatgaatcggggtttcatgtgatggatgtcaggactgtgctgggcctccctcaagggcgggggaagaggggtcctcggagtcatctactggggggaggggagtaggaggaaacagcccctcagggcttctggggccaccccctggggcaaggagatttgggggtcacccaaacctccttgtgccaggtgggcatggtcatgggcccctctttaggtgggtacagtgacaaacagcttacaaactgtttgacaaaaaagtaagtggaatatgggggaaggggactagctcagggaggaggggaggagaaagctcttagcttactgccttcagtactttctgctgaccactgggaagttcttttccttttccctcctcaggaggggaaccaagagaaccttttaggaattggggtccagggccctggttgccaaatctggttgcatgtgggcatttctagaaacgcttgtttaaaatgcagtttttccagcctgggcaacatagtgagaccctgtctctacaaaaaattaaaattagtcgagcatgttggagcgtgcctgtaattccagctacttgggaggatgaggttggaggattgcttgagctcaggaagttgagactgcagtaagccgagatcacaccaccgcactccagcctaggtgacagagtgagaccctgtctaaaataaataaataaataaataaaaatgcagtttttgatgaagcctcagacctgctgaatgagaaattttgggggtggagcccagaaagttttttttatgctccccaggtgattctgatgcacagacagttttgacacccatgacatgtaaccctgatttatccatcactagctgtgggacagcaagttgtctgagtttttatgcctgtttcctcacctgtaaaatggggcacagaatcttcttactgcatactatttcttattttaaggtcattgtcatgaggactaaatgagttgatttttgaaaagtgactagaacagtgccaggtccatagtaagcactatatatgtttattaaatgaaataaatctcctttcctaggcatttgaggagactcatctgacctcycttgacccagtgaaacagtttgctgcctggtttgaggaggctgttcagtgtcctgacataggggaagccaatgccatgtgtctggctacctgcaccaggtgggcatggctgtgggcccctctttgggtggatacatatgaactaggaagcttatgaagctctctactctggatgccaattttatggttccagctctgttattaacatgctctgtggctttaggcaagatacttgtcctctctgggcctgtgtccttacctataaaccaaagaccaggccacaaaattacatttcagtgataaaaatgcagtgccttgttcatttctgcccttgatacatccacacacaaccccttgcctccctcatctccccatctacccaagccccgtctgccattcaggagctacttctcctggtgaagctctgtctctctctcgaaatctagcacagtgcttgactatatcattcctttgacaatcatatgccctttgagacatcacttgtattagcctgttattcaattctcctcgataaagtgtaaggccttgtagccagtgctcttgtactgtgcgagtggatatctcccagagctctgagcagaggggctgatctcatagcaccactgtgatcccgaagcattggatgattgcattattgttagtccctgcccttagggtcttatgaatttgctagggctgtcttaacaaaatactgtagactggatagcttaaacaacaggagtttatttccttatagttctggtggctggaagtccaagatcaaggtgccatcaggggtggtttctgatgaggcctctgcttggggtttgcagacagctactttttaccatgtcctcacactgcctttcgtgtgtgtgtgtgtgtgtgtgtgtgtgtgtgtgtgtgtgtgtgtgtgttgtggagggcaagggaggtggttctgaagtgtctcttctcttacagtgacaccagtcctactggattagggccccacccctatgaccttacttaaccttaattacctccataaggtccccttctccaaatacagtcacattggggtttaaggctttaacataggggtttggggtgacacaattcagcccataacagggccccaggctgtggtgtcatacctctaggacaaatccccaggagcacatgggacggggtagcctgacagcccaataaagggggtgcagctggagggggtgctgagacatcctttggggagagggactatagccagaacattgaagcagactctgaccacagtgctctgctctttgctcctagagatggaaaaccctctgctcgcatgttgctgctgaagggcttcgggaaagatggcttccgcttcttcactaacttcgagagtcraaaaggaaaagagctggtgggtgaaaagagctagtaatctttcccagggcctgcagggtttggctcttgcttcctcagtcaccttcttatgccaccccacccccccagtctacttgctctctgtgtgcaggtgccctcctgccatgaggccttggcacttgctgtgctctttgccataaatgaatgaatgcactttctaaccagcctcaccccatcagccatgacctgttccttcagatctcagcccacatgttacctcctcagraaggccttccttgactctcactcagactcagcccctcatgctgtttgctgccattataacttgcaactttcttttttgtcttcttcttcagtttgtaactgagcatttgtttgggtgattatgtaactgatatttgtctcctctgctcaacagtaagctctgtaggagtggaggctgctctgttttatctctgctgtatcccccgcacgtctcctgttgtcagacccagagtgggcacttcgcgtgcattcaatgaatgaatccaaaatgagtaaacctccctgagtccatgccagccaagcatgcatttctcaagactcacaaatctgtgggtgagagaaatcacccagtctcactttggagtccgactggcttaaacttagctccaccacttcctgcaggaacttgggcacgtgacttagcctgtctctgtgtctgtgacaataggcctacttttgagggtttaaatgagctcttacggtgggtgcatctgctgtgggcctgcgcactacagctctcctgccttttccctgcatgccggaggcctcctctccctgtyctgatggctggctgtggattctcttttacttctaggactctaatccctttgcttcccttgtcttctactgggagccacttaaccgtcaggtgagtgaattttcccaggacagcctggratgggctgggttggcagggcctgagtttatggctacgtctagcgaaggtccccagactgggcaaacatcccagctgggcactctgcctctaaaatagccctcagttagttggagccaagagtggtggggcagccgatcgaacagagaggaacrggrcctgtgctggtagggagggcaggtggcatttaatgccattcacccagagccatccctgagcaggtgcgtgtggaaggccctgtgaagaaactgcctgaggaggaggctgagtgctacttccactcccgcccsaagagcagccagattggggctgtggtcagccaccagagttctgtgatccctgatcgggaggtgagtggagctccrctgtagtcctccaggtggtggaggctttggcttatccccagaagctgtccccaggagatgccaggagatgtccccaggagatgtcctctctctccagcccagtgaaaacagtgaaaaggacagtgagaagggaaagtggkggtagggagaggggaaataggcctcctctgtccatctggccatcctgttgactgctcctggaggacagaggccagtctgctctgctcacccatgtccccagcacatatcmccaggaagtccttgttaatgaatcattgactgggcctggcccttcttctaactcttccccctggacagtatctragaaagaaaaatgaggaactggaacagctctaccaggatcaagaggtgcccaagccaaaatcctggtgagtgacatctggtagtcctctagaaagggacaccaggcccctgtgtttacttgaagccacctgcctggggaatcacagatctcctcctccctggccacccttgtcagatgcatcccagcaacttccttcaagaggccctgggatgaggggtgagggtgggagagtgacctggctagaaaactccacagagcrctgaaacctctgcttctccttataggggtggctatgtcctgtaccctcaggtgatggagttctggcaaggtcaaaccaaccgcctgcatgaccggatagtctttcggcggggcctacccacaggagattcccctttggggcccatgacccaccgcggggaggaagactggctctatgagagacttgcaccttaactctgggacctgctggcccagagtggagctagggctaggtgtcaagagagggtgtgggattgggacccaggcccttctttctaaactcaacccatttccctccctaccccttatcttcaggactcttcagagctaatcctctaagttctctgtactcagttggttctcagttagctggtcaagtggagtgtaatggtggcgtagagaatcacaaatggaaaataattccataattatttttttgaccttgcctatgattgattaggatagctccctctaggggtagcagccggtgtgactccctttctggtgacagacagggccccagcagccctgtctgttaccatgtgagtcatactggccaaagcttagtcctagcatatgcacctgagccaacctggccaatcagattgttttgtcaataatttgaaatttgaactggagagatccagaaccttgggagtcattaaagccaagtcattcatagcagccaggaaacaataggaaccaaaagcctctgcctgctgctattgcaattcccaggatctctccttccctggatccctccctcccaggtctgggctgtgcagttcctccccctgccttaaaacaccccactatctctgtaaagtctctctctctcttttttttttttttacttaatctagctagaatctatttctgttgattacaacttaactaactcatttacggataggacttttttttttctttttttcttttttcttttcttttttttttttgagatggagtctcactctgtcacccaggctggagtgcagtggtgtgatcttggctcactgmaacctctgcctcccaggttcaagcaattctcctgcctcagcctcccaagtagctgggactacaggcacacgccaccacrcccaactaatttttgtatttttagtagagatggggtttcaccatgttggccaggattgtctccatctcttgaccttgtgatccacccacctcagcctcccaaagtgctgggattacaggcatgagccaccacacccagcgagacggggtttcattatgttggccaggctggtctccaactcctgacctaaagtgatctgcccgccttggcctcccaaagtgctgggattacagacatgagccaccacgcttggccgggatagtatatttttatagcacttcccctactgattgctgccttctctgtggctacaagggacccacagaattacagggaagttacagggaagcaggtttcatctcaatattgggagagatttcaaacaatcacacctgcctgagaaggagtgggctgtcactaggaatttttattcccagtccgtcaggaattttgtagaagggcttcatgtgctggtaccaataggacaggaagattttaatcagctttactatctatgtttttttatggaaactgtgtgtatgtatacatacattttccaaaaagaaaaattaaatgattatagagattatgtttttcagactactcacgtatctgcttttcttactccccacctctgctgataattcctagttcattggtttttcccccacactggaattacctggggagcttaaaaaaccctgatgcctgggtcccaccctcagagatgattgaaccagcctggccagcatggcaaaaccctgtctctactatgatatgaatgcagcctgggcactgggaaatttaaaaactccccagataattctgtgcagccaaggttgagacctcctagtctagagctttgctatacacagggtggtccacaagccaggagcatcagcatcacttggcagcgccttagagattcagaccccagacccactgaatctgaccctgcattttcactagaccccaggtsatcagctgcactagactcaacctctaaaccaagacctcccaccctcacagtctatgatcctttagtgaccctcagctgagtcctgtgctgaactgtgtttgttctccttgagcacatgcccgctraccagggacagactggatgagcaagcaacctgctggctatggagaagagccaggctgggtaaatgtttgctgtgactaagccaggatcaaagaactgcctgttgcttgcactggctggcactgagcttgccactctgtgaactgtgcttccttcccctgcatggacctgtgcctcagtcactattatccgcaggccttctccaagggcagccctctccttgtttatccctcttaagcctgcgtgcaggaaggcacattaaccctgtggccccctgcaggcaggagggtgttgggtgcccttacctaccttgccctttttcttgtaccgtaggctgtgccgtttatgagtaagtgatgtgtgtctgtgtgtgtgtctagaagtgctgcactcaccttgtgttattggaggttgtgtaaccccctagctttgagcctggtctcagatgttccttttccgttctctgtccagccgttaccgcccccagtctgtaataaaagcctatcagccgtgcactttattgatgttcaacccggcctggtctccctcaacccccaaggaggggacttggggaatttaagcaactttcctgtcccctcacttctctgcaccttgtaggcagtacgtccagtagggggagcccgccgcccaaggtcggccccttccgggcagtgaaagcaacttctagccggcctcccccttcatcggcttgggccgcgtcccagtgaaactgtggtcgataacccgtagcctctcccggttgccgcacatatttgcgctctcggttcctcctcttcccctgttctcatgaaaacttgcagctgcctcgctctgcttccctgggcatccagatctccctttggcttctagtacctaccccacatccatctggccacccagcttagaaacatatgtggactttacctagaagatggagccggggtcagyatgcaaggggcagaggggctgtggatactctcacccagaggggtaatggtgatactggaggagttggcagtacagtgccagtattatctagaaccttaggttggtggcccaggggccatccttatcccccacctcagggaaaccgagaatgggcggatgtgggagatacctgtagtctagggtcttaggggacactcagcttcaaagctggttggctttatccatctgcttccagagtttgtccagccccctcgagtgatgctcacctcccaggatcctaagacccagacgttgctccctcccctcccaacttccccttctgcagaaggtgtctgtgcttttctttgttctgagcttcagtttcctgtccctgtagcagatgagaatcaagagtggaaggtggctgtgtgggacagtggtcacatgtacaagctggctctggcttcagtcccagctgtaccactgccagcgcctggcccccagggtgagtgatttaacctctaagcctcagccaacttgtctgaaaaatggggataatgacagcacctgtctcaggtgatgataggattaaatgaacaaccttagggaggacttgttctaggggctgcctgccttaagcaccctataaatgttagctattaacactgggcagggctgcggtgtagggaaagtctgagatcctctgtggaggcctcatggattgagtaattggtgagaccctagaaagttctgtgtagtgggacggggtargggaaagaggctttgggtaaggcagcacccctgagcctgacttccatccctccagctcctggtctcccttactcatcatttgaggtccccctggcygggacgaggcacctaacaaagcctcccttgtataggtctgtttgtttcactaataaattccctgagcaacagctcctggggtggggtggcccagcagcctgccaggagctgacctggaagccgcaggaccacattgtttagtggccaccttggtctctccctgtatttctaccacgagctccagagatttggccaasatttttttagttcccagctcttatggcttgagaaagagctggacctaacctcataaagtgacagctttctctcctctttcttatttatttatttatttatttttgagacggagttttgctcttgttgcccaggctggagtgcaatagagctatctcggctcaccgcaacctcggcctcctgggttcaagcaattctcctgcctcagccttccaagtagctgggattacaggtatgtgccaccacacttggctaattttgtatttttagtagagacggggtttctccatgttggccaggctggtcttgaactcccaacctcaggtgatctgcctgcctcagcctcccaaagtgctgggattacaggcatgagccaccgtgccaagcatctcttatttattaattttttttttcccctagagataagacctagttctgtcacccaggtggtagtgcagtgccacaatcatggctcactgtcgtcttgaactcctggactcaagcaaccctcccacctcagcctcccaagtagataggactacaggcatgtgccaccacagtcagctactttttgtttgttggttggtttttttttagacatggggtctctctatgttgcctaggctggtctcaaactcctgggctcaagcagtcctcccacctcagcccccaaagtgctaggattacaggcctgagccaccatacccaccttctcctttttcttaaaccaaagctgtggggtatggtggagttccttataaaggaagggggaaggaaaccagtattaaactgagcacttactatgggacctctcataggccacttaatactgaccactccctatgagataggtattatttcagcccccttttacagaagaggaaactgaggctcagagtacaagcaaatgttcccaaggtcacccagctactaaggggtagagccygagtttgaatcttaatcccaaaccaaaccactgaaactttggggtcaatcaccaaaggtctgccctactctcttagagcacctgacgggctctctgttgactggagagaactgaccactgaggtgtaactagctccttctgctgccccatccccatactaaggctagtttgatggtaaaaattagtgacccagttcctacattgtcacacctgggaacccttcctgaagcttgaaaggaacagtttgagcacaaaggtccactttacttacatgaaggaacataaaggcatgagaaacagtcatctcaataaatgcaagacatgagcataaaagaggttctckgcctttccagcgttgttattacagagagaaacctacaattattttgttaaacaaaattcaaggctccaggactcatctctggagctgatatgtcttaaatactattatagtaggaaagggagaggagaaaattccccacccactcccccgatttggcccgtgtagcttccctttgagggtgtgtgacttgccatctgcaaaagtcatggccaaaacaggaactaacaggccaaactaccatcaatctagtcttctacagcaccctaacagagtgccagggtcctctgtcccctccgcacctgagggcaaagttccaggaagtttactgccggtgttaggaggtgagctcaagttcagtgtctctgcctctggctccacagaaaccagcccctatcacgtggcttctggaaaatgtgccctcctcaggattggtccagggagtagtcacaggtagagaaagtaaagggagcagcaattgaaactcgcccttgaccctgtgtccagtaaggaggtgaagtctgtctggctcactctctccattccctgccatgcccacctccctgctggccctgccattgcttcaaggagggctgttcctcctgggtgagayttttcacycttgaactagagtgcctttgtatgtggtcagggggagggtggaggaccctgggatctcccaggccttacaaaagtggcggcacataaatacaaacctaaaaaacagccatttcctgccagcaggtatcaactggccccacagcttcagctatggccaaagaggccagcgtggcaaggtcctgtctcagatctggctgatggcagggagccaagaggtgctagcaccctcctcagcccttcactttgatgaccgtccttcctcgtgatcatcaaagaggttagggttctctgccagcgtggctctcactttcttcttctccttgaagcgtcctgagttggagaccttgacgtgcttgccctttgtgctcttgtccacaatcttctccaggcgggtgttaaagtcgctgttggggcctccagcgtcaggcctcgggggttctgcatctccctctgtttgggcataggtgtcagggatctcatacagcactttgggagtggatttctttttccggaggaaagtcagcttccaccaaccaatttcagtcgtcatggcgctccctaagccaaggatggggctttctgctggagcagggtggggggagacaaaggggtcagtgggaaaagggggtgggtgcctttggaccagcttgctgcagactcctaatcatgggctgttttaagaattaaataaagggctgggcgtggttcttcatgcctataatcccggcactttgggaggccaaggcaggtggatcacctaaggccaggagttcaagacaggcctggccaacatggtgaaatcccggctctactaaaaatacaaaaattagctgggcrtagtggcacgcacctgtaatcccagctactcgggtggctgaggcaggaaaaccacttgaacccgggaggcagaggttgcagtgagctgagatcatgccactgcactccggcctgggtgacagagtgagactatctcaaaaaaaaaaaaaaaagaaagaagaagaagaagaagaattaaagaaagaatttaaggtagggctgaataaacccaagattcaggtcagtggggtgacacaatgcttttggagagtgtgagacaagaaaagggtcaaagtcaaggtcaagacagggaagccactcgccagacagagaggcagtgggacaggcacacaccattgccctgcagggttgtcaggagctttgagataattcctgccaggcccctcagggccacaggcaggtggacagcttgcctgagtcacacagcatccaggcctttgatgctcttcccaaacttcccactataccaccagaccctgctgccaggcatgggcagaccattgactggtagcatagggagggaaacaccctgtgcattttgcttggaattcattacaaaattaaatataattagtggcattccaagcaatttgaacttcccagtggtgaccagcagggctaaagtaactgctgggctgttcctaaggcaggagtcagatcctcaggctgggagtgggaagtcctgggggctgtcctagcctcatgaccactggcaagccaccacctctctgggcctcagtttcctcacccatcccatccagcactagcatttagctctactgttaatccctgcccacagaggtaaccatgcattgcaaagtaaaacttacgataatgggaataattactaagggatggttccctttccccaccaagcttccacaaggacaggagttggaaggggagctaaaaaggcagaaagcagttagaaggatcccagaagtacaggggagacatggtcatcacaggttgtaccttgcagggtggggcttggggctgaaatccaggcttctccactcacaggccatgtgtcctgccatggagctgccttccctgggggctcacctttgactaatttccacaaaggtactatatgagctagcggaacttctcggagaggaggttgcctggacatcattgattgctggggtatgtaagatagaagcagatgacagtctgctagatgaaggaagatcaatgacagaacaggtagaggaacactgatgactggtgaggtcggtggtcttgttctcaggatgcctagctgccggctgtgaaagctcccaggaaggaaggcgcagccagtgtacaccagaaagctagagggtatcacctccttttaaaaactggaagtgttcactccatttttgaaaaagaccagaaagacactccaaatgatgtgccttttttttttcttttttttttttttgagacagagtcttgctctattgcccaggctggagtaaaatggcatgatctcggctcaccacaacctccacctcccaggttcaagcgattctcctgcttcagcctcccgaggagctgggattacaggcatgcgccaccacgcccggctaattttgtatttttagtagagacggggtttctccatgttggtcaggctggtctcgaactcctgacctcaggtgatccacccacctcggcctcccaaagtgctgggattacaggcatgagccactgtgcccagcccaatagkgcctttctttatgtaggagtagaggatgctttctcttctctagttttctgatttctggaatttccatgatgagtatagattattttaggggtgggggagcatatcaaatttaggaaagaggagagcacgacgcaggcctagactttacgatgagctgaatgcctgcatccatacccctcgtgctctggtctcctgctccccamcccctccctcagagcacacagccggtggattccttcccacctctctgtctgggaagcagctcccacattgccagctctgtccctttagctgggctcaagtagcaagagaagctgaggggagatcttgtgcagctcccgctcagaaagtgaaggagcagtgagaggggctccataaatacttccagggcaccctggagaggtgagcacacctagggacagcctgagaggtttgttttggcagcttgccccacctgggcttagcacagccttgtacagaacttagtgttccagaatgggtttctggaaggaggtgggggagagcagagaaggaggaacagggcacttgcttggtctgtgggtgccygagtcactgccttgtctggaatgaggcccacagccccaccactgcccatttggggctgccaaggaacttggggaatggaaaaacagargatccagctcctgagactatcataaccaccagattttctagctccagagagaaaagggcttctgcctgtgccattaaaattcacctgttttaacaggtatttcaagttggcaaacctggggcttaactctccttggcataaagggagccacagatsacgaggaacttctcagcaaactgtagagatgggaacagcccttgtgccctgccctggggcctccaccaaggcatcaactctggtgcccttgcatcctagccttgtactctggtctctctagaatactctgccagaggccaggtgcagtggctcaaactataatcccagcactttgggaggctgaggcaggaggattgcttgaggccaggagttcaagaccagcctgaccaacatgggggaaccccatctctactaaaaacacaaaaacacaamaaattagrcggatgttgtgtcatatgcctgtagtcccagctactcgggaggctgaggcacgagaatcccttgaacccaggaggcagaggttgcagtgagctgagatcatgccactgcattccagcctgggcgacacagtgagactcttttctcaaaaaacaacaacaamaaaaaaagagaataccctttttgccaggccttcctgtctcttctgcccaggaggacatgtggggaccagtaagcaggtgtttgccccattagcaagcctgacttatggaaatctgagtttgcaaaatrgaaaaattagccgactattctttgttttacaaaataacccagctgtaggatctgtaaatagtcatcataaaagatagtgtaaaatctgatttgctttaaaaacaagcaracaaaaaaggtgaygtgatatccaaacttcccagtttctcaaagttgcaaagaacaagatatctacaaccgcctgcctgtgcctcaccacagagggctgaaaggggttgggggagtgggggcaggtgcttgggacttcaaacagacccagcatttrgtgacacatggtgggccctgcagttagctcgtgcaggttcctgagctggccgagctaagggctgggcccttgccctggggccttgcaatccagggatgatggaaatcagcccctgaggatgccagcttcacctctgctgtttgcacagctttggggccatgaaaggcctcatgggacagcctgccaccccctgtctttggtggccagcgctatagcatgcacatgggtgtcccaggagaggcccctccataccagctgggttctgtgagctgctctgaagggctttgcccagactgagccaggcccctcctgagctgggtcaagttaaccattgactggggcagaggtggaggggcagggggacagataggggaagcaagtcagctaatatgttgtaagacaaaaccccagaactccctcccccatccctctgcagggccccaatggcacttagggggcctgcaggatgagacaggggtaccctggataggaatggggagatgttcctaccagacagctggaaaaatgctccagactggggggtcagaagggtgggctccagttcagcaagggttaacagaaaactactcagcaggagctctgttggaggcctggattgactccaagaggccagtgggatgagtcttgagtggagaccaggttagaggcctgggttcctctttcctgctgggcttgtcagccctggaggcagaaccaggtgctctgactggggtctatgccttggtttccccacccaccagccctctgcctgtacctgtaatcccgactgctccaggctggaggtgagacctttcctagagaagcagttgagtgtaggagctgcctgggagggtgagactcgggmagcaagtggtgcctccgggctgctgtatcaggcaaggctcagccaggagaggtgggtaggagcagctrcacgtcaggtgcaagagaaacaggtgcaagagctgttacctgctctgctgcagctcctggagtcaaggtgaacctgaaacccagcccctcccggctaagtaaacagaagcagaggccggctcaagctgaygaatattcatcatgccagaaatccaatcccagcgcccctgcatccacccagaagccagggttctccagggaccgccacgcaggaggagggaatcccaagggagatctggggtcagggagcacaggaggctctcgctcagtttccccactcttgggtgtctggttgcacttcccagctatagccagggtcaccccacccatttcatcttctgaggaggcgcagacccctctccagcatggaccaccacctggatgttgcccagggcacaaccaggaaagagttaagggctgctgcttccattggcaggctgggtaggacggggtgcaccccagcttcctttgaactccctgagtcgaaaccagtcccggttaaactggttggcagaccggttcccaggctgtccctcccctgcctcaagcctcaaagtggggactgggttgggggctgtggcttcctcctgacctgaagagcccctcttcaaaaatctccctagggagaaaaaaaaaaagggcacagcctctcctcgggccaggctctccagacccaccacaacctcaaacattgtcatccctctcccactttgcttggaggtgggcttcaaggcccttgagatcttatgcagaattccgtgtttgtgggcagaggggcattgctttttctgcatagattatacttttatcagactctcaaagagacctgtgccagtgtccccactagcaaagtgccactggcttcaactcctcccagatgtccagcagtctattgaaagggccttcctgggtattataaagttggcaaaacctggagcaagttctcaaggaaaggagagatgggtccctagtgagtctggaagagaaggaagggcaagaaggcaggggatgggcacacggttggggacaggggtagagtgtgtgtgcacaggggccttcgtcctcaccgatctgcagtctcattgcccctgcaaacccaccattggccaagctgtgtgcagcgctcagccagggctgctcttgcagatggctccgtgtctggggagcgttgttttgcagccacccggaggtggcctgtcctatttgcgcttgcattctctctcccctcggatgggcatcgctggagagtggaaaacatctgctacatactcagtgtctctgccacttcctgggcccagtgctaccagcttaggtgcccaatccacccaccagctaccttcctccatggaccaggtgtgcgtgtcaggcaaagggtgaggcacggggtagagaaaaggcataaaatcccccctttccctggctctccctctaagttacatttgaaatcccagctcaccaactcttaaagctgtcccccatttccaatcctgcttctactcgctccagcttctgatggcctcttgggtttgtattctcctccatctgaaatagccccccttcccttaaaatgtccttgggtggacagtcctccaaagcctccccacagcccacagcagaacccgcttggcctggctctcctaggatggggcctctgcagcctcctctcatgcacacccacccctgccaactctccctgaacactaggctcttctctgcctgcctttgtaggcatgaggctgccttagaagggtgagattaggagtgctggctgtrctcttgggtaacaatgtcccccccatcacctgtgcgacccaagagaaacttcttttcatccctcagaacctgaattaatgatcacacctcccaccccgccaggagttttcttgtttccccttctgtgttcccatagaacctgctcatatacttctatttaacatgatatatataccatgattggtttccacttacagacttttagctcttagagcccagaattatgtatcactgatccagaccagacatacagtaggtacttatgcaagctcgaaaacacaaatgagaaacagaaacattgtttttacccaaagaaactgttawtgtagccaattgctttgtcccactctccctggggcaggtaaatgtgcaagaaaacccatttatttgccttcttgtggttccagccacagctggcttgctgtcatgctatcatctccctggggggtgatttgaattgaaggatataattttgtaaggtcccctacctctagtgcaaagtacacacagctgtcccagaaaggtgcccacagcctcctagatctgtcactttctataaaagcctcgtctactcagagtggatatctggttcagaagacaaaaactccttccagctcaggtgttgggaagagaccagaaggctagtgggatggrctttggtctgggggatggtaactcagagtcagttccccgttccccatccatagaaggaagggcttgccctggaggtactaattccccatgcctcggagatccagcctctctgatgtctgagcccaggggagcagattcctgttctcttggctccacactggagaaggagcccccataagtgccgtggcaggcctacctgtggctctcccttcccaagtgccaccagtcccaggtgcaggtgtgaggacctagcgcattaccagggaggggccagcctgggaagtcaggcacaacccctrgccttcagggcatttatttctgggaggagcagggctgggaggaaagtttgagataaggctgtgagctrcgaatataactcctcacgtacaggccactttattgctttataaaaattttcacctttggccaggcacagtggctcacacctgtaatcccagcactttgggagactgaggcaggcagatcacctgaggtcggaagtttgagaccagtctgtccaacatggagaaaccccatctctactaaaaatacaaaattagctaggcattttgatgcatgcctgtaatcccagctacttgggaggctgaggcaggagaatcacttgaacctgggaggcggaggttgcagtgaggcgagactgcaccattgcactccagcctgggcaacaagagtgaaactctgtctaaaaaaaaaaaaaatcacctttaagcacacctttctaaaactaggtttaagtgtaacatgctatatacatgcagtgtgcacgtctcaagaaatgtgttcttgttgagtaaagcaagttaaattcacctaagggagcccaaggaccttggtgcccttttggggtacacagccatggggccccattgcattacaaatctaatcagcctggcatatccatcccattttacagatctctgcccagcaagtagatctaggcttcagggacatttcttccctaaaacacggagaagagaggtgctgccattctcctcagctctccccattctctggaaggccaggagattggagatcctgggggtgtccagcctggtcgaggtgacaggtggggcaagaccaaagatcagtctctggtgggctacaccaggtgcagtggggaggcaggggcaggcagaagctgcattctgatctgaggtgggtggtggggctgccattggagggggctttctccttgttttcatgcgaggcgttcccttcaaggagatctcagcagggagtgggggtatgagcagccaatattagggggactgtgttccaggcactcttccaaatgttccataggtgtgaactcttgatccccacagctgccccttaaggtggattctctaaccgagtacacccatttgcaccccgtcagcaattttcctgttgctgtttgcattcgtttcctgtagctgccatgagttaccatgaactccatggcttgaaacaacagaaatggattcttctgacctatccagtaagtcagaagtcagamatgagtttaactggtcaagaccaacgagttgccagtgctgtgatccctctggaggctccagggagaacctgtccttgattcttccaagctcctggtgactgcaggcactcctgggcttgtggccacatcactccaatctctgcctcctttgttttcacttctgtgggtttggctaaactccctccacctctctcttataaggacacttgggatggcatttagggtccacccagataatccaggattctctcatctcaagacgtttaacataatcacatgtgcaaagagtctttttccaaataaggtcacactcatagcttctggagatttgacatggttatctttggagggatcatttttcagccttccacgttcttcattcagacaacctctctgtattgtcagacataagtgkgcttcctacatcctttttcagggaaggacttgctgccaggtcacaggagtgtggtcagcagttggccatcagctccttcaaggtctgtctcagcgacagaaagccaccttgccctagggctaccattctggagcagcgcacttctagggataaaaaagcccagccatttcagccccatgaaggacattctcggagcaatattcactcagaggcctccaccacattgactaaagctttgctgggcctgcagtgcagttggatttctgcctctgcccagcattgcttccatctgattcctctcacaggaaatgattcctaataaacatcttgccccccaaaacaccacctacttctgtagaatgcaacccatgacacagacatttccatttttgccagtatgatggaagtgaagtggtcttcttcatgtcatttatttatttagagatggagtctcgctctgtttcccaggctggagtgcagtggtaccatcttggctcactgcaacctccacctcccaggttcaagcaattctcccacctcagcctcccgagtacctggacttacaggtgggcaccaccacacccagctaatttttgcatttttagtagagacggggtttcaccatgttggacaggctgatctggaactcctgacctcagatgatccacccacctcggcttcccaaagtgctgggattacaggtgtgcaccattgcaccatttcaccaggcccatgtcctttatatttgcatttccctagtgtactggattgaatagtgtccccgaaaattcacgtccactcagaaccccagaatgtgacctgcattggaactagggtttccagatgtggttktcagatgtagtcatcctgggttagtgtaggccctaaggttgaggagtagtgtccttacaggaagaatgtcatgtgacaatggaagccatgtgacaatggaggtacctgcaagccaaggataccaaggcctgccagcagccrcagaagccaggagagaggcacagacagcatstcctctgcaaggaaccaaccatgctgacacctggatttcagacttcaagcctccagaactgygagagtaaatttcttttctttttttttttgggacagagtctctctgtcgcccaggctggagtgcagtggtgcgatctcggctcactgcaccctccacctcccgggctcacgccattctcctgcctcagcctcccgagtagctgggactatagacgcccgccaccaygcccagctaattttttgtatttttagtagagacagggtttcaccgtgttagccagagtggtctcgatctcctgacctcaggtgatccacccgcctcggcctcccaaagtactgggattacaggcttgagccactgagcccggccctgtgagagagtaaatttctattgttttaagccacccagtttgtggtgatttgttacagcagcaccaggaaactagacactttgtttctagtaaggttggacatcttttcatacatttattggtcatattctctgaaatgatctttccttccttcttcccttcsttccttcctctctctctttctctttttttttttttttctgagtcagggtctcactatgttgcccaggctggtttcgaactcctggactcaagtgatcctccttcctcaacctcccaaaatgctgggattacaggtgtgagctaccatgcccagccaaaatgaccattttcttcaatgtagaaaaatttctgcatctcatcatatgggagttgtctttctagtaaccactgacttaaaaaaaaatcattgcatttatggatccctggcacatttgcataattctattttatttatttatttwtttttttacagacagggtctgtctccgtcacccaggctggaatacagttggcacagtcatagctcactrcagcctcaaactccttggctcaagcgatcttcccacctttgcwtatttctacagctttccagggacctgcttgcccattgattgggaatcctaacctatggaattaaatttcaaccctttataatggacctgaaagttcttcaagatctccctttgccggtctcttcaacctaatttctctccactctccccataaacatccatgctcccataataaacttcttccttctggaacagccattctctcacctctaggctttgtccttgcttttcctttttcccagaatgacacctgtcacctcccttcctcttttctctcctctcctttctattacaattcatgccatcttgcaagactcagctcaagtgttacttctcctaagagcctgctctggtggtgttctgtccttctcctttgccttttcccatgctgagttggatactccgtctccttctttctgttcccttagcactctgagcatctctgagtggacctcttattagcttttttattttttttgagacagtcttgctctgttgcccaggctggagtgcagtggcatgacctcagctcactgcaacctctgcctcctgggttcaagtgattcttgtgcctcagcctcctaagtagctgggactacaggcaggcaccaccacacccagttaattttctgtgtttttgtatttttagtagagacgggattttgccatgttggccaggctggtcttgaactcttgacctcaggtgatctgcctgcctcggcctcccaaagcgctgggattmcaggtacctcttatttgctttgcatagattttttgagcaccttctatgcatgagcacagtactctcacaytctgtgacgacacactctggagatgtcgtcatgggatwtggaaggtggtgggcccctcactcaacatacttttacttcctttgaggcctaggactgtgtcttygtgataaggtgctcagggtgcataaagttgaactccaatggaaaagaggtgaatggatgggtggtttggtagtatccttggttttccttttcttagcagattagattcccaccgccttccatgataagcatggtgaaataatgaaatacagtggcatccttagaagatgacaaacaggacccatttcatgaagccacccagggagttctttttccccagaagactaacaaaggtggagggatgaggtggccaggagggcatgagttgccagagttaagggtaaaatgagtggccccagagcatgacccaggtgactggccccacatagactttcactggtctgtaccaaactcgtgaagctgaccacccctaatttcttctccctgatttcctcccttcactcccaagaggctcagaggatgttgactccaagtcctgagctgtagaggaaaggatgagaaaaggatctggggaccttgaacctcttgtcccaagacaaagcaatcatggtccccacttatcacaactaccaccaacatcaaatgccttcctgcatatggctttccttcattacaagcatccattaagctcctgacactcaawgtcaagagtcacaccggatgctggggttatagagatgaacaagtctgctttggcttcccagcccacaggtactcgcagactaggtggggagacagactgaaaaacgcaacatgccgggcacggtggctcacgcctgtaatcccagcactttgggaggccaaggtgggcagatcacgaggtcaggagttcaagaccaccctggccaacatggtgaaaccccatctctactgaaaatacaaaaattagccaggcatggtggcacgtgcctgtaatcccagttatttgggaggctgaggtaggagaatcgcttgaacccaagaggaggaggttgcagtgggctgagatcacaccactgcactccagcctgggtgacagagcgagattctgtctcaaaaaaaaaaaaggaaagaaagaaagaaagaaaaaagcaacacagtggttacactccgggcagcaagaggcccaaggctgctatgtttccagagcttccagcctagcaggcagatacaccacacacacacaggcacacacaccacaccccatagtcagtgtggctgtgagcaaacacacagaccataaagtaataaaaatatagcagataaaataaatgagttatttgaatgttgaaagtaagccttcttttatggatattgcaggaggataagtaatgggctccctttcccagaatggggtgtggtaagaatgaactttggaaaggggcagggcctgcaggggtgggagttctgagtgtctggcacaacaactggggagaaaataggaatcaggcccaagggaggaagagacctgaagctgttgtggctgagccaaaggggtaggcaggggtgcaggagaagcaaaggcacatcacacagagaagaagaatgcaggctgggtagcccaacaggcctgggtttgaatcccagcctcatcaactacccactgtatgattttccttttttttttttttttgagtctttctctgtttcccaggctggagygcagtagcacaatcttggctcattgcaacctctgcctcccaggttcaagggattcttctgcctcagcctcccgagtagctgggattacaggcatgtgccaccacgcccagctaattttgtatttttagtagttggggtttcaccttgttggccaggctggtctcaaacttctgacctcaggtgatccacccgcctcggcctcccaaagtgttgagttccatgtgtgagccaccgcgcctggcccactgtatgatctgtatgattttcttttcttttctttttttttgagacggagtctttctctgtcacccaggctggagtgcagtggcgcgatctcggctcactgcaacctccgcctcctgggttcaagtgattgtcctgcctcagcctcctgagtagctgggactacaggcacgtgccaccacacccagctaattttttgtgtttttagtagagacggggtttcaccgtgttagccaggatggtctcgatctcttgaccttgtgatccacccaccttggccttctaaagtgttgggattacagacgtgagccaccgcacctggcccactggatgattttcaacatgttacgtaattaatctttggcttccttgcctttaaaatctggttaatgatggtacccacattataaggttgttagaagaatcacattagataaggcttgtaaaacatttagatctacactggcacgtgggcatgtttatcacgtaataagcaagctaacaacaacaataatggatggcaaggtaggctgcctacacggtgcctcggggctctgtgcttccttgtccaaagctggtgcagccctggtatatcctcctcacctctctacatgtgctgcccctctcccagggtcccatctgctaaatcagcagagaactgagagattcctggtcagaaacctaccatacctctctctgcctccttctagctgctgggagccccgatgactaaagtctcctgaaggagatagagtcgatgccctggatgccagaccaattatgtgcttatctacccacagaccctgaagttccctgtggccttggaaaagtgcagaaacccgccaaaggcccatgctcctacactctttgggaacacagaagcatgtgcctttggcaggctctcccccagagcctctgcagtcagcagaggcaggttctctcccagagcctctggctttgggacagcctccctggagtcagtagctgggcagaactgttctcaaacatccttctgctccacgtgagtcaccttggggagctgtgggtggggctgaagtgctggtggtccctgcttccatcaactcacctgggctgggtcttccagacccaccctgtcctgttctgcccagcctgttggttcaaggaagagagatagatacaccttgagggcagggcagtgccttgctcttgagatgtcccagacagcccsgagcacatagytggggcccagttaagtgtgtgtttaatcatggaggagcctgagcaattcctacagtctgagtcaggctgactcagatgggagccaaattcccatgaaagatccctgaaaaggcccttaattcagcyctatgagccattttcagagcagtttttcaatccgttctataataataatgatcatatatgacatatatatatattttgagatggagtctcactctgttgcccaggctggagtgcagtggcgcaatctgggctcattgcaacctccgcctcccaagttcaggtgattcttccgccgcagcctcccgagtagctgagtagctgggactgcaggcatgcaccaccacgccgggatggtttttgtttttgtttgtttgtttgttttttgttttgttttgtttttgagatggagtctcactctgtcrcccaggctggagtgcggtggcgcaatatcggctcactgcaacctccgcctcccgggttcaagcagttctcctgcctcagcttcctgagtagctgggattacaggcgtacgccaccacgcccagctaatttttgtatttttagtagagacagggtttcaccatgttgatcaggctggtctcaaactcctgacctcgtgatccacccgcctcagcatcccaaagtgcckagattacaggcgtgagccaccgtgcccagcgtgttttttgtttttttcagagatgggatttcaccatgttgatcaggctggtctcgaattcctgaccttaggtgatccgcctgtctcagcctcccaaaagtgctgggattacaggcgtgagccaccgcgcctggcccatatatgatatttcatatagggagagtttacaaagcatgagaaatacagccacagtatgttgtaaactgtcatgagttactagtgtgtttatttaagcctctaaacagaaataccctgagataggatagctgttatctccatgtggggaaactgtggctatcagataggttatagaaatggtccaagacctcactgggcagaatctaggtcttcctgctgctgtatcacactatgcatttcaatcaaaaatttactaagcctcaagtgttgtgctgtggtgaacaggagctggggaaggaatatttagaaatggcatacccagggccgggcgcggtggctcacgcctgtaatcccagcactttaggaggctgaagcgggagaatcacgaggtcaggaaatcgagaccatcctggctaacacggtgagacctcgtctctactaaaaatacaaaaaaattagcckggcgtggtggcgggcgcctgtagtcccagctactggggaggctgaggcaggagaatggcgtgaacccaggaggcagagcttgcagtgagccgagatcgtgtcactgcactccagcccgggcgacagagcgtgactccgtctcaaaaaaaaaaaaaaaaaaaaaaaaagaaaaggcatacccagcgctgtgagatcctgggggatctggcctcagcctaccctccctccttactctacccacttcttggccaatctcaractctcccttagcttcagccaccactcggaccacagattagccagcttgtgactctccaagctgtatctccagccccgacaactccctcgaactccaaaattatagacccaagtgccttctgcacactttccatctgggggtctcccagcattgccagactaggttcaaagctagaccccctcctccscaacacctgctcagcatcctgcatccctgtctcaggtggtggttcccacctaatcacctaggtgtcatccttagtgtctctctcctccacccaaacagcmaatcaattgccaagtcctatacattttcctcctaaatattcctcagatccagcccttccccttcctcctcatatcttgtgtcccagctcaggctataatccctcgataacaacctccttccagcctccttgtccccagtcttatctcccatgcatccatcatcccagcagcctatctgtacaggttcctccctgcctcaaaccccttctgtgattcctctgtctgaagggatgaagtccaagttccttaataagtctccctttgatatggcctttccacccttacagcctctcctctagccactcgctgcctcaaaccatctacggyatagaggttggcctgcccgcggagccgacttcatcttgaaattcttcatcattttstaacaagcagctgtgcatttccattttgcactggacctcacaaattacgttgcccgtcctgcctgcctgttgttgcttgcacccctcttgcagtttgtggccacctaagctttgtctgtgtagtctcctccacctaaaactcctcttcccacatcacccagctatcttcagctcttcgtttagactcaatgtaggtgttctctttgggacgtctcaccgactctcytccttccccttccctgccctaatcgcccaacacgttgcaggtgctcaaccatgtctattagagaaactgaatgagraggcaaagcatgacaagtgccacaagagacctgcacactgctctggatggtaaagcgacgcaaggwgggaagaaggtatttgcaacggcctcccagatcggcgctaggaccccgccagcagacgtctcaatctgcgtggagargacccagygcycgccaggggaagcggctgccaggctgggctctcgagcgccgcctgtcgcaatcccacggccgctgcagcgcaccccctcccgtcccctgccctgagcccgcctcgcgtctccaattggctgtctccattctcccgcccctcccgagctcagccattcggagcctggggtgggcggggcttgaggcctgagtggagcgtaaaccctgaytggctgtacggaaggcggcgacgtggccgaaggatkcccgtttgtgtctaaacggaggctcggccacaacgccactggattggtggtagggcggggcgggccacagtctccagcctgaagcggaagtggaggaaagatggaggtgtggggacaggagctgggtgtgctggggactggccgcggacccctaacctgtgtctccggtctccctccggragcggctcaacccagcccatcgctctggccccgttctggccctgcagggtggtggttgggacgttgaaatgagcgcgygagtggtacgtcctctctccgcgctcacgcccccctcctcaccgtgtttcccgccaggaccatcagcacgtgcccatcgacatccagaccagcaagctgctcggtaggagggggcgccaccgcgcagctggctgtcggggggaggcctgtgcgttgccccctgtgtccaatagccgggagctctgacscctgaaagcctgagtcgagatgctgaccactggcctcgttctatgccccatctgtggccagacctgcttccctgatagcagcgggaacgaaccatatgtacagtctgtttgacctgcgttttctcctttaataacatatgttatcgtatcattcagggacaggataaatgactcgctttaaaaacagtcaaccactgccgggcgcggtggctcatgcctgtaatcccagcactttgggaggccgaggtgggcgaatcacctgaggtyrggagttcgagaccagcctgaccaacatggagaaaccttgtctccatgtctccatgactaaaaatacaaaaaaataaaaataaaaagtagccgggcatgggagcacatgcctgtaatcccagctactcgggaggctgaggtgggagaattgcttgaaccccggaggcagaggttgcggtgagcagagatctcactattgcactccagcctgggcaacgagagcgaaactccatytcaaaaagaagacaaaaamcagtcaaccactaagtggcacatctgaattggaacttaagtctgtctgacccactgtccatgccttttgcattatgccaggaaaaaaaaaaamaacctcatttaaaaagcttccacctcccccttgattttaggaggaagagggacctaagacccagttgcaaatgaaaaccttttagtgtccaggccatctccaggttgtctgtatggggcttacatacttcctccccagttcatagtcagggaaggcctcttcatctgatcacacagctcctggcattttaaaatgcttattggattcatggatttgatgccaatcttgtccttaagatggtgtctgtttgactaccccagtccgttgcttctagttctgtgacatcaacagaatttttctttctgaaaactttacaggaatatagcagagagagtataactgatactagtgtgggaccccagcgtttgaccggttggcagagttcaagttctgaattcaccactctgtagtgccatttagtcagtcctgcttggtggtcacgggggaagcttctttagcctcccttcagatttgtactggcccttcagcccatgtgcagtcttggtgtgtgagcttgttcttggtcatgaaaaggaccaataaaatgaccaccattcattgagggtttttttttgtaccaggtgctgttttaggcacttgacatgataaaaatgatcactgtcattttttgagtccttgccgtgtctcaggcacactgttcagtgttttacctgcattcccttttctagtcagtgtcttattattccccattttacatgtgggaaaactgaggcacagaatagtagacttgctcaasaaacttgataacgagaacccaggaccatctgaccacaaagctcagctcttagctctcactgaggaaatatgcatggctctgaagccacaaatctgggcccagactttgagaggtcagtcccattggtattcacatgtacagggtggtacttcactgttcacaacagagtcatgttatctagtccttagggcgctgtaggtattaggggctttgcagctgttcattcatccagtacttggcataaccatcttgtattttccattgtcatggttaaccccagccctgaggaaatggaagttgagcagcatcctcttgtcaggaagaaagatataattacccatagaagcaaaaatattatggggaattgagaatggtcaaaagtggcactttcaggaccaatttaaacyttttgttatccctgtgttgaggcaattgctctataaaaatcacactgctaatgaagtcagattgtcagagcctggtttagccccaggcayctctttgggcttgtctttattcccatcttcccatgacccccatactttaaccaatgtaaagaaaacttttagactaatttcagtgtatttcactcgaattagtgatggaattttggtgatgtgaatggkaatgctctaatttgggtgcttctcatgtagattggctggtggacagaaggcactgcagcctgaaatggcagagtctggtgctgacgatccgcgagaagatcaatgctgccatccaggacatgccagagagcgaagagatcgcccagctgctgtctgggtcctgtgagtgcttaggggctgtcactggagtcccctctttgctgaggtagtatgtatcagctgagctactctcttgttatttagccaccagggctggcctttagagagggagcgatttttatttgaggtatagatgctggcttcttccactatgaaatgatttagggaaaagctacacactaaagttactggcagtatattatacatgaatcagccacctgcagtgcccagartaggtgaagaagatactttagttctcgaaatcccgtctcttgctttctagacattcactactttcactgcctaagaatcctggaccttctcaaaggcacagaggcctccacgaagaatatttttggccgatactcttcacagcggatgaaggcaagtgtgggccaagggcyggtagtatgtggttggggacatccaatccgaggagtcatagcctctgtggtctctctgakgctccagtggggatgcctacatagaatatttcctgaactttcactctgtctctatagtttactccaaaagtggatcctatccctgagtttaattttcaaacccactgctttagggattgcctgcactcttaaagtgggtggtccagccagcagagttgaaagaaggacaaggagtttgtgtttgatgtgatgtaaaggctgggagaacttaccctgtttagggattgagctgggatgtggctgtcgagtgcttttctggcttaacattgtttttctgttcttactcaggattggcaggagattatagctctgtatgagaaggacaacacctacttaggtaaagtggcccggcctgggagccctggtatccatggggaagcccactctcagagttctgagataccaggcttataggaggcacagtctgtgagtgrgaagagactggagtgtagatgttgcccatttgtaggtggtaaaatcaattgtttttgatggaattgattttccctgagtggagtgctgggggaaggaggaggtccaggccggtagtggccattcgccgtgcctcagcgagcaggtgtgtgtgggtcctccaccactcacctcttggttagcgggagtgtgctgcccccacccccacccccgcacccccattctacacaaggcagaagaggcacgggttttyctgggagcgaatatcaagtgcctgagagcaactacaggactaactgtgtttgggttgggtgtagtataaataataataatggctaatatttcctgagcatctactaaatgcaaggaattgtgcttggtgtgtcatgtggattctctcttgcatcttcatgataaatgttattgtcgctgttttaccgatgagggttggattagaggggttaaacaacttgtcttaggctccacagctgggaacaagtggggctgggaagctgacttcgtgctcttcaccaccacaaaggatgtgtgtgcatcctggggcatgcctgcctcatgtgggggtgtcctgggctgaatttcctgggcacttctcagtggaactctctagcctcctggttcggaatgtcaactatgagatcccctcactgaagaagcagattgccaagtgccagcagctgcagcaagaatacagccgcaaggaggaggagtgccaggcaggggctgccgagatgcgggagcagttctaccactcctgcaagcagtatggcatcacggtgagcggcggcagcctcttcgcagccagaggacacctgggcccctgcttrtcttcctctgaccccgtctgacccctcagcctggttgcrccccctttgggccagtgtcttacttttcttcggtctttggatgttttcttcaatctgttggactccacctcttctcccctctctaggrcraaaatgtccgaggagaactgctggccctggtgaaggacctgccgagtcagctggctgagattggggcagcggctcagcagtccctgggggaagccattgacgtgtaccaggcgtctgtggggtttgtgtgtgagaggtagagaggcctcagcttctcctggtgggggtgctttgcctgtgttccccagctcatgacccttctccagttgtcttgttcccatataacatttgaactctttacacacctgaacctgtgggggccttgcccatttgaccatgtggcccaggccaaagcccagtgttggccttacgcatggtcggcaggagagtcagttgtgtgctctgttgaagccccacagagcaggtgttgccaatgctgyggttcgtgcagaagcggggaaactcaayggtgtacgagtggaggacagggacagagccctctgtggtggaacgaccccacctcgaggagmttcctgagcaggtggcagaagatgcggtaagatgggccttgtgatgagctgtaggagtggagtgggagctgcttgtcccctccccacccccaacagcccaacccaagacccagagagaagaagggaggatttctgtgagagtgactgtaggtagaagggcccaggaggccctactcctttatttttctgagtataggtgagtgagtgccacagaggctttgcaaggtggttcgctttgaactcggaacctccatcatgtgagctctctgaagatgggctttctttggggtagcttagaggccactgcatttgaacagtgtgctctctacagaagcagctgaggcctgtgggaaggcagccccaccctcctttttaaattaatttatttttgagactgggccttgctctgttgcccaggctggagtgcagtggcatgatccttgctgactgcaacctctgcctctcagcctcaagcgatcctcccaagtcagcctccaagatagctgggattacaggtttgcaccaccactcctagctaattttttattaacrtctttgtagggacaggattttgccatattgcccaggctggtctcaaactcctgggctcaagcaatccactatcctcggcctcccaaagtactggggttacagacatgagccaccatgcccggccctttttaaatccatcttccatgagctaacactctctttccctttccagattgactggggcgactttggggtagaggcagtgtctgaggggactractctggcatctctgccgaggctgctggaatcgactggggcatcttcccggaatcagattcaaaggtgaggaggccttctcagtctgtctctctctgatcactactctaaccataagaaaagtgtcatttgtgtctgtaamggcatcacttgaagttcatagctctaagaccaggtatagtccaagggaggcagagtttcacacgtcacatgtcagagttttgttttgttttttgagacagagtctcattctgtcgcccaggctggagtgcagtggtgcaatctcggctcactgcaacttccgcctcccgggttcaagtgattctcctgcctcagcctcccaagtagctgtgattataggcgcccaccaccacacccctctaattttttattttgtttgtttgtttgttgagacagagtctcactctgtcgcccaggctggagtgcagtggcatcatcttggctcactgcaacctctgcctcccgggttcacgccattctcctgcctcagcctcctgagtagctgggactacaggcgcccgccaccacgcccggctaattgttttgtatttttagtagagatggggtttcaccatgttagccagatggtctcgatctcctgacctcgtgatccgcccgcctcagcctcccaaagtgctgggattacaggcgtgagccaccgcgcccggctaatttttgtatttttaatagagacagggtttcgccgtgttggccatgctggtaactcctgacctcaggtgatccacctgcctcggcctcctgaggtgctgggattacaagcgtgagccactgcgcccagcccatgtgagagttaaattttgatgtcctttttcttggtgtttggtacagggtgtaggggtaaaggcaggtgggaacactacagagcagggatratgggccatactgccatttttgscacctaagtcagggctgcaaatccttaatagagttggaatgtgcagycattgacctcatcaagggctttggtttattmtggctccttggctcaggaaaattctccccscattgctgtggttctttgctctccttccaggatcctggaggtgatgggatagactggggagacgatgctgttgctttgcagatcacagtgstggaagcaggaacccagggtaagtgcaccatcccctgcagccctggcaaaagtggggtgctcaagggcccccacrtgtctagaaacaaraaatgcagcgctaagatgaggcttcttgcacatttaactgtttctcaaaaccttgatgaggatgtgagctgagggggaccaagagaggttttttttttttttttggagacggagtttcgctcttgttgcccaggctggagtgcaatggcatgatctcagctcgctgcaacctccacctcctgggttcaagctattctcctgcctcagcctcccgagtagctgggattacaggcatgcaccaccacgcacagctaattttatatttttttagtagagwtggggtttctccatgttggtcaggctggtctcgaactcttgacctcaggtgatccacctgcctcggcctcccaaatgctgggattataggtgtgagccaccgtgcctggcccaagagaggttcttaaaagttgagagtttagaaactctcaactttttagagaccacatgtgggccagctgttatggtaggagggctctagggggatcggggccctggagtgtgacatgacccccgccccaacagcagagaagacgtagtggtgtctgagccactagagggcggtgcaggatgaaactttacctcctgcggtccaccagagcagagagccggcctttctacccctctgaacccagctctggtcctcctctcagtctgggagttggaaagtggtacctgattagagctgagacacctgggacaaggtagccttcccccttggattagaacaagaagtggctttagcacagtgagtctgtccgtattaatcctccagkgcttctcacacttgagggtcttttccttctccagtcctctgatcctttatcacttctctgtctcttcctggcagctccagaaggtgttgccaggggcccagatgccctgacactgcttgaatacactgagacccggaatcagttccttgatgagctcatggaggtactgtcatctctggaagatgcaggggggaggcatggcaccagcacaggtggcytcactccagatgcctgacctgacccctcctgtttgtgtgaagggtgtgagtgctatttgtgtcctacagcaggagcctcacgtattagatgcctcctattcatccagttacttatcaggtacctcctaggcacctggcactaycttaggcaccagaacttgggtggtgaataagacagtcaaagtccttgacctcatggagcttatattctaatggggaatgcagactggaaagaagataaataaataaaatatgcaggatgctagatggcaccaaatgccacggagaaagagaaagtaggggaggatgacgaggatgttggaaagggctatggttttgtatctggtggtcagggaaggcctcattgagaaggtgacctgtaatcaagactgcaggcggtgcagagagaaccatgcagatgtctggcagaagggcttcccaggcagagagagcaagtgcagaggtcccgaggtgggagcagaccttgcacagttgaccagcaacatggaggctggtgtggctgaggagagagagctggtggggagtagaagagctcagagatgtagcgtctgaaccttggtttgcctctgagtgaactgggaagctgttggaggtttcgagcaggttaggaacatgatctcatttgtgtttaaggaygatccctgtggctaaggtgttgagcagcccagcrtaaggagccagcgttcttggacctttgttgtaaggctgggaggacggggtcctgtctttgttaatctctgtatctgctcccttcccagtagcctgctggttcggagagcctcctgaaagttctgtcctcacccagttctctcctctttctgcccagaggctcctcccagcctcaaggggagaggacaaaagatatctgtgaagttttaacggcagaataggattgataagttaatatggctggctcttgtattcttttcagccttgccttaatccagtgcttctcaaacatgtatttctgttccctgaatctcattcctcccatggagacaaaataaataccttccctgggcagagagaaccctttgagtctctgtattctcagttatctgatcccaggctggggagaaaggacagaggtctggggttaggatgagataggaggtggggactgaagggtgacagtagtctctcctagcgcttacagtgttcagaggaaactccttacccagagtctagccctcatgtctcatttttgcatttcgagtagtccgagggcttagattctgagttcttctctcagtttgaaccaatttatcttctttttttctttcttccttttttttwaaaaagagtttctctgtcrcccagtctggagtgcagtgcagcaatcatagctcactataacctcaaactcctgggctcaagtgatcctcccgcctcagcctcctgagtagctgggactacaggcatacaccaccatgtttggctaattttaaacatttctgtagagacagggtctcatcgtttcccaggctggtcttgaactcctggcctcaagcgatcctcctgccttggcctcccacagtgctggaattgcaagtgtgagccatcatgtacagcctgaaccaatctttcttctgtcctcagcttgagatcttcttagcccagagagcagtggagttgagtgaggaggcagatgtcctgtctgtgagccagttccagctggctccagccatcctgcagggccagaccaaagagaagatggttaccatggtgtcagtgctgkaggatctgattggcaagcttaccagtcttcagctgcaacacctgtttatgatcctggcctcaccaaggtctggcttccccttgatgcaaggctctgccatcttgagcagctctgcctccttgtattcctcctcttgttccatgaccccttaaaccccatccctgcctcctggccattgccatccactggggataggggttctctttgggacaagagggggaggtttcacatatacaggaagaatctgcttgcttcctgagtaggacaggggaactgggagtgggttttccttaaaaggaaagggtttaaggatgtgagggtaagcggccagttgggggtttggtttcccgagcctctcacctccccagcagctgaatgggaatgctcaggatgcacagctaacccagcactcacctgagtgccccgcacaggtatgtggaccgagtgactgaattcctccagcaaaagctgaagcagtcccagctgctggctttgaagaaagagctgatggtgcagaagcagcaggaggcacttgaggagcaggcggctctggagcctaagctggacctgctactggagaagaccaaggagctgcagaagctggtgagatgggaaagggaggcctgccagtgggaggactcccagtctgtgcaaaatgaggccctgagcacccctgcttctgcccacttggtatcactctttcagattgaagctgacatctccaagaggtacagcgggcgccctgtgaacctgatgggaacctctctgtgacaccctccgtgttcttgcctgcccatcttctccgcttttgggatgaagatgatagccagggctgttgttttggggcccttcaaggcaaaagaccaggctgactggaagatggaaagccacaggaaggaagcggcacctgatggtgatcttggcactctccatgttctctacaagaagctgtggtgattggccctgtggtctaycaggcgaaaaccmcagattctccttctagttagtatagcggacttaataaaagaggaaaaaactcttgcttcagtactgacagttccttatgctgcttctctgagcctgcagttgaggcttcgcacctgttttcgtggggttcttgatccaggtgggctccctgatccaggtgggctccccaggccatcagctgtcactgtggagccccaagttgaggacttttcccctttgcttctggtgataaagaggaccccacatctacaaatggttcagtaaggggctctgggatggctacntgtgggcccctttccataaccaggcccaggccgcccgactcaggccagaagccctgggggagcrgtcaagcagcagccttgttggagccagcaaagctgcattttccttttaatcacagcttacctccaggcagagggaaaatgcggtttggggaggaagggtctgataaacaaggtggagacaggagctgtcaccttccctggctgcctgtccacttcctgcccataactgcccgctctgtgatcggatagagcccaccccaggatagcagccctctcccaagccacctacccatccccatttcccaggaagggtaggggttgggggtggcyggcaattcgattttaatttcatagcagagcagttgattcatggctctttgtcgctggcgttgactcccgtaatgactttccatcaaaatgaaaagtggagtgacaccactcattattcctgctgcttgttatctcagttctggggagggccaccccctccccactgcctttcagccgtcctggacagtgagtgatggcgcctattaatcaccgaccccgcggactccagccaaaggagagagagataaggcagcatgaactgctcgaagccgttcctatcaattaatgtcaacccaccacttccccccaatctttgcctggtcacctctttctgggggatcaggggctgaaatgagaagtccgggaattggaaaaatattggtgttgaacatggaggtaagactccgcagactagcagggtatagaggaggtaagtggactgcactctggcctcaacrctcaggagggatgctcttggcttagggaactgcctgctgctcttggtccctctccctctgggagattgcctkctagctcctgccccacctgttcagctgctggctccgttggccatctggccagcctcttgcagtagcagtcagttcactgaggcatactacccttgcccactctaatgtcctttgcccagtcaccagctgttacgcagactccattgcttacagcaatggagcttcagggagaaaccccgtggaccaggtgaccatggcagaccgggttcaggcctccaaagcttctgcccctgcgcttgcagatgagcacctgacctgctttcccagccctgcctaaggtcagcgaggggaagcagtrctcactgaggtttggctattttcccaggaagggaagtgggtttagatagagttttctcagctgattttggcccccttggtaagcagtgtggttaggccactgctctggatcagagatactaggtgactgcttaacaggtgacatcaaggcccaccctgatccccaggctgaggcaagtggtttcatgaaagcctttaactcgataacattgggtttgttctccagaacctttagcctccctttcctttaccgccgcctgcttcctgagtccagccctcctggccatgctgaaggcactgaagggatccaccyggctggttctccctggcaagagcagctctgtgtctttcaggtctgcctccagcttccctgagcttcactggttgtatttgggttcctgcttgtgtatctcagaatgccctcagaagtcgttgtagggacagaatgagttaagatatgcagagctcttagaacgctgcctggtgcggaggaggctcttgstggacatgtgtgagctcttatttttggtttggggaaccatgatgaggactctccatcctggcctaacttgtcttcttggaaaggagaggtgaggggctttaggggagcttgagaccaagtttcaagcagtcaggttgaaacttccctctttcagggaaagagggaagcggtgcaccaagattacaccctcagaatccttagtttgatgtgaattatgctgccaagagcacactatacttttgtgttgacttttatcccacctctttccagagaggatttaaggcaacgcctctcactacttggctaagactcctcacccggcttcagataaggaagcagcgagtcacctttccaaaattctctgcttgctaaatccagccayggctcagccccactcactgcctctctgcccaaacattgcctctctccctgcgtcagttctaccgtgtcctctccggtgtggttctctttatagaccacaaaagtaggatccctttgcactgcagcctgcagtggctgactgtgaacatgggataagtggagtgctaaggctcgttcatctgggccccagcggtccaccccctgtgcccctctgagggcctgccagtatcatggggagtctggcacatctagaattcctttcctattgccagttcagagcagggaacaagctgcatcattcagagtgaacatctcctcacccatctaaagaattaacctgctctggagacctggccgggagttgaggacaaaagaaaggcacatccccagcctttgggagcagaagccaaccttgctggagctcctcacatgcacctcccaaccaccattaattccccagaattaatggttgcgtacagtttctccccagaaacccaggtcctgtggctcttctctgccttttcatacactcctacctgttctgttaatgatttttatttcatctgtttttaaaacttattatttttgagacagttttgctcgtcacccaggctggagtacactggcgcgatctcggctcactgcaacctttgcctcccgggttcaagcgattcttctgcctcagcctcccaagtagctgggattacaggtgcagtagagcctgggtttcacagcattggccaggctggtctygaactcctgacctcaggtgatccacccacctcggcctcccaaagtgctggtattacaggcatgaaccaccatgcctggcctaaacttattttatttatttatttwttttttgagacagarcctcactctgtcacccaggmtggagtgtagtggcgtgatcttagctcactgcaagctctgccgcccaggttcaagcgattctcctgcctcagcctcccgagtagctgagattacaggcacctgccaccacgctcaactaatttttgtatttttagtagagacatggtttcgccattggtcaggctggtgttgaactcctgacctcatgatccacccgcctcagcctcccaaagtgctgggattacaggcgtgagccaccgtgcctggcaacctaarcttattttttaatagagacagggtctcactatgttgtccaggctgatctcaaactcctagcctcaagggatcctcctgcctcagcctcccaacgtgctgggattacaggtgtgagccacctcattgggcctatttaatctaattgccacttgtttgatctctttcccaactcctgtacatgcacatacaaaatttaataaaagtgataggaagacaaacatgtaatacagtgtgttggtgattagcacgttcttgagatctggactgcctgggtcaaactctgtctctgttcttactcccttgggcragttgctggacctctctgcctcatttccttcacctgtaaaatgaagacgaagaccttgggtaggaagctgtggtgagcatgcacaccacttagaacagtgcctggaggccgggcgcagtggctcatgcctgtaatcccagcactttggcaggccagggcaggcggatcatctgaggtcaggagttccagaccagcctggccaacatggtgaaaccccgtctccactaaaaacaccaaaaattagccagcatagtggcaggcacctgtaatcccagctattcaggaggctgagacaggagaatcgcttgaacccaggagacggaggttgcagtgagccgagatcgcgccattgcactccagcctrggcaacaaaagtgaaactccrtctcaaacaaaaacaaaaacaaaaaaacagtgcctggcacagtaaggctcagactagctgttgtgagagggcggtggggtggaaataccctcagctgaggttagaaagttgtgttctaggccgggcgtggtgggtcacgcctgtaatcccagcactttgggaggctgaggcaggtggatcatgaggtcagtagttcgagaccagcctggccagtacagtgacactccgtctctactaaaaatacaaaaattacctgagcgtggcgacrtgcrcctgtagtcccagctactcrgcaggagaatcgcttgaacccagaggcggaggttgcagtgagccaagatctcgtcactgcactccagcctgggtgacagagcaagactttgtctcaaaagaaaaaagaaagtcgtgttctggtgccccatattccaacatgtcccaaatcaaagccattgtccacacccacactgcatctctctttatttcctgacagtttcatcagtggtgtcctgggctctgctggctgctctttctaatccaccctttcagtgttgctctgggccttttcaccctagtcatttccctgcttagaaactctgaggctctgtagtgccccaaattcctagagtagcagccgccaagccctgcataattggaaccccaccagccttttcagcctgggctacccacccaagacatcaaatccacatgtgtcctcgaggccccatcctttactcggctccctccaaaccatcttgacccccgattcagatgaggcccaaatgcatctctgtggacatctccagttgtccctgcagaattagtcactccatccctcagcagcatcctgcagcsccatgcagatatccttaggaggggggagctcttatttattgtgttatatgccttcctgaagtgcctgcccactgagctgcttgcgggcaggaatggtgtcttgaccacatttatgtctctcttggagtatcaaacgttagcttctctgaactttaattgtcttaatgctctctaaaatgactttgacctctgacatattatgatcatgtggcttacaagttaacacaaaggaagagtctcacgaagcacaagaagtttgggaagaaaattggggttaagtcagctttttaaatggactgatggccaggtggggtggcttacgcctgtaatcccagcactttggaggccgaggcgggaggatcacttgagcccaggagttcgagaccagcctgggcagagtgcctgcctaccccgaggatcatttctgggcctcatctctcctctttcactgtttggttgaggacatttctggagaggaaagtagagggctattgtcccatccttttggagatatcattgcttcatagagttaggtttgctatcaaagctggggcctcctccctgtctgaataccaccatctgctgggctttgagcaagccgttctgccctctgagcaatcrggcccgaggagctgcgtccagggtagctgtcccgcctggcagagcctgagcccagcaggagggcatcaaggctgctgcaggcgtgtagagcccgggggcaccagctgacccggatctgcctgtgtcctccagatgcccttcctccctggtgactgccagggcctctctgagtaaattggccctgagtaaactcttacttagccagcccgccacsctcctctcattccccaggcttcaaagaaaaccagtttgaatatttaaacttctcctgtgtatctaataaaaagttctgcactacttaacgccccagctatccattactgtcgggagctgcyctctccctcccagcattcccctccctccctctcrcccaaaccacgmgcatggcaaagccatttgtcaaaccgctcccgccactggctgcgcttggctgtgtctgaaaggacaagccgccccacaggggaaggtgggaatgaataaaggggctatgcaaattgctgcttaatctgcagagaaacacccaggctttggggagacgctcattacttcttttaactgtgattaacgggcaaattaaacccaagcccttaactctctcctggcagaggacttgaacgcagagccctgggccagtgaggttggagggaggtagttgcatctgtacctggggaccaggaccgaggagcatccgcactgccccttaaccctggtagaagggaggggaaccccaaatgcctgagggcagacccagcacaactaatcttaaagcacagggaaggaagaacttagttctttcagaagacagttctgtctgtcattcaagaaaaagcaaagtcaggttgggcatggtggctcattcctgtaatcccagcactttgggaagctgaggcaggtggactgcttgagcccaggagttcgagaccaacctggacaacatagcaaaaccccgtctctacaagagatacaaaaaattagccggatttggtggcctgcacctgtagtcccagctactgtggaggctgaggtgggagggtcacctgagtccaggaggcagaggctgcagcgagccaagatcacaccactgcactccagcctgggcgacagagaccctgaatcaaaaaaaaaaaaaaaaaaaaagtaacatggaggacaggcacagtggctcacacctgtaatcccagcacattgggaggccaaggcgggtggatcacttgaggtcaggagtttgaggccagcctggccaacatgctgaaaccccatctccactaaaaatacaaaaaaaaaaaaaaagcaaagtcactggtcccttgaatttgcttccatccttcccctccccccmcacacacatacacacacacacaaaaaccctgggagaatttcttagacctcaagtgccaaaacatgtcaagggtgtggctaaagtggctttagccacaaactgagttgctggtcagaccagccccaagtctggtgctggaaaagtgtgtttaaggagcctccagatgttcaactccaaaaatgaccttgagatgtattaaccagggaggtgaggaagcaggaggtgggggagctgagtgtgcttctggaaggggagacactgggaatggccctgcgctggccatacgggttacaagcacacaccctacaaggggtcaaagagccaaggcagctctcttcattcyttatccatctgtgggttttggttttggttttgaggtaagacatacatagaataaaatgtatcattttaaccttttttgagcgtacagttcagtgacattcacattgctgtaccaccatcatcactatccattckgtttttgcagaatattgagccatcctaggagacctgtaatcacctctaacaaacagcaacaatggaggcagggccctgtagctagaagagttctgtgtgaaatccagaaaattggagaacgcccacaggagccccgggagattgaaatagaggcctgccgttcaggaggcaggtttgggaggaaatcctgcagagattccccattaaacacagatttcccctaagcttgagcgattaggaggtgaaagatgacatacaatggtgacagactgtctgtcaacctgatagggccgaggagagacacggccccgtattttattttgtcgtggagtcgatcagtaggtctgtcatagaaactagccctgacagctcgctcaacaactctgctctcttttcttaactcttgaagcccagctccaccatctattaaaacatcctgggctgtcagggatattaaaaggctctgtcactctttcttaaaacagtcataaatacaatctggacaccagcatttgggcaggagccccagcattgagtgggaagaggcaacagcaggtatgcctgcctttcttgacagcctgggctttggcattgttcaaatagggaccatggacttacctcctttttctctctgtagatggaggaatcatggccttctctgatatcatggatgcctggtattttgaaacaactgttcttgaccacaggatgtagtctttggtaaatgcaaccacaactctcagcttatctctggctcctcatgcacctaaaccacacctgttccgaatgcctacctaagggagtctggttcccaggccaccccagctggtaggagggggaggaggaacaaaaaggtaatcagagtctgaattttcctccacaatggagtttgcctctttcccacttccattcttcttgctccatgcagccttgtaactgacccaccttgctaaaaaaggtcttttgggtgccagaaactgacatgacactttgcaggtgggctcccaagagtgcaggctggaacttatgamcttgccaattggaggagcccagtcatcatctctaaatcttttatttatttatttwtttagacagtcttgctctgtcgcccaggctggagttcagtggcgcratctyggctcactgcaacctccacctcccaggttcaagcaattctcctgcctcagcctcccaagtagctaggattacatgcgtgtgccaccatgcctggccaatttttgtgtttttagtagagacggggttttgccatgttggccaagctggtcttgaactcctgacctcaggtgatccacccgcctcggcctcccaaagtgctgggattacaggcgtgagccaccgagcctggccccatcaacttctgtgttgacatcagggcagtgcagcaccagggagcctggcatcttaagatgtcctgtcttttgcccaccagtgtccagtgtccagaatcacttttcaccccaggactttcacttagctttggatattttaaaactacagactatgtgtttttcccaactgagttatcttctcagcagctttcttcaagtattttatgccaagaagggtcaggcttttatgttttctttccatgacattaaatccctactttattccactgtgtggcctcagagggcagaactagagcccacctgtggaggtaacagggagatggatttccacctgatataaggaagccctttctgacaaccaaaaatgccctgcaagggcacaggtgggaaagtcacatcactgaagaccttaggctgacattggatcaatatctggtggggacactgctgagagtgggaggttgggtcagatgactctgagtcaatgatttgggtacttggtatgtccagaggctggacgaggcctagcagctgttcaccagctgccttccatgtggccatcttgcaatttaatcccagatggtgggacccctcaccgtcaaaggtcacagggccagctgcagggtagtgggcaaacccttctttgccccggtagcccccaggcagtgtctgtgacccagcaggcaggatgtggaaaggaaagaatgagagatgaagctgagagatcccaccagcgcctctggttgagaaaggcaggcgggagctctgccggcttcccctccccctttcacttcaccccctccctgctccttccctgtttccacctgcctttcactctctctccctcttttgctctcttcatccctcccagagacctcccccaatctccatggcaataaaaggggaggtggggtgggctgtgccctgtatttttagttgcaccataatagcccctttctctggagacacaggggctgcctgtggaacgaatctccccctgccctttggctcacaaagggccagggaagccccttcagcctgggccgccctctgtgaccccggcctgtttccgggtggggtgcacttccagccctcgggggcctgcagctgggcctctctcacgggatcctgcacacaggcagggtcaccccggctgacctcccccgaggacagaggtcaagccccctctggggtctctgaagtgattggaagggagcccaggcaggggacagggggaggggcgaggaggaggggaccttctcttttaatgtaaaattaaatgactccctgtgcctccctgtctgtgcctatctcaggctgggtcccctggcctaggacctcacccttggggatccaggcatcttagaaatgagttaaacaccctgcactggggcttggtcaaacctgagtccagagtattagaataataaaatcccggcagggcgtggtggctcacgactgtaatcccagcactttggaaggctgacacgggcagatcatgaggtcaggagttcaagcccagcctggccagcatggtgaaaccttgtccctactaaaaatacaaaaattagccagatgtggcggcatacacctgtaatcccagctacttggaaggctagggcaagtgaattgcttgaacctgggaggtggaggttgcagtgagcrgagatcacaccactgcactccagcctgggcaacagatcaaaattccatctcgaaaagagataaataaataaaaataaaaccctggcatgggaaatgggaggaactctgtagggcatctgggccygcagagtcagccctggatttgaatctggtatttgcttgctaccatgtggcttgagacacttctgagccttgatatgctcatctgcagagtcaacatcacaaggttaaggctcgagtgagataatgcacataacatgtttctttgcacagtgcttgactcctagtagttactcagggtcccacagctgtgacactattaggcaggaaggagttcttaggcttcaaaaattcacccgcttaattgaggctagggcatccccatttcagacctttaaagatagagaagccaccatccycagagaagaatagtcaaggcagtatagtggatgagaatccaggctgggaagtcagagtggctggaactgaattgactatgtagggttattatgaaaatcaaacatgttaacacatgaaacgtgctcaaaagggaacttggcccttcacccccactatataaatgttattattattattattgatttattattattgggtctctgtggattttccagaagactgcttatttcaaatatgtaaagcccctgtccctacaggttccccctcttttmcatgtcacacagcatgttctgattcccagcaagaaataatatacgatcactctgacttcgttggctgatgaaaaaaaaattcattttgtccatgtaaatagcacctctaaacaagggacacagctaacccagaagggagtaattggccccatataaaacaaggccaagtgaaagatasgagttctgaaaagccgaaggaggtctggcgggagctgccgacagctcttctaacctgcccaayttattactggaatcatttcaagagataatttaatggtctccctctgtgtggccctgttcactcctgaagggaaatayataaataaataaacaaacctaactaccccaaccaacccatgctttatgagaacatcgcttgcttgtttttaatggcacagttattaatataactgtcccggcacctcccctacatctgatcactgctgaattatragccttgaatcctgattgtggttcccatgactgcagacgtttccacactgtcctgatgagaggagagaagcagccctccacatgcagggaggactcagaggctggagcggggacctgctgccctatctgagagcatgcagaatttgggggacaaggctgaaacatggagcaggaggggaagaaaggygtctgtaaggtgtgatgaggaaagctttggactgaggtcaggagacctcaattcaaaacaatcactagctctgggatctagctcaacctctcatctgcctcaaataaataggaatcttattttatattttatttttttttgagacagggtcttgttctgttgcccaggctggagtgcagtggtgttagctcagctcactgcaacctctgcctcctggtctaaagggatcctcccacctcagcctcctgagtagctgggactacaggtgcgggccatcacacccagctaattttttgtatttttagtagagacagggttttgccatgttgcccaggttggtctcaaactcctggactcaagcaatatgcctgcctcggcctcccaaagtgctgggattacaggtgtgagccaccttgcccgtctaaaacagaaattttaagaaattccttttccctttgctgtttttaaacacttacaatgtgccaggcatcgttagcaagatcttatttaatgcagtcccataaccaccgtgtgtggagactgatttaatccccatgtagtagataaggaaactcagactctgagaaattaagaaacttgcccagctggtaagcagggacgcttgttgacagcctggatgtgcctgactgcagggcccaagcccctaactactaggctacactgccttccygggaagtaacagctgtccatcccacctggcaggatggagagagtcagatgagcctatccaagtgaaggggctccatcacctgtaagcagtatcatatgaggtggctacaaggctttcccaacggaaggcgagggaggctggagtctgatacactaagattagaggcatggacaacaagagcaagctgcaaaaggcagcagcaacatcccaaaggggactgaatgagtgacaagcaggccacaccattccaacattcactccagaagaaagctttatttcctttgacaactgtggatagacaaggaaaggggagaatgttctcgtgttctgtgacttcctacctccatcagnggtgtagttaattctcatcttaccgggtcatcctcaggtactttgagatgagcagggctctggtctagttgagtggggtggacatggctgtttcaggctacccaggaccctgacaccacacggagaagcctcactgagttcagccacagtagggagttggtagagctaggcataaaggcatagaggtggccaggggacagacccccaccttgcccagatttgctggcaccagaggcagcctgaggcccagggcaaccaggtggctgcttggtattctgctcaggcaccgctgyrtcctgcctcctggcttctctgctagaggggcctcctcccccagcccagcctgggccatgcattatccttgcaagattgaggacctaatggaggcgatcagcacccccagagcgggggatctccatccaggcttgggaaggagggcagagtagtgctagttggcttctttgcccaccctgagatcggggtgtacttgagggggtccctggaactgggggcattctctgcaccccatctttggggcctctggacaacctctgtccaggaagccacattgcaaaaatttctctccttgtctccataggatacctttgacattcagggtccctttggggagacccagcctcttgaagctttctgcttgctctgaggaggggacactcccacccttaccccaccccctctcctgactgccagctggccggcgtgggagccrggcttccactgcccattgtttctcagctctcctcccatggtggcggggtgagcctcatcccccaggtcaggagcacagggcagcccctcccccttccctccctgggcttcaaaggcccagagggactaacccttgtcaccatggggcctcccctctgggagccatgatgggggcggctgcccccaaagcagcattcagtggctccctgggagtgagccgagcaggccgggaggtgatcacaggcatgtatgaggtcaaacgagggaggtcccaggcagacggcttgggaaaagcttggggatgggagagaggcagcaaaggtgattgcagtaattaaagcaatgagcccgctacttccaagaggagctaatcctagcacagcccaggaccaggtgctgtgtttcccatgtgccgcgtcatttctcctcacagaagctgcgtaataccaaagctacattgcacacatggagaacatcaagctcagagaggttaagtaatttacctgtgtcccacagaaaggacctgaaaaggacttggactcatattatttgactctggaaccttactcctaactactgtgccaggtgctgaactaggcaactgggagggaaaacagaatgggtcctgggcacccatcttcaaaacactcacctgacttcatacatgtctgcaaaatgtgtgtttcttgccaaagagcatccaggcatccaagaagcaatgttttcactgagcctacaaatatagaaatttctccctcttcttttcagctctccttccccttctaagtgtctttattcctcttcttcccaggctaacattctctcctcccaccatctgctcccaaggtggctgatactgcccaccttgcttccctggggatggaggggtctggggctcatccctcccccaggtgctgtaatttgtgaggctgcccaactggagtggacccagggcctcccagactgccctcccgccactgtgagttggctggcctctgccctctgccctcttctgccattaaccctgtcacctgccggacatcagcctccaggcccagtctgtcatccatggccaaagatggatggggggcggctgggaagcataagcagcgaccccttaatgagatctggcgggggagggctgggctctatcaggcagcagcagggccaggttggcgataacaggctcttgtggagcgtgacccattttccttctggaggagaagacagtcgggtgagaagctgcaggacaggtttgggggrcgggtcacagggttcttttaccacccacccctatcctccttcccctcttctggcaaaccagactcggtagatgggcagaggctatggaaaacagaygacccccacttctcattcctcctctttggcacggtgaccccagctcctarggaagaaacacggacacaargaatgactaggacacaggagaccagataccaggctggggcagccccagtcagccctgggagatgtcagagaaactggagggagggggcctttgtggggtgtctatggagtgaggagcatcttcagaggtgcaaggaaagggcctttgttgaagctggtgaaagagtgggatgcaagggttgggggagaaccattattgcgttactgggtggtctccctaccatttccccccacggtgattcatggcattttattttatttatttatttatttatttatttatttttgagatggagtctcacactgtcacccaggctggagtgcagtggcgcgatctcggctcactgcaagctctgcctcccgggttcatgccattctcctgcctcagcctccagagtagctgggactacaggcacctgccaccatgcccggctcattttttgtatttttttttagtagagacagggtttcaccatgttagccaggatggtctcgatctcctgacctcatgatccgcccacctcggcctcccaaagtactgggattacaggcatgagccactgcgcccggcaattcatggcattttaaaagaaagagatgctgggccgggcacggtggctcaagcctgtaatcccaacactttgggaggccgaggcgggtggattgcctgaggtcaggagttcaagaccagcctggcgaacatagtgaaaccctatctctactaaaaatacaaaaaattagccgggcttggtagcgggctcctgtaattccagctactcggaaggctgaggcaggagaatggcttgaacccaggaaggggaggttgcagtgagccaagattgtgccattgcactccagcctgagcaacaagagcgaaactctgtctcaataaataaataaataagatgctggaaagttctagactttcattgtacagatagggaagttgatgtccagagagcggaagagatccacccaaataagtagaagagccagagcgagaatccagggctcttgaagacccaggcctccgctcagcactgcaccacgcttccttcttgctccttacccgggaagaaaatacaacagctgctgaaataattattcctggacttgtctaaaaggggttattctttcccacttcctcccccaccccctcaacccacatacagtgcattgcccaaggacttttcgtaggtttgggagagagacttgggggaagaggggtgaggatgcttcttgtttcatccaagtcagaatgggaaataatttactccctgaggacatgaacaggkttgggtcaaaataggactcttcaagtttgaggggtttgtttgggtttggtttggttttgcccagcaaaggttggctgcgagaccctttggccacttattttgacattggccactgtcgattgccccctgcgctcctgcctgggtgctgctgtggtgatgyctgtctcctctcctccctgcctatgacagtccagctgagttggattgtggagtgtggcatctggtggttcggggatcagggacttttgaatctggtcctagtaagctgtgtggctmtcagcaacaattaatctttctaggtctcagctgcctcatctttaaaaggtagtaatagaaaagtcttcacactttttttttttttttgagacagtcttgctccatcgcccaggctggagtgcagtagcgcaatctcggcttactgcaacctccgcctcccaggttcaagccattttcctgcctcagcctcccaagtagctgggattacaggcacccaccaccacacctggctaattttttaaatgtatttttagtagagacggggtttcaccatgttggccagcctggtctcaaactcctgacctcaggtgatccacctgcctcagcctcccaaaatgctgagattacaggtgtgagccaccatgcctggcccacacttytttttaaaaagaaggaccaggctgggcaacggtggctcatgccagtaaccccagcactttgggaggctgaggttggaggatcacttgagctcaggagttcaacactagcctgggcaacatggtgaaacgttgtctgtactaaaaatacaaaaattagctgggcatggtgttgtatgcctgtagtcccagttactcgggaggctgaggcagaaggatggcttgagttcgggaggcagaggttgcagtgaactgagatcacgccactgccctccagcctgggtgacagagcaagactttgtcttaaaaaaaaaaaaaaaaaaaaaaagaccagaaccagtgccatgctgaagctggcttgcactggatcctaaaagccaattatgtgcatttcccaactttgcactgggatttccagttggtggcttgaaatgggcttttgtggaaatatttacaccacagaaataagcaaaggctacaaatcagggcttcagcactccaagtgagagccagccagtaaacttttagcagcacgacactggccagaactctaacatgttatataaaaacacataaacaggctggtcacagtggctcatgcctttgggaaaccgaggtgggcgaatcccctgaggtcagcagctcgagactagcctggccaacatggtgaaaccccatctctactaaaaatacaaaaattagccgggcatggtggcgcatgcctgtaatcccagctactcaggaggctgagacaggagaatcgcttgaacccaggaggcagaggtggcagtgagcggagatcatgccattgcactctagtccgggcgacagtgtgagactctgtctgaaaaacaaaacaaaacaaaacaaaacaacaaaacaaaaaaacacacataaacagaactgctttggttggttgaaacargggttccccactcccctcacacacatcaagctttgccaaaacccaggacttgaagtctgagatttgtgccagctctcaatcctgtgagtctaagtaacaggccacaagaggtgatgcaggaggaagaatgacgaacaatgatgaggcttaggttttatgactgtatttagctaatcgagccttgtctgtgtgggcaagtcaactttgatgatccaggaagcasctctggagttgcttaaccctgcaggtcccaaggccttctggtggcctcggcaggtagtggcaccctccagagcagtctctcactagcggatctctcagtgggtggcaggaggatggctttaggggagggaatgtcacccacctccccacaactgtgcctctgccctgcaggktgaaggtaaatgaagtgacatttgaatccattcagatactgcaggagaatgaatgctgaatgaatgaatgaatccagggagagctggagccaaataagcttcatcaatttatgtggtggggaggatgctagccaggaagtggaggccagtgttcaaatgcagggctcaagccatagctccagcagttcctgaccatgacattttttgtatttcagtaccgttttgtagaatggggctactgaaccaggcttaaaatcgtatttcagtctggtctttatgatggggacggtaggggtgaacrtggagctctcattctgcatgtagtggaagggcccaccccgcaagcatgtttcgctgctatttttgccaaggktctgtgaagatttcaatattcccaagcttgctatctttcaagcctagtagaatcagctgggctgatatcttctagctggtgggaaaaaatgccagcaagcaaaagaaaaggagaggagaaacaaatgtttgtaactgaaagaaacctgrcatttaatctagtgatttctatctgccaatcatcagaattgtcattacctgggacaatttaaaaagtacaatttctaggccaggcgcggtggctcacgcctgtaatcccagcactttgggaggccgaggcaggtggatcatgaggtcaggagattgagaccatcctggctaacacggtgaaaccccgtctctactaaaaatacaaaaaaattaggcgggcaaggtggtgggcgcctgcagtcccagctactcaggaggctgaggcagaagaatggcgtgaacccagtgagccaagattgcaccactgcactccaacctgggtgacagagcgagactccgtctcaaaaaataaataaataaataaaaataggctgggcgtggtggctyacgcctgtaatcccagcactttgggaggccaaggcgggcagatcatgaagtcaggagatcgagaccatcctggctgacacggtgaaaccccatctctactaaaaatacraaaaattagctgggcrtkgtggcggacgcctgtggtcccagctacctgggaggctgaggcaggakaatggcgtgaaaccaggaggtggaggctgcagtgagctgagatcgcgccactgcaccccagcctgggcgacagagcgagactccgtctcaaaaaataaatacataaataaataaataattttaaaaaataaaataaaaagtacaatttcttaccctgcctctagacatactgattattaaaaatctcccgttggggaggggtctggtgtttgggaaccwgcacactccctctcctgacctcccacagcagagggtgaaggctaccaccagctgaccagtcataagactttgtcttctttctgtttctaaaagagatttcctcattttcccttagcaaatagggaaagaccaaaaaaaaaaaaaaaaaaaagagttctttcccacagctaacctaaatcttggctgcatttctaggcctctcatctgcataataacttcactgatgatttcagagtttgctttcttcaccctgaatgttctgggtttatttcttcattcaataaaaattaattcagcacctcctactcaccaggtcctttagtagctgttggggagatgagcaaaatggacactatccttggcttttgcatcttatagccttttaagggagtcagacagttaaatttgcaatggtggctcatgcctataatctcaacactttgggaagccaaggcaggaggatcgcttgaagtcaggagtttgagaccagcctgggcaacatagtgagaccctgtctctacaaaaaattaaaaaattagccgggtatggtaacacatgcctgtggtcccagctacttgagaggctgaggtgggaggattgcttgagcctgggaggaggtcacggtgcttcagtgagccttgattgcaccactgcactccagcctgggcgacacagcgagaccctcatctctaaaaaataataataaaaaaaatagcatgtcaggatgtcaggctagggcagatgttgggatggtaagatggggtggggcaaagcctcctgaagaaatgaagggtcgggtatggtggctcatgcctgtaatcccagcattttgggaggccgaggcaggcggatcccttgagcccagggatttgagaccaacctaggcaacatagcaaaaccccatctctacaataaaataaaataaaataaatagctgggtgtggtggcgtgtgcctgtaatcccagctactcaggaggctgaggcaagagaattgctttagcctgggaggtggagggtgcagtgagtggtgtttgtaccactgctttccagcatgtagcaagagagtgagactcaactggaaggaagraaggaaggaagggagggaggggaaagaaggaaaggagtgctaatttgcggacttaggataagtagcagttagtccaaggatgtggaagggagggtggagagcaaagatcctggcagaaagaccagcatatgtggggctgaaggcaaaaaaacagagaatgcttgacaaactgagtgaaaattcatacagtcgggcactctgcctcacaaatccttctgtcatttctacagttctcccagaaaccccttgaaactcgcctgtgactctctaggctccctggagtccagagcaagacaaagaacttttgtctgatcagctgagatataatgagaatgacccccaggttccttatttatgcatccggcatgcagcttgcttttgtaagaatagcactgtattgctgactcatagtcagccatgcattttacaataatcccacaatgtctgccctggattttctttctgcctaacttcctgttcagccttcttttaaaaagcyttgcctctgtgctctctttttacttatctctttctttgaaatggatcacgtctagaatttgtgggtttcagggaaatctgccatcccaagggtccttctccaatgaaattaaggtcaaattgagatttggaattgaaagctgattagtctgaatgcccacatcttagagcatctaaccaatctatctgcccatcagggtgactgatcccatccctgtcttatttgctgctgtgggggtgagggcagggggtggagaaggatggaagcagagtcagcgccagacagtgatgtgccacgcagaatagaatctctgcacagcgtctcctggaasggggaggggggcagatgctgacagactcgtgggagccatgccaagagatgggtctgcctgggtccctgactaaaccaactaactcttcccaagctgatcaggctgcagggccagagccccactattcttccctgggatcccaagtgaagcaatgggggccacgtaggaattcatcggtcaatgctagtttggtgggtgagggtggggaggttggggaggrgcaggcgcgggggtgggtgtgcttggattcgctcatgggagctgagccagccccagcagggaagaagggtcgctttggcattcattctcctgcagttaccaggcctcgccgcctgccgggctgctggtgcgcagggcccagccccctccccaaagagcccctgagaggggccaggagtggggggaaggccacccgtggccttgtgagactgaagcacaagctccttcctcagctkccagggaagaatttaattaccaattaaagccccctccatctgtttcgggcctgccagagagctctctctaccctttaattacatctctgacaacaatttaactcaattagctggtaaacacagcagaatgcaggcaacccagggcaccctcttgtccctgccatctgtctgtccgtcttgtgctttcccaactcgctctcagtctgtctgtcctgcccctgcttccctgtctcattttgacaccgccccccaccccttggttttctctttttcttctgtcttctccagcacctcttgtctgtttcacaccagctgggtttcccccgccctccgcgtctttgtcattctgtcttcctctcccatctgctctttgtccatccctttcccgtgctctgtcttgttctgtgcatcccaactttctctcttactctgccaggctagtctccaatgagccttttccttcccctttccttctccccgtcttcttcctccttctccgccatctgtcctacattaaccaaatccatccctttcagcatctcctctgtgagcctcctttctggtgtgtttcccttaacccctgccatctccttttgcttcatccacttagcacaaacaaaggtgagccctaggagcagtagttgccatcttttgagcacttactttgccagtcattggctaagagctttacatgcattattttgttgaatttttacaaaaattgtgtgaatgggtataattattcccatttcacaagtggaataatggatcctctgagagattttgccacttatccaaggtcacagagcttgcaactgatagaactaggattcaaagccaggtctgtttccttcaatactgcatgagatacccraggctgggcacagtagctcatgcctgtaatcccagcactttgggaggccaaggtgggcagatagcttgagcccaggagttcgagaccagactgggcaacatgatgagacccccgtctctgcaaaaaatataaaaattagccagaagtggtgcatgcctgtagtctcagctactcaggagcctgaggtgagtgagtcacttgagcccagcaggtcgaggggagcagttttaaggatgacagagaggcctgaatatttggggaaaggctctgtgttgttgaaatgaagggcaaagcaataggttcccagttaacattgggagggaggtgggtagagaagggtaaaaaatagaaatcatttctgagaatttaacctcctcatttctgctggaaggaactttccagattctagtttactacagtgttgaagaagttccccagtcctctgagaaagtaaaaaatgtccaggacctacaggaataagagagagggagagagagaaacaagtaggctataattatcctagcaaccctctcctggaatgggggcgggggtgggtgctgcagagaagggcagcctgatcygtcttgtggacaggcagggacatgatggagaccccaggtcagccaggtagtcacatggctgcrgcttgggcagaccccagccagataaaactcatctgctttcttcccccatccttcctcggctgactaatcactcttcctgtgattaaaacagaaaagaactggggggaaaggctacaggagagaaagagaggctgtctctgatctctgttttctaccttcctttgctcttgagatgtgctgtccatccttgggggtttgctccgcttggtgtttagaacccacatattccactaactcacaccttcaccttgccttctgccacactaagaagagtgctgggattccagcgaaattcctcaaatgcagaaactgtgctctgagagcaaatgccagtcagctatgggttagagtcagcctcagtagggagactggcacaatacccagcttttttttttttkttttttgttttttgtcctgtttttgtttttgtttttgagatggagtcttgctctgtcacccaggctggagtgcagtggcgccatctcggctcactgcaacctctgtctcccgggttcaagcgattctcctgcctcagtcacccaaggagctgggattacaggcacgtgccaccatgcctggctaacttctgtattttttatagagacggggtttcaccatgttggccaggctggtctcgaactcctgacctcaagtgatccgcccaccttggcttcccaaagtgctgagattacaggcatgaaccactgcatgtggcctctttttttttttttttttttttgagacagtctcaccctgttgcccaggctggagtgcagtggcacaatctcagctcactttgacctccacctcctgggttcaggcaattctcgtgcctcagcatcccaagtagctggattataagcacgtgctaccacgcctagctaatttttgtatttttagtagagacggtgtttcatcatgttggccaggctggtctcgaatttcttgtgtcaagtgatccgcccgccttagcctcctaaagtactgggattacaagcatgagcgactgtgcctggcagaattttcaatattacagatctctcaagaagtcccatcctgcaggcagacatggaaagttctggacagaggcaactaaggggcaggatggaaggctggaaaagagatggggtagggaagcaaggaattcaaaatgaagaagctcccagtccagtcccaagctttatacaatcagtgggtgtgtgggcagtttctgtaaacattatataataaagaccacagagaagagaggctggtaggtgtttttttgtttttgtttttgtttttgtttctaaatagacatgtaattacctagaactttagagttcaacagaccagcagtctacctaacctagggtccttcctgttgcaagaattattattatagtagccctcataatagccttctttggatacttccagccacagataacttattacctcactaggtaatacctttctattttcagrctgttttaatgttttttttttgtttgtttgtttttgttttttttgagatggagtctggctctgtcacccaggctggagtgcagtggtgccatctcggctcactgcaagctctgcctcccgggttcacgccattctcctgcctcagcctcaggagtagctgggactacaggcgcccaccactacgccgggttaattttttgtatttttattagagacggggtttcaccgtgttagccaggatggtcttgatctcctgacctcgtgatccgccctcctcggcctcccaaaatgctgggattacgggcgtgagccaccgcgcctggccctgttttaatgtttagaaaaatctttctcatactaaaccagagactatttccctgtaattcacctccttctgtccttttttcattgtgtgaattgatggagaatatgtaaatcttcctccacagttcagatgccaatcaaatgtctagaaggcagccaaaaggaatccctgagagttaaacattcctaattccttcacctattcctcaagtgctctcctttcaaaatctcactattgtttatatatcccataggctttttcattagcaatgcctttctttataaatagtgccccagacctaaagattaattccaaagggcacaggataaagaaagaccatcacctcccttgttctaaagactgtattttattaatgcagctcagaatctataattttttacagcagacgcagatcacagcagttttatttgtttgtttgtttagagtttcactctgtctcccaggctagagtgcagtgtcacaatctcggctcactgcaacctccgcctcccggattcaagcaatgcctgtgcctcagcctcccagtagctgggattacaccaccacgccaagctaattttagtatttttagtagagacaaggtttcatcatgttggccaggctggctcgaactcctggcctcatgtgatctgccctcctcagcctcccaaattgctgggattacaggtgtgagccaccatgcccggcccatagtagcttctctatcatatcagcatattgaggttgcaggcaactaaacttactgtttttagtatatgtcactcttagaccatgtcttcctcattcctactgaattaactcttttggtgacaagtataaaacttatttaattcttttaaatttcacctcactcaactcaatttaacactgatggagcatacatcatgttaaactgtgttcgatttcggccaatgtttccatcctgctaagatcttattaaatccttagcctgtcacccgaaacattaattctctcttttagctgtgtgtcatccacagagctgatgagcttgtctttcatgttttcacccaatcctgataaagtgttgaaaagtacagtgcctcctaagaggaccattttgaaagaatcaacatctggccgggcacggtggcttatgcctgtaatcccagcactttgggaggctgaggtgagccgatcacggggtcaggagatcaagaccaccctggctaacatggtgaaaccctgtctctactaaaaaaaaaatacaaaaaaaaaatttgccatgtgtggtggtgggcacctgtagtcccagctacttgggaggctaaggcaggagaatggcgtgaacctgggaggcggagcttgcagtgagccgagatggcaccactgcactccagcctgggcaacagagcgaaactctgtctcaaaaaaaaaaaaaaagaaagaaagaaagaatcaacatctaaatgaatctctctccttcagatggaggctatatagttggttttttggtaactttttattttgataaatttcaaacttataaaaaaawgtcaaaaatagtacaaagaactcccatgtgccctttacccagattcatcaattgtttacattttgctccattcatttcatccttatctatctacatgtttacatatgcatttttttgcaacttttggagagtacattggagacatcctgtccctttactcctaaatattctagtatgtgtttcctaagaacaaaggcattctcttacacaaacaacctcagtatcatgatcaaaatcaataaatttaacattgttatgaaactaccgtctaatgtacaacccatattcaatgtccatccatttttccagtaatgtcctttatgactatttccattgtcaaaccctctctacggccagtccaggatacaatccaggatcatagatggcactcagttgtcatgacttcttagtaggaggctataattctatttcaacactttgccattgctaaaagcagtttcaaaactttttttggaaaatgggaaggctccatgggaattatcttcagagtcttcagcacatttgtgttgctttcctcaaaggaaccagatcctcatccttggaaggtggtgggatggtttgaatgtttttctatggctgccattttccaaaaaagtcyccaaaacaaacaaaaaaagattctttttttttttttggtgatggagtctcgctctgtcgcctaggctggagtgcagtggcgcaatttcggctcactgcaacctccgcctcctgggttcaagcaattctcctgtgtcagtctcctgagtagctgggactacaggcatgcgccaccatgcctggctaatttttgtgtttttagtagagacagggtttcaccatgttggccaggctggtctcgaactcctgacctcaggtgattcaccctcctcagccttccaaagtggtgggattacaggcatgcgccaccgtgcctggccctgtattcaagattcttatcaagtctacactttatttttattttatttatttatttatttttgaaacagggtctcactctgcctccmaggctggagtgcagtggcaccttcccagctcccagccttgactgcctgagctcaagccatcttcctacctcagcctcccaagtagctgggaccacaggcagccataaccatgcccggccaattttttatttgtagagacaggtctcgctatgttgcccaggctgataaactttatttttatcttttttagagatgagatcttgctgtgttgcccagcctggtcacacactcctggactcaagtgatcctcatgcctcagcctccagagtagctggaactaccagcacaggccacctactcagccccaagtttcctctatagatgcagccagactcattcattcaaaagcaagccatcctcatagtctttgctcatgccattccctttttcacttcacttcattccacccctcacttccttaaagacccaggctctgtggccccttttgcgggggacccctagctccaagtcctgcaatccctcccttggagctgagcgttgaagcatctggcatttgactattcatttggcacttggcatacgattccttaggtgatttgtaatttttaatgcatctactgtttctcatcagaaagactgtaaacctttgagagcagaagtcatgtttatatctcttgctaccttatatttaatgtaatgccacatacatagttggagtgcaatgcatattcagtgctggtgatcatgggatgtgtttgaaaaggatctataaccaagtaacagccaatgtgtattgggcacataataatcattatacacaatgctatacactttatatggattatgtcatttgtcctttctacaacccagtgatctacggacaactatagtcccattttactgatgaggaaactgaggcttagagagagctaagtaatttgcccatggtcatccagctcgtaggtggagaaaccagaattcaatccagatggtttgattccagagccaccactctcaaccaccgtgctatgaccacatttgaagagaataatccctccatcccaacactgtaaatgataattaaatataataattgtgatgctgctgataataaataaaaatcttccgtggagagtggggctctgatctgctccacgtttttgtttgtttgtttgttttttgagatgaggtctcaccctgtcacccaggctggagtgcagtggcaccatctctgctcactgcaacctctgcctcccggtttccaccgattctcccacctcagcctcccgagtagctggaattacaggcgcatgccaccacacccggataattttttgtatttttagtagagatggagtttcaccatgttggccaggctggtcttgaactcctgacctcgagtgatccatctgcctcggcctcccaaagtgctgggattataggcatgagccactgtgccccaccatcaaataggtttttttggtgtccaataacttccctcttgcaaagctcttcagatgtagaaatgcacttctttcttgtacaagaaggtaaaatgagctgcatagtcaaatgttagaatttggcttaggctttaaaggggtatttcttttcttttctttctttctttttttttttttttgtcaagggatagtaaagaggaagcctctaacctcaaagcagcctaagttttacagaccttctcctgtgtttctgaatcccaggcctgaccagaaatcggtaattttcagtttgcactccacattcctagtgggctggagctgaggatttagtggggagggtagaaaaggggtggggttgtgttttctcacaaactgggtcgtcaaatttgagtttcaagggggctctcagttcccccatgactctagagaaggaaaaatagaaagcattataggtgttcagactggtcacagaagacatcttcgcaaggcagttcctatcacagccagctgatgtcaccaacggggcatgggggagatggaggaaagaaacaacagaagagacgaagaggaaggagggacgacggagcaaaagtgaagacatgatatayggccgaggacatagggtgagaggaaagaaaagaaaagggtggaggaaagagagaggaaggagaattcgaagcataggcttttgcctacttcccttctcccgtccctaacacacggatgagagcttctcgcctctttctatatccagaaagtatggagacccctcactctccgacctcggtgctatctccagggcccagaggggcaaactggggaggggaggggagacttgtaaacatgagtgcaattttcctctggtttccccagaagttgcccgtttcctgggccattcctctccaggcagccctcgggagttcccgccgcaccgaccccagccaggctccagcggtcccctctcttccatcccgccatctctctgaggggcttgcgtctccctgatgcgctctggtgtctgtctgagccatccatcaaggatggcaggctgggggaaacatgaaaaagagcctatttggctattaacatcccctcccgctttgttgtctctctcctccccagtcccctaccagcccctcacccaacccctcccttttccccttttgcaggagacaaaaccagactgacaagctgaagactcaaacattaatcaaactgcgctccggaacaacctttccctcgcattaataaatacatttgcggcccctcattggacagttggcctaatttgtttctttttcgcggggtggggggagcagccgcgcccgcgccccctggctcccagcagccctgtgcaaagcagatgttccgccgcagacgcggagctgcgcctagccgcgcgccccggaggccgcggttgccatggcgacggcggggccgcctgctgtcgccgagcacgctgtctcgcccgctcagygattacctccatctccgcagtgttcgccatacggcccggattctaatcagatcccctcccccctcccccctccctcctccgcccggcccactaccccttcagctcccacagccttgggactcattgagaactgcccgcgcatccctgacggtgcccaggaaggcagagtgggggagagacgacccgcactcagcctgtgtttagggaggactggacccagtgcggttcgcaagaggttctgtgtccccaggccatctttggtgacattgaaccccgggagtccagctcccagcactgtcccctgaagactcctcctcctcccccttggtatgttgaggcaggtcacctgaggtccccaagagaggtaaggcaggcaaccatagttccccttccatctggacaagactcttccattcccgttctgtaagtgctgggaatgatttcatctgcacagcctggaggtgggcagggtttctggaaccatcagagcatcagcccaagccatgcttcttgtgctaaacgcagtggtttctcagactaaagggaggagtggagaagcacaggtctggtactctagccactcaggcctggcctgagttaggcccatggttatttgaccccctccacatcacacacacactatgctttccatgcttccaggctgagggtggttttttataggtggtctcagatgtacccccggctggcagccttgcaagggatgcactgcgaaccctctccggacttagtaatgaacaaggggcagtgcgatgcctcggggccttggggtacctggctgtctttctgttaggggaggagggtcctttccctgagactctgaggcttcactataagatcccaagcataaacatccctggctttaggagaaacgaggtaataacagaagccagaggcaagagagcacagagaggttgggagtgaggccggcagggaakaaggcagatttgggacaggaagatgagattctgggttcagattccaccttccagcctaaatcacaaggcaggaagcctgaggtggttggcgtaaaaaataattttgctcaaggggaggaaccctttggagtgacgaaaagtagaaacactcatgttccagaagtgttaccaatgccagggaaagcttgcttaaacactctcacaacatcccaaatgccagcctccttccaatgttcgccggaaagttctgagccgtattagcaaataagaagaaatgccaggctgagctctctctccgaggctactaagaatcctcatgctagagctgcaagggcctttagagatctggaccgatccttcattttacagatgaaaaaactgaaatccagagaggaatgacaactggccaagatcccacagctagaaatagtggaaccaggtttttatttctgcaatagtggccactgttctgccctctttcctctctcagaggcaaccagctgggaaactctggtttccaagtcctctctcagaggcaaccggctgggaaactctggtttccaagaggcacagacagaatcccaaaaatctcaggcctttcccagcccctagtcaccctgcctcctgaaggcctgtcacctacctgaaggcagctccactagagtgacagctccygttggccctggctggctcagggcctctggggagggtatggggggatggtgggttgggagagaacttttgtggggcctccttcagtcaatggtctacagctctgtctttgtctgtctgtcactcagaagggaactgctgaagggagaggtcaggctggtcggtagaaagggagaaagaggcctatccctgtcagagaggggttgggaagaaggcaggcaaggggaccgaagctccttcaacctcctcatcctctcccactccaactcctgggctgtttcccctagggaattccaggctttgctcattttaggaccagggcagcaactgcacacaaaggcccttctcttcttgccgtgtgaaatcctggctccccattggagagctactcccttaccctgccctgtctgcaagaagaggctgccaaggggtctaactcaaacctacaaggcagggagttccattgcgttccccttccatgcaaccagcaccctgactccacccctgtgcttgccygtgtccctgctcgcgcctgccacatcagattccccaggctccctcacccccccgtgcaatttaaagcagattcatcccctgagagccccagtttccaggccaccctagcttctactgtacactatcctatctccccagattgtgctgtttccagtctccccttgttccctctgcacacgaatcttcctccccagattcaactgttttcaggctactccctctgtctgccccctgtacacgactgtctccccagatcctgctgtttmtaggttcccccatatttccccggtatacaaattggcctccctggattcagcagtttccagaagccccttgctctctcactaggcagttccatctccccagattcagctgttttcaggctcccttcatttgccctgtacacaggtacccctcccaggttctgctgtttctaggcttcccgatttcccttgtatacgcatcagtttctagcttatgttgatcccagctgcctaagggattcagcaggtttagggagagtggaaggaagaagagagtcagaaagaggaggagaagaaagatggtcatcagggaagctcyggatttctcttgtgaccctaagcagcttgcatatgacagcctctgggcctctgcctctacaaataggtcccttaaggccatctgccctgggataccccaatcccctccccattgctgctgcccaggatctgagctttaagttggacatcctccggagggcccccgtcttggcaggagtgcttatgcttgcatgaggtgggacaggcaagagccttcccaagccaggagttcccttgtctctcctctgctatttccttcttgccttcccagcacccacgcccgcccccttttttttttctttttgagttggagtttcactgtgtcgcccaggctggagtgtagtggcgtgatctcggctcgctacaacctctgcctcatgggctcaagcaacaatcctgcctccgcctccggagtagctgggactacaggcgtgtgccaccatgcctagctaatttttgtatttttagtagagacaaggtttcaccatgttggccaggctggtgaactcctgaccgcaggtgatccacctgccttggcctcccaaagtggtgggattacaggcgtgagccactgtgcccacccccaccccttgtctctttctcatgtgttgcaccttagctctcctcaatttatccacatacaatttattttattttatttatttattattttttttttgagatggagtcacaaagtgctgggattataggcgtgagccaccacgcctggccttttgttttatttttgaaacagtcttactctgtcgcccaggctggagagcagtggcatcatctcatctcactgcaacctctgactctggggttcaagtgattctcctccttcagcatcctgtatccacatagaatttaaaggaaactccaaatgcactcccagaactaaagggagtacagaactaaagagtcacacttttttttttttttttttttttttttttttcagttttcaagatggagtagtatcaatctcaggccctggaaaytgcccctggactagtttcctggcatgcttctccagcctttgtaaacaactgtttcatctgcagactccctgcatcctaatcctccttggggctggaggtgggagggtatgggaagtgttctgcaaggtactccagtcttcttatcttctctgactcatttagctactgcctgcaaagtttccactggaatctggggaaatggtctgatccctcatcgccttcctccatatacagctgcctacccattagactaatcccagccatttgtcagtcacgatgctccatcatactggccccagcaaactttctggtttcactaagaaataaataggaagggcaggcccactgggtccaggatagtgccctacaaggagacctttcttcaaaatgaaatccatacctgggttcaggccgcattgcttctgctcccagcacccgagagcatcctcaatcacctcacaagtgggaatgacaacgcctgcctccttcactgagatagaggtacaaaaaaattacatgtgtgaaagaaatagaatacttttacggatcctgacaaatgtgagtttacataaatcctattaaaagaacattgtgcaagaagcttttctgtgtcttgtatataaattatcctcagaaaagaagtgcagctgatgggactcacttattaatttcattatttaaaaaacagacgtgctgggcgtggtggcttatgtcggtaatcccagcactttgggaggccaaggcgggaggatcacttgaggtcaggagtttgagactagcctggccaatatggtgaaaccctgtctctactaaaaatacaaaaattagctgggcatggtgttgtgtgcctctagtcccagctacttgggaggttgaagcacgagaatcacttgaacccaggaggcacatgcagcagtgagtcaggatggcgccacttactccagcctgggcgacagagcaagattctgtctcaataaataaataaataaataaataaataaaataaaaattagaaaacgctattggagccagccatggtggctcccagcactttgggaggccgaggtgggcagattgcttgagctcaggagttcgagaccagcctgggcaacatggtgaaaccccgtctctactaaaaatacaaaaattaaccaggcatggtggcaggtgcctgtaatcccagctactcaagaggctgaggcaggagaattacttgaacctgggaggtggaggttgcagtgagcagagactgtgccactgtacactagcctgggtgatagagtgagactgttaaaaaaaaaaaaagcatgcaaagaaaaatgtgcattggggttttgagtcaagagccctgctattttttcttactgcccaggaaggcactccttgtcaagggaattctatttataaacgttatattctcatgatctgcagaaaacacagggcagaaagaggaagaggtaagagggttccaggaaaccctctttcttgtctcagttctgtcccttgttagctgtgtgacattgggtaagtcaacctttgagtttcactttcctaatctgaaggcctctagcttgctctcccagaaagatccacttttttttttctaccttagagtataaacttcagtcagtgcccaagcccctcagaccccttcctcaacctcccagctaccttggggaatgggtccaaatctccagagttggaggaaaaggtctgtatttgttttctgtttgtttgtttgagacagagtctcactccatcacccaggctgtagtgcagtggcgcagtctcggctcactgcaacctccatctcttgggttcaagcaattctcctgcctcaccctcccgagtagctgggattacaggcatgtgtcaccatgcccagctaatttttgtatttttagtagaaacagggtttcaccatgttggccatgttggtctcgaactcctgacctaaagtgatctgcccacctcggcctcccaaagtgctgggattacaggagcgagacaccatgcccagccaggtctgtatttcttgacagtgtttcttgatcagaggccctgttttctcaggacaattgctgtcccaggtgcccagggtctctcaccttcgtgttcccatggaggtgctcacagctctgatgtgggaacccccaaggttctcctctgtggtctagggagtatctaggaatggactgcaatgctcagcactgtgagataactcctgcccaatagagagtagagatgccctctaggtctggttcctgcaagccttttcatagtcccgtcactgatcccggccaggctaaggatgaaagaggggcttgtcttacagcaccatcttctgggcaaacctgtgagagctacttcttcttgctgccatctggagaacactgagattttgggggactttgggtcccagaagttttgtttgtttgtttgtttgagatggagtctcgctctgtcacccagggctggagtgcagtggtgcgatcttggctcactgcaacttccatctcccgggttcaagcgattctcctgcctcagcctctgagtagctgggaccagagrcgcacgtcactatgcccagctaatttttgtatttttagtagagacggggtttcaccatgttggtcaggcttgtctcaaacttctgacctcgtgatctgcccacctcggcctcccaaagtgctgggattacaggtgtgagccaccacgcccggccgattccagaagtttttatcttacctgtttccccaagataaattaattctggacttttccagccatctcttaggagaggatgttccaagagccctccaaccttccaaacacaaggctgctaggaatggtaagcagctgaaaccagtcttccaatcattccacccagaacctgagtcctcacctactcaccccatatatccccaccccagaacaccctgtcactcactaagaagctgttgtctggaagcaaggttatagcctcatcacttccagagttttcttctatcctcaagtttatttgtttgtttgtttcagatgagggctcactggcagccatgagagtaaaacacatattttcaatctcttaaaaatcaggtgtctggattggctgtgatggctcatgcctgtaatcccagcactttgggaggctgacttgggtggatcgcttgagtccaggagttcaagaccagcctgggcaacatggcaaaatcctgtctctacaataaacaaaaaattagccgggtgtggtggcatgtgcctgtagtcccagctacctggaggttgaggctgcagtgagccatgatcacgccactgtactccaacctaggcgacagagcaaaactctgtcccttaggaaaaaaaaaaaaaggctaggcatggcggctcaatcctgtaatcccagcactttgggaggctgaggcaggaggatcacttgagcccaggagtttgagaacagcctggacaacaaagtgagacccccatctccctaccaaaaaaaaaaagcaaaaaaaaaaaaagcaaggtgtcgtggtgtgcacctatagtccaagctacatgggaagctgaagtaggaggatcacttctccccaggaartcaaggctgcagtgaaccgtattcatgccactgcactccaggctgggtgacagagcaagacccagtctcaaaaaaaaaaaaaaaaaatcagatgtctagacaaagagaaattgtggatctggtcaaatggaatcagatccctcttgctacttctttttctttcatttgaagtgtatgtgtctattttcagagtggggtacgtgagagtgataagagggcactaaatatataagatataaagtagacttgtgttttttttgtttgtttgttttttgtttttttgagacggagtttcgctcttgttgcccaggctggagtgcaatggtgcaatctcagctcactgaaacctccacctcccrggttcaagcaattctcctgcctcagcctcccgagtagctggaattacaggcacctgccaccatgcctggctaattttttttttttttttttttgtatttttagtagagacgggggtttcaccatcttggccaggctggtcttgaactcctgaccttgtgatccacctgccttggcctcccaaagtgctgggatcacaggcatgagccaccgtgcccggccgacttgttatttttaaacatacttttcagaacctaaatattcagatcattgtccctgacaaaatggtccttttggagggccttttttggaatgattgcctgcaattatctgaattaattcaagcaccaactcttcaaattctgagagtggacttgatttttgcaagctgcttggtgagtaagatcagcaatcaagctgggtggtactgttttagatcaagaatgagaagtgactgtaatgaaaatatttcgttttgggggtcataaattgaccctgaattcctgttctcttctttaacccaggttccatgttgctagcagagttcctccctcaaaacatagagctgatatcacttaacagcttgaaaatcttcagtggttccctattaccttcagaacacaggccaagttctttactgactttttgttttgttttgttttgtttttttgagatggagtttcgttcttgttgcccaggctgaagtgtaatggcacgatcttggctcaccgaaacctctgcctcctgggttcaagcgattctcctgcctcagcctcccgagtagctgggattacaggcatgcaccaccacaccctgctaattttgtatttttagtagagacagggtttctccatgttggtcgggctggtctcgatctcaggtgatccacccaccttgtcctcccaaagtactgggattacaggtgtgagccatggcgactggccacaagccaagttctttagctctgtggttggggtaaagaagagccagcaatggagtcagaccagaatgggtttaaatcccacctatgagctctgaggcaagttattcagtctctcagactctcagctctctcatttgtaaaaagaaggctaacgggccaggcgcggtatacccaacactttgggaggccaaagtggacagatcgcttgagctcaggagtttgagaccagcctgggcaacatggtgagacctcgtgtctattaaaaaatttttaaaaattagctgggtgtggtggtacatgcctgtggtcccagctactcgggggactgaggtaagaggatagcttgagccccggaggttgaggctgcagcgagcctatcaatacctactttgttaggttgttttgaggacaatggtaattttaaggtgtatatagtagcaaactcaataaatagcagtcattcttcagcatggcattcattgctcactgcgacccagttgcaacctatctagaagaaacctcagatctcaacacactccctgcagacacacaccattccagttacatttgcctactgaaattccttaaacaatacagagattttttttctttttcttttttttttttttttttttttttttagacagggtcttgctctgtcctccaggctggagtgcagtggcatgatctcagctcacagcagcctcagcctcctggactcaagtgatccttccacctcagcccacggtgccccctctccccccagtagctgggactacaggcacacaccactacacccagctaattttttttttttttttttttttttttgtagaggcagggttttgccatgttgcccaggctggtctcgaactcccagactcaagcaacctgcctgtctcacccttcctaagtgctgagattacaggcatgagccactgcgcccagcctaaacggagattccttacctctggccttgcttatgttgttgctccctttggggtgtctctttccccatcttccttctttacatgttatgtaatacaccgtttcctctgtgaatatttatcatttccttatctgcatacatgactttgtccccagccaaattgtaatctccttgagtcaggaactgtgtttcccaattcattttagaagctcccaacaatccccagcaaggtacctggcctggaaacagcctgttagtaaatgtctgttgaacgaattcattccaaaagagtttattttattattattattaacgttgcttttcttaccaaagggtgcattttgaggaatggcgttaatctatatgtgcagtataaaatttacatgtgtctcacactcttatttatttagaaactcatctaacatgtttaccagtttctgttcatagagatgaggaagagattaggaaacagatgaggaccatacacacattgatgctagaatataatttggcagccattcgattaatttctttttttttttattgaagtatgacttacctacaggaaagagcacatatcttaagtgtaaactctgtgacttttttttttttttttttgagacagagtttcactcttgttgcccaggctggattgcaatggcaagatctcggctcactgcaacctccgccttccgggttcaagcaattctcctgcctcagcctcccccagtagctgggattacaggcacctgccatcatgcctggctaatttttgtatttttagtagagacggggtttcaccatgttggtcaggctggtctcgaactcctgaccttgtgatccgcccgcctcagctccccaaagtgctgggattacaggtgtgagccactgcgcccggcctgtgactttttactactactcagatcaagataaagaacatcatttgatttttaaaggcgtttctactttcaaatatctcttaaatcccttcctgccttttaacctccaccctcaccccactacggagtctaatcagtctctctctttctttccccagtgcctggctcatggcaaacactcaaatatttgaaataatgaatcaacaaacaaatattgttgaatgaatgagacctaaattggaaggaaatggaggtctgtaaggttgtgcccagactgttttgggtaaattattcaacattacctgcatcggcctccaaagttaaagggtatctagtaggaatttagaggtaagattttttttttttcccccgctatatagcaaagtttcaaagggtggttaagggcacagaaaatttgagcctcgggcggtgtcctgctcatccccctgcaccccacacccaggcctggctggccccacccccgccaatctttgcagccctgcaaagcgcccagcccggctgcggtcccgccagcggggagccatccatcaccgcctgaatgccagccaacccgagcagcyccgccttcctgccagccaatagccggaaggcagggggcgtgcggggctctaagtggtataaaaggggtccgagggccaggccgcgctacctctgcgcccccagttggctctgcttgttgctggcgtcctgttccgtgccagagcccccgggccggtgtttctgtgcgtgccgtctggctgggccctggctcctggggtctgggtttcagacgtgccccggtgcccattctgctggaggaaagaagaggccctgaggcccccttcccttatacacttggggcccgcagggtcgcccacgagggcaagggggtggaggaatgcagaaagatgcagaggggccctggggatggcaggacactggaaggcaggccctggctgctctcccgcacggaaccgccggccgcccttcccgaaaaccagtcctccgcgctcccctccgcgcccgccggctccggcctgtggcagcgctaatgaggcagtctggaggaagccggtgccagcgggcaggactctgggcggcaggccaggcttgtcatcctggcggctctgccgagctgcgggcgccacgtgggagctgggggcacagcagccggcggccctccacccccagcggggtctccgcctcagcccccggaaagctgggcctgcaaactcagggtcctctggaaggggcagcgcccttccttgccggccctcccgggtcctctggcagtgctgcgcagcccgctctgcgctgtcctctccgccgcggcgtgggtccgtcggctgcttcgcagccgcgccgctccccacaatccctcagccatcgcgggcgaggacacctttccggtcgcctctcggcattgccatgccccctcagccccttccttttaacctagtacggttactgtgtgggccaggggttcggatgggcctagggcagggatgcgcgagaaagccacttgtccccagcagttccccatccggagccccgccctgcgaaaactacaccaaacacgtcaacctgaggctcagtgttcccttccgtaaaatggggagagcatcgcgtaattcacaggattcggtgagccagtttgtgtgaagggcccagcctcctgcctgtccctttacattcccgtccctgctacattggaatagcagggccgaggcgggcgcgaccgcgttgctaagaagcgcatttgcccgtccctccttgcggtcgcttaagggtggtggaggaagccaagccctgggtgtggccgcatatttgccaaaatatttctggaaaatgtctcctttcttgtcgccatactagcccctgaactccacggaatttaaccgaatactcttttttttctccccttccaagagttgccattttgcattatttactgggacgggttacgtactcagcgcttacaatgtaaatgtttacataactatatcattttctctaattgcagaagtagtcaagcccgttataaatgtccaatcttaaacagttttataatgtaggacttgaaagccgcagggacaacttctattaaggtccacggctcgccactttccctccttcgctgaaattcctgtgcccacgctggcgcagcactagcagggtgggtcacgcgtgcaggttgctagggcaacgtcctgtcgccggcgtcggaaaccaaccagtaactctcaggagccggagtcgggtccgccctgggggcggagttagtcagcaggtcggtccggcgggagcgcgtttcctgccggtccctgcaggtggcaccataggatcgcggatgctttcctggggcggggctttcctggggcggggcttcccgcagtgctcagcgcactccaggggcggggccggggtggagccggggtggaacgtgagccaccagctgcagtccgcaaaggatcgagggaaacgagctgtcccgggacgcaacgctagacaagctcagggacgcatttacagggacgcagaaagtgtacgcgtcagagagtggaaaggagaaaacaggttctgggacggcgacagagaagggaagtcgtgtcgcccagaaaggctatacaatctccacccttcccgtttgtccctgcgacaccctttcaccctcctgtccctccggacctgcaattcttcacaccctctgcakcgcacagggtgctcaggacacatgtgcacggtgggggctggcgatgcttcctcgcccccaccacccgcaagcttgcagagagctgtagtgcccaggatgtatgccaggataggaattccacggttccaggcatgccaagaaaaatagccatgctgtttctcggtttgttcagaggaagccttacctctcttcccttctggagtttgggaatggaaaaaatgactcaaggaatmcccagcggagctaccatgtatgtactgcattgcaaaataggggtaccatattttgctctcccctacctggcagtatgcgccacacatggggctccgtggtatcagcgtcgcaccccctcatggtgttaaatagtcccctttcccttgtcccacatctctgcccaatcacacaaccacagggacacgccccaccctggtactggatatccccacgatgagccacagaaagtgcaggagcccttatatgaacacacacacacacacacacttcctaggccaagagagaaggagacccttggcagaagacaaaagcaggtttattagggccctggggccaggaatgcctaaratatgagttaaggccagggccgtgagaaaaggtgactctcctgaggccaaacctttgcatctcagaagccctggctggagaccttaggagtcagttctgggagggacctggggatacagaggggtctctcctgaccctgggatctttgggcttttgccaggattggggaaatgrtctggggggcagggagccttgaatccacagccttcatttcaataacgaccatttaatttgttccttggcagactgaagaacctggggtggggtgggggaggttgagagagaattgagaatgtcaaatgcctccatacacagtcatggggaggtccacagcccaccttgccgaagcgcccctgcaaccaccggtcactaggtggcagcagcttgtctccacttggcttaaacgcggccaaccctccaagtcagaaagcgcagaccaaaccggctgcagccagctcccacctcaggcccaagcctgcccagacctctggctcctgcatctgcagcgtgggtgtggcagcagcctgtctccccgctgtcatgccatgagagttcccgcccacagtgccacgtccaggcggagacggggcccaggcctgacactccctgtgctcagacgcctcagcaaacccctagctctggccatggctggcaatgtgtcctcaacaccccaccgcaacccactgctgatgtggcatagctggcaaagggtggccagccagaccctgcggtgggatgcctggtggaaagtctcagcccagtgcttacacaaatccatataagtgcacacgtgcatgcacaataccaaagcaggagagggggacaggactcaggtgtgtccctcagattgtccctccagccactcagccttattcccctctagagaaggagggaacgctgtgtctcctcctcctgcacagtctccctcctctcttggggacagtggcttagggttcccctgattctcctagccagaatctaactttgtcctcattttatcccccattggctacctgtagcttcctttgtttttactcaagaattccatcaaaaatgctatgttttcattctttctccctttggagaaatactgatggttattcagcatgtgttaactggcttggagccctactaagagcttgtcacgcattggctcattgaattctcataactccatgaagagggtcctgttattatgtgaggcccagagaggttgagtaacttgccctaggtcacccagctttaggtggtaaggtagaacacgtaccctgggatgactcccatgagcacctgygttcttatctgctctgcttattactccctaccctctttccactctaaaaattgccttgcagctgcattcattccagcatggtatgaggaaacatggggaatcagaggggagggcgaagcagagtgagcgctaagggcagtgcaggaaaatgggcgccacacctgggactccacacgagacagcacaggctcatctcggtagggccaccacagcacgaggagttagcgccagggcgggaagttccatacaagcaggattagtctgagcagagagacctgcaggtggacagaagagaggtcaagacagtcgtcctgaactagcaggaagtttgtgcagctggggaactgatcaggcttcagagccaggaacctccccctggccttacgctctgcaagcacctccagataagaccatgcagggttgtggcaggttcttccatagccaggtcactcaggggtaaggtgacaagtgatgagtggggaaagtcagatcctatcatgggtttgagagtcccttaacaatcccagtgtgcaccctaagtggcaaggacagggrttaagagccaaactcctatttggtaccctttccaggtttcggtagagggcgcatcagaggcctgagttcccagatttttggggtgcacaagtgacccagccatctccaaggtaggcagctcatcctagtttcaatccaactaaaccaagccaggagatgaggtgggctgatggtaacatgcccatccatccattagtacccagctcccctgagttggagagcccggaggcctccagtgagtctttccaagatatgacctgtcactgcctcatcccttcccttctcacccctgatttttcagacttgataacttcactgggtccccctaggatgctctaggatgctctgctccccgtatctctctagaccatttctagccaaggcagatgcaggggggcctacctgggccacactctgttcagtcaagccgccatcatctgcctgtaaggaagcagagtcaaggggtggggtagggccagcatgagggtcctgggtcagggaggtgaaggaaaggggcttgggggtatgggtgaggtggtgcagtggttagggtgattcagagctgcacctgtgtcactggttaatagaagtcctgcagcctgtcatttggaagccaggacctctgggattgtgctatggtgcgtggagggtgagggaagatgggaagaaagatgggaagaaaggtttcatccagacatgagaaagccaaacaaggcagggaggttctatccatacccctgacccccaacctcaaggccaaggcagccacctagtgcctctttgaagatgtatttatttccccagtctatacttcctaccaggaaagaggtgaggtacttgtgctcctagccggggagaggacaggaagatttcttccattaactggcatcccacccagaaactgctgctcatctcacccctaacaagtgtgtcagcccagtggttggcttctgctagaggagcttgggcttctaccatctaggccctagcagccctattcccagggaggacaggaagggcagcctaaaagaggaggtgtccaggaagactcttaccctaaaattcaccttctggatcacttgctgggggtcactctccagaatcacactacaagatgagaggaaaaaccaggaggcaaatcagtggcacaatcctcccctccgccccttctccttgccaagcctcttccctctccgaakgcatcctgcaacatctccaccttccaggtcccttcccactgatagccctcaagtcagaactctccctcagcatggagagccctcagctctgattctttgatgcttcaacccagtggtccacatgctttgtcatccctgggcaaaatctttgaaactggataagaacagtctggtctaggatgatcaggttgtcaaaagcagggactctcaaaactcagagctcttgaaagttcacttcactttctgggtataggattggattccctgtgaaaagagttaggaagagaggccctgggggttcttatcttgttgcactgttattttatggcatggggtcatgccctgcataaaagaaatgaaactccaaaaatcagcatctaccttctcccctacttcctcccytttttttttttttaaggctgggcacggtggctcatgcctgtaatcccagcactttgggaggccgaggcgggtggatcacctgaggtcaggagttccagaccagcctggccaacatggcgaaaccctgtctctagtaaaagtacaaaaatcagccaggcatggtggcacacattgtaattccagctaattgggagggtgaggcaggagaatcgcttcaacccgggaggcagaggttgcagtgagccaagattgcgccactgcactccagcctgggcatcacagtgagactctgtctaaaaaaaaaaaattttttttttaaatcttcccttttaggccaggcacagtggctcacgcctgcaatcctagcactttgggaggctaaggtgggaggatcacaaggtgaagagttcgagaccagcctggccaatatggtgaaaccccgtctttactgaaaatacaaaaaaaattagccggtaatggtggcgcacgcctataatcccagctactcgggaggctgaggcaggagaattgcttgaacccaggaggcagaggttgcagtgagccaagatcacgccactgcactccagcctgggcgacagagtgagactccatctcaaaacacacacacacacacacacacacacacacacacacacacaaagaaacaaacaaaaaaattcccttttgatagacccaaatattgtagcttttctcagagagcaggcgctccttcgtgaggccttggggttatgtacagggtacatgggcgtgagggcctgtcactgcggcaggacaaagatgacaggatctgagtgtacctccttacccactgagactcctccaaggcagaagctttgtttctctttgttactaaatcactggaaatgacaaacatttcttgggagcctcttccagtccccatccttgggctgagcaccccctgtcccaagctccctaaccaggggtcctgtaatccataaagaaagagcatcccaggccaaggctccagtttaggcgttgcctcccgactggcgcttccccagtttttcttggcaggaaactgagttcctcagaggcagagacgggaagcttgtgaagcttacacctcaggcatcctcctttgcacagccatccagagccctgcatcttgttttgcatttatagttttgtgtgtgtttgtgtaaagttttccttcaagagggttcaccaaattgtatatgcttctggctccccaaaacctggcgttaccccactcccttttgggtcccagaaatctgcaggaggcattccttagtgccccaggcagtccagtacagtgccatagaaacagcatggcctctggaactattcacatggttttagatcttggccctgccactccctagctgtgtgagagacctccggcgtgtcacttgaaactttgagcctgtttcctaatgtataaaatgatgtaatgatagagggatgtatgtttttaaggagctcaagaaatttctattggccggggatggtggctcacacctgtaatcccagcactttgggaggctgaggtgggcggatcacgaggtcaggagatcgagaccatcctggctaacatggtgaaaccccgtctctactaaaaatacaaaaaattagcttggtgtggtggtgggtgcctgtagtcccagctactcaggaggctgaagcaggagaatggtgtgaacccgggaggtggagcttgcagtgagccgagatcacgccacttactgcacaccagcctgggtgacagagcgagactctgtctcaaaaaaaaaaaaaaaagaaatttttattatcctttgccccagagccagaacttctttttctctctgaatattgatcccctgatggaaattcacaagccaacttttctcaaaagagctcctagcttcctaagaatatactagcataccaataggaggcaacatctattgaatgagaaccacaagcttcacatgtatcttctcacacatgtatttaatccccacaatcccttattacctccatcctaaagatggagaaagtaagcctcggggagggtcagtaattgacccaggtcacgcatctagcttgtgttggaattgagccctaagagcaggacatgtggggctggtgggactgtctgaagtccttccagagagggccagcatctgtgccagtgcttcccctgggcattggagaccaaactggattttccccaaaccctgcctattcaacagtctcccatagtttgacatcaggttagtctcttgtttggcttgactttggctaacattgaaatcaacttctatcttcatgagtggggcgctagtaagrggaagggctaggggaatgggatccctgggaatatgctgggggaagggagtgagaagytggtcagagttctagccatgctgggtgccatctggggctgatgattatcaaaggcactcctgctgtgagtgtccctgactgtcccctcctcacccgccatccacaatctcgtccagcaccaagaaggctccgtccatgttctccagcaaccagcgcttctccacgttcttcctgaaggtggacacaagctcctgagcctccctgtggctgggaggaactgagtccctgcctaggtgaggctgaccccactctccaaagactgcctcattcacccctcaccaaacaaggactgggaaggagaatgtgaagggcagtgagcacagagcccatgcaaggcatttctgagcaaagggcagttctgcttccttacaccctaccttgtccaacctcccatactttgggccttgacaccctggcacccaccacaggaccccagatgcgtttcacaactaggttagatgctatagcacagccctactttcrttcattgtgtcgactgtgaacttttctttttggattatcttagtcttgtggggacttcaggagaaaaacagggaggaagggtcctgtgacatatcagggccagggggatggggcctcggagggcagagaacctcactcaccttaacatgtggttcagagactcaaacaggcaggtgagaacagacatgagcatcagctgggatgggcagatacgggaggaggaaaaggagagtttgagattgagaaggtcaaaagaagcacttggagcccacctgtgcgggcagcaatggagagtttcagaggcctgggctggagactgactgcggtgtgacattagagggaacttccatgtgtctgggctgggaaactggagttctccactgggagacattgagtgtatccttctctagttatgtttaagaaggacaaagcctcccttgaagatgaagtgattacttcattcctggttcccaaggaaactaaggggcatcgaagatacacattgtcccagaaagaacccttctggctgccctcctctaccccatggagcctaaaagraggggtccaatggtgagcctccaggtcccagcctcaagcccagattccaaataacaacatttccccatagacagacccttcttactgccccaacctcctgaattcacctcattctcgtaggatgagcccaccacgtataggaagaggtcaatgctgttcttgtagacgatggtcatacccccaaaaaatgcaatctcacctagaagtggagggagctttcagtcctggccaccttgcctggtcctagcctagcccctcctcctcatgtatgactctgtgactctcctatttccttctcccctttctggagaacccttggaaagaccagcactagggacactaccatcaggcagccccgtgtccttccccttatctgctactctatttctagggactgcctcaggccaaggagtcaacaagcccagttgttgacccgtttacctcctgcccacgctcccaccctgtgcagcaccttgggaccagatccaggttgggaccacaacacagttggcctcctcagctagagagaggcctggggatgctggggggttgggtagttgggggaactggagagtgacagggagtggaggttccctggaggaagggagtggagaacagcagggaaggagaggacaaaaagcctctgaagaaagggaaatggcctgtgggtgtgcaaggctgatggggacagatgtgtccagayggagaagatgacagtgtgcatctgatagtctgctggaggaagagggggacacttactctcagtccggctggtcttgttgaagacatttttctcgaaaaccatctgctccttcatggaggggaatgtgtcatcataatactatgagaaagggaaggagaaaggaccatagctttccacacagcctggatcctccctagattggggggcaggaaagagtaggcgctgggcaagcgggatcctgcttccctgccccatctctccattactgcaccctaggcctgcaggctcattacttcctccaaaacaaattattcttttttagatggagttttgctcttactgcacaggctggagtgcagtggcacgatctcggctcaccacaacctccacctcccgggttcaagcaattctcctgcctcagcctcctgagtagctgggattacaggcatgcgccaccacgcccagctaattttgtatttttagtagacagggtttctccatgttggtcaggctggtctcgaactcccgacctcaggtgatctgcccaccttggcctcccaaagtgctgggattacaggcatgagccactgtgcttggccccctccaaaacaaattctgagcaaagaaagtcccaaaaagtagagggatattgaggcctgcttttggagtcccctcctggtttcttggaggatcttgtacattcagcagatgtgcagggtgctaaggattggcatggtcacgagggcacactaattctacagcaccctgagtctctacaggaaagacggcaaaaccaggagtccttcttaaacaataataatgataataacaacagctactttattatccccattacacggatggggaaaccgaggcatcaagaagccaggtaatggcctggcatggtggctcatgcctgtaatctcagcactttgggaggccgaggcgggtggatcacctgaggtcaggcgttccagaccagctttgccaacatggtgaaaccccatctctactaattatacaaaataaattagctgggcatggtggcgggtgcctgtaatcccagctacttgggagggtgaggcaggagaatcgcttgaacccgggaggcggaggttgcagtgagctgagatcgcgccactgaacttcagcgtgggcagcagagggagactccgtctcaaaaaaaaaagaagtcaggtaacttccccaacatctcacagttgtgaggccaaagctgggtttgaccactaaggacggtctgactgcagacagggttatagtgaagattaaatatctaagaaacaattcctcacacatatcccataactaaattaatgttttttgtttgggaatggtgagcctctctctctgactcagtttcttaatctgtagggaggaaaagcctttggccttgctgatccacctctgaccatctgctggggcaaggtgtggtcagctcagttttcaattttctggatgtggattttgccacttaatactcaatccgcaggcagattagccatctccctagtggccgctgcttatttgaatttcataaaaacaaaaaactttcagttccaaataaacaaacagaaaatctattttttgggatggggtctcactctataacccagattggagtgcagtagctcgatcatggctcactgcagcctcaacctctcgggctcaggcaatcctcccacttcagcctcccgagtaggtgggactacaggcacacaccaccacgcccggctaattttcgtttttttgttttttgtttttgttttgttttgttttttgtagagatggggtgtgccatgttgcccaggctggtctggcactcctgggctcaagcagtccacccgcctcggcctcccaaagtactgggattacaggcatcagccactgcgcctggccttacaacacatttcttttctttttcttttctttttttttttttttttgagacagagtttcgctcttgttgcccaggctggagtgcaatggtgtgatctcggctcactgcaacctctgcctcccaggttcaagcaattctcctgcctcagcctctcgagtagctgggattacaggcgcccaccaccatgcctggctaattctttgtatttttagtagagacagggtttcaccatgttgtccaggctggtttcgaactcctgacctcaagtgatctgcccgccttggcctcccaaagtgctgggattacaggcatgagccatcacacctggccttataatgcatttcatagctaatgcagatgctatagctcccctacaattaattgtgttgacagcagaaatttatttttggattattttagtttggttcgctcaggccatgtttgctaggatagataacagctaattgaatgggggtacagtgaaaaccaccttgagcttcatgtcaaaaaacccgagtttgcctgtgaaacctgtgaaatgggagaagtgaaaaaattaaataagtaaataaataaaatttgagtttggatctgttaggatattaatacttgtgacctcaggcaactcacttagcttctctacccctcattttcttcatctacgaaattaaagagttggattatacagtttctaaaatcccatctggttctaaatccttagactccttagactaaatcgttagtgtttaccaagctgtagaacaaaagtggaggtttagagacaaaccccaaagaacaaaagaacttgtgtgggggtttggggactaagactcctgggtcccaggctcaacactccactgacccattaggcagaaccttcccatgcccaggtccaactggccagtagcaggatgataaggaaacatttcagggaacatgagtagaaatagaggagacccctcatttcagggagcagcaccttgacaaggcaggaggatgagaaggacctctggaggggtctaagctgagctgccctgagtcacagagatcacagtggagtttctcctgagacaggagtgtcagctgagtgggaactgtgtccctcatgggtggggtcagaggttaccttggccagcagccggcgcccgtcattatctaggatgaaaacagccttgatggtgtagagggaaggttcctgcaactgacaccggagaggagagttccgtttggcccctgactcgaggtggacaccctgtgtctatgggatctgctggccctaggatacatcctcaggccccagcaaccccagtcctcaaggtccacagctggttctgcccagccctgtgccacatgggccaacccaggtgcccactccactcccaggcagatgttccactgcaggccccgagtgggcgctgtgcccgttgggtgcagaaggtccttccgggcccaagttctgtcatgcactgactgctccagagcccgagtcggagtgtatcacagaacctgggccgggggggacagcgggcygagcctccttcttccagctgatccctggccgggctggacctgcgctatcagcgcgcccccaggccctggcccgggtagactccagaagcatgcccatcacccaccggtgatgggagccgagtctgggacggacaggccactccttaccctccccgcggaatcgcaactcacccgccacccccactccaaacggacccagaacttcagccccgcgccgacggactcaggacaggcctcctctccggtcggcgctgggacgaacttttcctcccgggtcctggggccagtcaggggtgacacaaagttcccagccgccgggcgcgcgagttctgagttggctgctccccctaaccctgctctgtccctgcccagctcccgccgcccgggatccccgcgcccgcccgctccgtacccgcagccccgagggctccccggctcgagcaggcggcgccggcccccggcctgccgccgcggccccctcccccgggtgcggacgtggccagcctcgggccgctgcattccgctcgccgcctcgcactgacagcgccgcccgccgcctgcccgccgccgccgccccgcctccgcgccgccccgcggccccctctcgcgcgtggcctccctttcctcggggccccgtcctcttgctcgttctcccccatctcccctcccgccctcaccccacctctccttcccccacttctcctctccctctctcctccttggctccttcccgagtcccttacatccccgaactctgcatcctcagggtgccccaagaccagccctcgtcctgcttcctgcctgctctccggcctgtggctttggtgtgcgccagtgtctataggctgtcctggggccagcagcaaacacaagcaaagcccacttttgtctgttgacctctggtaggtaccatgaggacaaatacgtcaggtcaccctttagatctcagggacagggtctataagcaagagcaaatgaggacagttctggggacacccctctgtgaagaggctttctcattcctctctcactacttgcagaaggcaaccatgggcccggagacacctccccaggctctcctaagtcacagatatggcaccatcagaagcaagacagacgcccagcagcacaaatgctccaccaatgacatcgggctttgcagcatgttttggtttctttggtctaagtctaactaagacaagctctcatttcagggtacactggcaagtgggaaattcacatcccagtgatatgttagtgctacgtatgcatttaccggtaaaaacactgtgcgtgtattttacatttgacaccttcacatccattatctaatatagcccacacctgtaagataggcataatggaccctcattttaagcaaagagagactcagaggttgtgtgaccttttcaagactatacagctagttgactggggatagaacccagatttttgactcaaaatttcttccctattcttctcttcaagccctcttatgttgtggaccacagtcacttaccctagatggttacagaatggggttttcctcactgaatgcatcaagtcttcttatcttcaagcctctgctgaaatataattaccaaaaggtcctcctgacagccaccatatctgacttgataggtctctcctgtcacattctctcagttcctatttctttctttcattgcacttttttcaatctctaaatattatttttactaatattgcttgtttgagacacggtctcactctgttgcccaggctggagtgcagtgactcgatctgggctcactgcagcctcaacctcctgggctcaggcaatcctcccatctcagtctcccgagtagctgggaccactggtgcatgcaaccactcccaggtaattttttatttttttattttttttatttttgtagaaacaaggtctcaagtctgggctcaatggctcacatctgtaatcccagcactttgggaggctgaggtgggcagaaggcttgagcccaggagttccagaccagcctgggcaacatggtaagatctagtctctactaaaactacaaagaaattagccaggtagggtggtgtgacctgtagtcccagctactcagaaggctgaggtgggagaatcacccgagtctgggggttcaaggctgcagagccatgatcatgccactgtgctccagcctgggcaatgggagtgagaatctgtttcaaaaaaaaaaaaaagaagaagaagaagaagagaaaaagaaaggaagaggaggaggagggggaggagggtgatcatgatcaaggtctcactatgttgcccaggctggtcttgaacgcctaggctcaagtgatcctcccacctcagcctcccaaagtgttgggatacaggcgtgaaccaccattcccagcctttactagtttgtttataagtgttccttctccccgcccagactttgagccctgcaagaaccaatgaatgtgactttttgtttgtttgtttttttgttttgagacagggtcttgctctatcacccaggctggagtacagtggtgtgatcatagttcaccgcagcctcaaattcccagtgtcggccgggcacggtggctcacgcctgtaattccagctctttggaaggccgagacaggcggatcacgaggtcaggagtttgagaccagcctggccaacatggtgaaaccccatctctactaaaaatacaaaaaaattagccgggggtggtggcaggtgcctgtaatcccagctactcgggaggctgaggcaggagaatcacttgaacctgggaggtggaggttgcagtgacccgagaccgcactacagcactccagcctggccaagagagcgagaacctgctacccacccacccacccacacacacacacacacacaaacaactcccaggatcaagccattctcctgtctcagtctcctgagtaggtgggacgatacacacgtgccaccatgcctggttatttattattattttttttaaaggcagggtcttgctgtgttgtccaggcaggtcttgaactcctgggatcaagccctcctcctgcctcggcctcccaaagccctgagattacaggtgtgacccacctcacctggccaattatgtttgtcttgttcactgtggaatccctagtgtttcttacaaggcttggtgacagattttttttttttttttttgagacggagtcttgctccgtcaccaggctggagtgcagtggcgagatctcggctcactgcaacctccgcctcacgggttccagtgattctcctgcctcagcctcccgagtagttgggactacaggtgcacaccaccacgcccagctaatttttgtatttttagtagagacagggtttcaccatgttggccaggatggtctcgatctcttgaccttgtgatctgcttgcctcggcctcccaaagtgctgggattacaggcatgagccactgcacctggccgatgacagatatttaataagcatttgtgaagtaaatgaataaaggaattcaggatgagggagatcatgtataaatattcacaaataccaaattttaactaataataattaaaatgtacctatcaatgataccatattggctgggtgtggtggctcatacctgtaatcccagcactttgagaggccaaggcgggcagatcacttgagaccaggagttcgagaccagcctgg

SEQ ID NO: 93804 - DNA, 14091 bp, Homo sapiens
agggccaggggtttgcaagacacagcagagcgcaggctacgtctgaccagtggctggtgagattcacagacaggggccactttgggccactgcaggatgtggagggtgctgggcgtcaacgggttgccctggagggtaggagggaggcaaacagctcctgtgggcaacagcggtggggcaaggggctggggtggtggctgtactggaaggggtgagggccagaggacaaggagggagcactctgggagtcctggagaggagagtgtgaagacacaggagaaagagggaaaggagatcaggcaggaaagatgagggaggggagtgggagccagggcctgactggagactcgacttctgacttccgacttccgacttccgacctccaacttccgttaggaagtgaaacaaaggcgaaggccctctctgtcagggtactcagaggaaaggtcagggaaccagggcatgtgggagaagagtgggagtcctcccagtgttgtggggaaggtgtctgtttagctggaggtgagattctaggtccggtgtcggggaggtggtgagtgtggaggccgggagattagaattagtcattgtggtgcaaaagggaaattaacctacagaagctgtccagcgccagcgtgagtatcagtcagaggctttgagcaacccagtgctctagaggaggtaaagtgaaggcttccctggtctctgacatgaacttgttctgactccccttgtagaggcccaggaatgtgtcctgccttgtccacaggggaaggcctccaccctgctcagcctgcctggcagaaatgtcccccagccctcctggagccttagccccctgaatgtgccccacagcagacagctatcagattcctccacaggtgttcactctgtggccgggcaagtcagccaatttaaaccgtatatgtttgcctgtgtgtatatgtttatgtgcgtgtgctttgggatgtatgtttgcctgtgtgtcgatgtgcatgtgtgtgcgtattatgtatgtgtgtgtgtgtttgctgatgtgtgtgtgtttgtgattgcatatgtttgtatgtgtgcatgtgtgtgtgtgagtgtgcatgtgtcagctttgccgtctttccttcaacctctggctgctgcagatggtggagtgagctgaagatgctagagtgagctgaggctggtggagtaagctgaggctgatggagtgagctgaggatgctggagtgagctgaggatgctggagtgagctgaggatgctggagtgagctgaggatggtggggtaagctgaggatggtggagtaagctgaggctggtggaatgagctgaggatgctggagtgagctgaggatgctggggtgagctgaggatggtggagtgagctgaggatgctggagtgagctaaggatggtggagtgagctgaggctggtggaatgagctgaggctgttggagtgagctgaggatgctggagtgagctgaggatggtggagtgagctgaggatggtggagtgagctgaggctgttggagtgagctgaggatgctggggtgagctgaggatggtggggtgagctgaggatggtggagtgagctgaggctgttggaatgagctgaggatgctggggtgagctgaggatggtggggtgagctgaggatggtggagtgagctgaggatggtggggtgagctgaggatggtggagtgagctgaggatggtggagtgagctgaggctgttggaatgagctgaggatgctggggtgagctgaggatggtggggtgagctgaggatggtggagtgagctgaggatggtggggtgagctgaggatggtggggtgagctgaggatggtggggtgagctgaggatggtggagtgagctgaggatggtggggtgagctgaggatggtggagtgggctgaggatggtggggtgagctgagcatggtggagtgggctgaggatggtggagtgagctgccctgctagacactccttatctgctcccagcacacaacatcctgtttctggtttccatctcggtcagtggggctgcagggcagatgctgctcagatctgtctttggagttattccactttttgtcttgaactttctggttgtgtttcatttttcattaatgcattttagaacttcggtccttttaaaactctgcatttgttataattagctgttcttgtcatatagttttattcctttatctttttttgaacattttatacacccttatttcaatgttccttttagatcactctattctctttactctctgggctttgaatctccttgtttcttgtatctgctgcctctctttgggatacctgggagtttttcctctgacctcgtcttcagtaggaaatgattttccatgagaatcctggttcccctggatgaggacggtgtctcctggggagaatgtcctgtttggttttgctggagcctggcaggttctctcagttgcagatgggtgtaatgttagctcctcagctcagagtttctgcaccagctcaccgcagacttgggccctggtttcccacagatgcccagggcagggggccttcctctgtgctaggtgctgctccgtggtatttgttccacgagtctgcaaacattgttttgaagtcagtttgtaacatctgcctagtaaacaaaagtaacacttgtgtctcctggaaaaatggactgtcaccacccccttctcttcttcatcccagtcctcagggaggcccctgagccactgatgtctgaggccaccaaggcaggaagaccctggggagagggtaaatgggagatgcctctcagcccctgtgcctgctgtcccctgggccccagggtagagcttctgcagactttgttccttcccatttctgagacagcctgagctggggccaccctccccttcatggagtcccagctgtcaaacaaacacctccagggccatctgttctctgagcaagagttttcctcctgggatgcccccacccacccacagaagcagggatatagggaaggaaggaccaggatttctggttgcaataattgtatccgtgagtttgagactcccaggttacctttggacttatgagctgaactgctgggcattctggcctggatgtccctagagccccagaacctccacaaggatcatgagcagggggtcactgccccagaaccatgagggcacccacatggtctaccctggctcctcactcatcagaggaaatgacgagattccaaggtcccctccggtattgcaagctggcctgagccatagggtcctgtcccagcatggcatcaaatgcctggagctcatcctgcaggagcagccatggcggagcccccaggtgtgctgggcagggaggatgtgtggaatctcattcactctggacagctgtggcccccaaactacccataacgatgcagtccagccggaactggggccttttggcttcataacatgttggagtctttccccagagccccattgtcttttagaaattaccacttagagagggtagtgcttctgataaagacaggcatgcactgaattgtgtcctccccaaatttatatattaaagtcccaacccctggttcctcagaatgcagctgtactgtggttggagaggatttgtaaaggttaaattaaacaaagtcattagggtgggccctaatccagtacgactggtgtgcttataggaacagtttaggaaacagacatgcacagagggtaaagcatgggaggacacaggaggaaggtggstgactcggaggaaacgaccctccccacaccttgaccttggacttgcagcctgcagaattctgagaaaaaaatgtctgtttttttgtcacccagtgtgtgggactttgttttggccacctagtggactaatacaatggctttgctgttaacagcccagacccacgtttcctgcacataaggcatgggactcactcatcccctctgcccaggcccagccctggtctccgagctgagttcactgggtaggctgcaggcagcaggcaggagtggggcctgatggaacgggcgatgctgaggcagtgagggcggcagagggatgctcactggctcatgtggctcagcttcgtggaagcatcaggagcaggagtgaaagaagcaggtgacaggggccactcatggggagacagatgggcaggctcctccacatgctggagacaactttgggggcacctgctccacctgttgccacatcctcaaacttccccataccccatgctggatccagcagcagccctgattgtatggtatgaccttggtggtcagatcaggcatggacagcttgacccagactatgggatcagaatctctccccagcaacgtggccatggggtcatctgaacagaggatgagcaaccgcagacttcagggctactagcagccaagtacacagagaggcagaggtggggagaggggagcaggtgcagagggagagaaggggcagagctgaggccgcatggcccagggagcagggaaacctgaaggagaccccaagcaggggtcctgtgggctttccaatgtctggtcctgctgaggcctggctgcccttgtgatcatgagctggcaacctacagtcactacagccctgtccttctggtctcctcttgggtcctgcctctgcacagcctgtagccaggctcaggctgggatctcccatatggaccctaagacgggctttcctatacttcccatggaaattctccagctgatagaagaagtgaacactgatagaagatgaacagctgatagaagaagtgtgggggttttctcaagtggtctgtaaaatttttgcaaggtttgtggttcatctcaaagattcgtaatttcgaaatggaagtcttaatagttagggaaatttttcacataccccgaagggctcctctttctccagggttgggtcaaagtcttgtgtccagaagccccctggtcggcagtcctcttggcttcccctatcacccagtgtccagcctgcatgggcccttcagtcccaggggccatggtgaggctgggtccctgggcctggcaccatctagacaccccttggtggtccagtgatgtgcaagctacatctctaaccccctgacctctgccttctctacctccctgcccactccctcattcagagacactgagcgtcacctctcaggagtttccatcttaacgcaagatggaagagagtttcacttcaggccactgttgcccactgtatcttagtccatttgggctgctctaaagaaactaccacaaactgtatacttttcaaacaacaggaatttattttaaacagttctggagtctgggaagtccatatcaaggcagattgagtttctggtgagagtcagctctctggttcattgttagcatcttttggccaacaatgtctcctgtgttctcccacagtggaaggggtgaggcagccctctggggcctcttttataaagacactaattcaatccatgaggctccaccctggtaacctaatcatctccccatactcccacttcctaccatccctttgggtttaggatttcaacatatgaatctttaggggacactaactttcaggtcatagcatttggacttacaccattgcctcacccccgcccctctaattcttgggccttcggactcagactgagtcacaccactgacattcttctttctctagcttgcagatagcaaaccatgggacttctcggtctccataaccacatgagccaattcttaataataaatctcctcttacatatacatatacccgtatatatcctattggttctatttctctggctatccctggctaatacacactgcaagcacctgtgcaataccaagggcctggccatctgcttgaaatgtaaaatagaaaacacacccccccacacagagagagggagagagagagagagagagagaccctgtccagagccacccacccagtgcctgtccctagaccaaggcccagtccccttcacctgtctccatcataagcgtcaccagcctgtctgacaaactgcccagcaaagttattgacattggcctggccgcctggggatgcaaggccctgaacattgtagagaatgagatgccaggcctgatgcacatgtgggagctgtactcggcctccaagccactagagggcamccacagtgccagctgcctgcacatgaccatggagatggccatccacattgggtccctcatcaccctgggtgccccagcagcaacatcttcctcaccctggaycatgtgttggctgccattgccaaggctggcattccagtttacacctggaagggcaaaagaaygcagagtacccatggtgcatcgagcagtcactgtaattcagggatgggctctcaacattattctggaggatgggggtgaccttgccaacctcttccacaccaagtactcacagctcttgctgggcatctgaggcacctccaaggagaccatgacgkgtccacaacccacacaggatgatggtcaatgggatcctgaaggtgcytgccatcaatgtcaatgactccctcaccaagagtgagttcaacaagctctatggctgctgggagtccctcatagatggcatcaagtgggccacagtggtgatgattgccggcaaggtagcgatggtagcaggctatggcaatgtgggcaagggctgtgcccaggccctgtggggtttcggggcccacgtcatcatcaccaagatcgaccccatcaatgcactgcaggctgccatggagggctatgaggtgaccaccatggatgaagcctgtcagragggcaacatctttatcaccaccacagcctgtgtcaacatcatccttggccggcactttgaacagatgaaggatgatgccattgtatgtaacactggacactttgaggtggagrtcaatgtcaagtggctcagtgagaacccttggagaaggtggccatcaagccccaggtggccgggtactggatgaagaatgggcgccacaccatcctgctggctgagggtcggctggtcagcctgggttgtgccatgggccaccctggctttgtgatgagtgactcatcaaccaggtgactgcacagaatgagctgtgaatccacccagagaagtaccccattgaggttcatgtcctacccaagaagctggatgaggcagtggctgaagcccacctgggcaagctgatcatgaaattgaccaagctgactgagaaacaggcccagtacctggggcatctcccctgattgccccttcaaggctgatcactaccgctactgagagccaggcctgcatttcaccttccagctgctgttcttgcccasgccctgcctctccttcttaagagcgaatggcaccaactttgtgattggtttgtcagcatcccccatggactccccagggccgttcactcagtttttggcttctgctgcacccctcatactattccaagtgwgtcaggggaactgagagtcccctcctcaagcctggtcatggtggaagtatgagggagacagccacagggaactgtgagctcaatggtcttggaactgctcactaagtcagtccttccttaacctggatgtcagcagtggagtcgcaaagcccacgtactttaccatctaggccttcacctggcctgtggacttataccctgtgcttggtttatggttcagtcattcctcagcccgtgacagatgagaaggaactgtattgaagggcaaggaggaactgtttcaattttcctgagagcttggcttaatgctggaccttctcttaaacctcgtaacaatgagattggtactttcagtccctgtttcacagggattagaatacactcttaagggacaactgagaaagaacagagaagtgacagccagaggttgagaggggccagaaaagcataaaagcaggcacagatcagccaccactttgtaacaagagggttcctatcacaaccttgggtcaaaaagagaataatttggcttataatgtttataatgttaaaagaaagcaggaaggtaggtaaataaaaatctcaatgccattaaaaaaagaaggaaagaaaaaagaaacagagagggagaacacaaaacggaatgaatgtttcaatagatatctgaccaggtatgcaaattacccagcccagcacaggcagaagcactaggcagtgcttgagacatggagttcccttctgcccctctgtctccctctacatgctgggcctactcagggaatcctggtgagagatggagttcccttctgcccctgtctctctctacatgctgagcctactcagggaattctggtgtttacagaaggggtcagaggaactgcatgaagaccacagctttgtgtagacacacaagcttcaacacaggcatgtagatgtgtggttgtatatgtgtgcatgcgaggagttttgcagtcatgcctggtgggagtctgggggaggctcctggcttcaaagagcccaagccattagcccaggcttggagacttgagctgagtgattggagggaggggctgagcagcaagctcaggaatagcccaggccggccaggaggacagtttacctaaccgtcagtggtgagggagcctcgccccagcccagagctgggtccactggccagccaggtggaggggttccttcaggctctagtgatgacctggcaggaagctggggacatgctctaggctgttagcctctgtgagaggcaggtggatacttcccccatatccccactcctggttgcagattctgcacttgcggacaggaaccgagtgcccagtacacttctgcagacagctgctctgcattgactcctgcttcctccacttaaaagttgtgggatgttaagcaagttgctataaattctcagacctgtactttcctaatctatcaaatgtgaagaaagcaagccaaggtcacaaaatattagtgagtctacaacaattcacccgcggtgatcagcagcacatacccaaggaggataaaagaaagttgataaaactccccggtgttctgatgtgacgtccccacctcctaggaccaagggtctagcacagagtagaagcttaggatgtatcaaggccccattgagctctgggagttctggctctgcccactttaatgataaatgatcagagtgctgcactaaggcagcttcaccattaagcagccatctgggagggcctggtggttcagctcccaactgcggaagggggcaacctggggaagtgcacagggctctggactagagccagaagactcagctgctaaagcccagcccagccctcctacactttcctacacttcaacccacctgatgcctcctctcttggaggctcgagcccctggtggtgggtgtggggtgggggatctaagggctcaccttgtcactaggcagtccctgtcccaatcacctccatgcctttttgctggggcttgtgggttgacagttgaagtttcaggaccccaggaaaagtgccttaaataacacattcctgcaaacggatagccatttattttcccattgattggagatggttgcggtagcacatcctatgtgggtctggttcctgccgttattctctccctcaccatggtgytccccagaggactccctaacaaaagaaacctcctacgtgtacattttcctctccagtctgtttctaagcccctgtgaggagttcagctaatacaggtgtgcagactgggtgtgcacatctgcctccaaaagtcccaccagggtcttgccatgaagggagccttccctggtaggttaggaaaaccagtaggagagctaaagctccagggtccttgccctcagtgattggtgccctagcggggactgggcactgtccacaaatctatccccaactccttcttggatgcacagctactaaattgtagcctcccctgcagctcagcgggctgtgtctgagctcatggcagtggcaggtgcacatgcctgtcacccagcctagccctgctccttctgtctggctgataagaagctgatctcaaaagaatgctcttgcctggcagagcttcccctgcatattgaggtccctgaatgaccaacggaggcctgcagtgcccctgggggcctggaccctctctgtgccatcccaggggtgagcagtgccctggcttcttgtgagcttccatgtggggctactcgttacctcacctgctctggctcattccagctctacaggggtgcttaacgtgacatccattggactctcagaaatgtgtgttcttatagttctggtctaaaataaggaataaaaattgcccaccgtgttcccttttgtacactttggttttgggcagctctgatgtgagacttgttttctgaaattatgctgcccctcccccgaggagggggcaatggaacagtggcagccaaggagtagaagtagttagttggcacctctcaggcatcaaaagagtgagtaaatactaacacttcaaacagatcctctaggagagcacgctgaaattcaccagagacatgatgggaatcagacagcagaggagagggaagcctgccgagctgggacccccatggagcggaaaggggctccctaacacagggaagaggtgagcaagtgagagaaccctgaaatttcacaactccaccatggaccttcacaatcctagtcacagggagccctctcattgcccccgggcctccagatgaacacagggagcctgctggagactgtgcagaggcactgctcaagcctacatggatcccacaggcttttcatccctgatctgcctggtgcagctgctgctgcctgccatggaggggaactgggcactttcgtgtgccccaaagacagatactgcagctgtggtaaggaggagtgggtagacaaggcttccctctgctgctcctctctgccaaacgggacttgcctgctttggtgacaggctgccagtgccaccgcccacccctgactgagcatgacagccacagctcactgttcccctgagaacccaacccccagaggctgcccattagcccgttccaccacaggcttgcctctgctgccccaggccaggaagggagcaggaaggtcaggcaccttcctgagctcctaacagcaaaatccagctttgggagagaagtgcaagtggaccatgagcccaacaactatcattgctcattgccccagctgaagattcctgccctcctgggtgaacggtgcacagcacagccaccctgctatgcctgaacattgcagctgtggcctggagcccttcggaaagcccagcccccacagtcctgtgatctgttctcaggctccaggggatcagcccacccctccctatcacagccagcacctgaactctgggctgactagatcctggtccagccacatcaggactcctacatgccatctagtgggtcactgagaggtgtgggagttggggaattacctagcccagtccaacatcgctggcacctgactaccctctggacctgagtttgggcccacccaagcagccaacactagccatgactcccacccacatggctgacaggcagagccattctccctctctccatggggtggcggcattaccacattggagaacaggcgagccatacaactgcctgcattgggctgagtgaagaatttccaccctgaagccactcctgcggagaggcacaggacaggcattttccacgtctctcagccacactgtggcctgcagatagaccacagtgtgcatctgaactgagacaccagccccagaacaggggtgtgatagggaagcagattgcattcctgcctatctagacgtggagccagtgcagccccctcatcccaccacagagacctctgtgcatgtcatcaggagctcccccagccacccctatcatggctggtgcctacgcttatcatttggggtatttgtgggaaagccagggttccagctctgcccagctgcaacctctcttccaccctcccaacctactcttagcaggaagctcagggaacctggcattctgctgtccagtccatcagctgaaacaatagagagcacctcagtgagcaaaggtcaratatacacccatgcgcttatgccacagccagtagttagtgagaatctctcaggcatcaaaatagtgagtaaatactaacacttcaaatagatcctttaagagagcatgctgaaattcaccagagacatgacaggaatcacagacagcagaggagagtaaagcctgcacagctgggacccccatggagcgaaaagaggttccctaacacagaagtgccccctactggcctgcaggttgaactgcacagcccaataaaaaacagaagtgcacagggctgcaggagaaaggccataacccctacagtgacaccctcaaggcggggggagggagagataacagagaaaatatcccacataaatgaaaataaatttgaacataagaagtgtcagctcctccagatgagaaggaaccagtgtaaaaattctagcaccatgaaagatctgaatgttgtgacaacatcaaataatcacactagctctccagcaatgagccccaacgaaaatgaaaaccccaaaattacagataaagaattaaatgtatggattgcagggaaggtaaatgagagccaagagaaagttgaaaactaacacaaagaaaccatgaaagcaaaccaggaaatgaaggaagagataaatacctttaaaacaacaacagaacttccggaaataaaaaatacacttaaagaatttcaaaatacagttaaaagctttaatgatccaagcagaagaaaaaattttcagatcttgaagactggtattttgttaacatagtcagacaaaaatatagaaaaatgaattttaaaaaagaacaaataaagatgggattttcaccaaacctataacttatagacattcctgagagaaaataagaaaaagtaagcaaagctggaaaacatatctgggggaataattcaggaaaatttccttaatctttctagagaggtagacttcaaaatataagaaactcagaatacacctataatttacagaatgggagaacatatttgcaaattatgcttccaacaaaggactaatatccagaatatataaggaagtcaaacaactaaacagaaaaaaccaaagaacttcatttaaaactgagcaaaggatatgaacactcatttctcaaaagaagaaatataagcagcaaacacatgaaaaaattctcaacatcaccaattattagaaaaaggcaaattaacaccacactgaaatatcatcttataccagtcagaatggctatttttaaaaagttaaaaaacaacagatgttggtgtggatgtagagaaaatgaaacattcatacactgatggtgggaatgtaaattaattaaatatctatggaaatcagcttggagatttttcaaagaactaaaaatagaactaccatgttactcagtaatccaactactgggtatctatccaaaggaaaagaaatcattatataaaaaaagacatctgtactcgtacatttaactcagcactattcacaatagcaaagtcatggaaccaatctaagtatccatcattggttggccagataaataaaatgtggtatatatacactatggaatattatgcagccataaaaaaggaaattatgttctttgcagcaacatggtggaggtggaggccattatccgaagcgaactaactcagaaacaaaaaatcaaatactgcatgttctcgcttataagtgggaactaaacaataygtatacatcgacataaggatggaaataaggtgggaaataagagggtgggagggggatgagggctgaaagactgcctattggaaacaattttcagtatctgggtgatggctacgctagaagcccaatctccaccagtacacaatatatccttgaaacaaacatgcacatgtgccccctgaatctaaaatttaaaaaggcagcccacctgcaactcagtccacctgcatgaccaagggttgtgccc

SEQ ID NO: 93805 - DNA, 12736 bp, Homo sapiens
accttttgttggttaatacaagggacttagatgcttcctgataatatagtggtgttcttgggacctgagactcagaaccctggctggacttgtagtggtaagaacaaagttaaatattaatgaatagtagagagcttgagttttctgaaataaatggaaattgtattccaattaggtaaaattatgtgagaaaactgaacagtttaggaaacataaagtgtattcaagattcaggattaaaagtaccatattaaagaagaaaaataagttatgctcaatgaatttaattcattcagtgatctcccaagtccccagattcagcaaaattctattgaaaacaaatttgaagcagtctcaagaaaacggaagcctggaaaatcccgcccctggttttgccagttgtgtagaactctgttttccaaagctacttacttgaaataagacttctgatttaaagaaagtttaagagggcttttctatgataaaaaataattttctactaagttgagaaacatgctataaattatgataataattgtttttatggagtttgatacatatgttctgaccataatttaaattaaattaggctgctgtggataaaaatattaaaaatgccctaggagatgtgtaaatgggtctataatattcaaagagacaaagactgattaagatagcacggttgagtaaatttaactttctaagctcaacgaaaatttcccaacataaaatgttttattaattctataagaaattataaaatcaagataaaaccattaaagtacaaagtctaatgctgaaaatctattttaaaagctacaatagtttccttaggttttagttataataaataaaattcatggcaatttaaactttagagacttgcagagattcagagaagtgtagattgaagtaagtaccacccacacaccttcctatggatttgtgtctataggggaaaaaatgggaatagttatttgtatcaagtgttaacatttttaaaggtcagagagtgaagatttttgattatttggccatgtggtctctgttacaactacttgatactgctgttgcagtacgagagcatccacagacagtacatcattttaggtgtggttgtgtgtcaataaaatgtatttacaataatgcagattaagccagatctcacatatgggctatagattgtccattctcaatgtataggaatggttccaaattggttgattatgcattaaatgtttcacagtattttgtgaaggaaaacacaatgagtaatgaggttgtatgggaagatttgaattagaagatgtgattaagaaaggctttagaattaataagaaatggctagggaagaaacaggagcaaagactatgtcatgcgaaaaattagagcaaaatgtggtaataaaaattaagctatattaccacataatttcgtccagttgccaaaggaaatttttgatgaagaacaagagaaaaaagggttggtcatgaatatttcatcctatttaaaaaataaaatgtgtaatctgtgtgataataaattgccagaactttaacagtaacactgctgtttttctaagagttttttctcctatctcaatgacattttttacctaaacggcaacaccttgacagtcaacatttgcggtatctaaatatgaagacccactacctcagccatggggtaagatttagtggttactcagaaactatcacagtatcaatgatttcttttcttttcaggccttaatctggaattcactttttgtagaagaagaagataaaagcctccacagcagaacaggtttagttcagctccggaatagagcggtagttgaccagaatacagagccttcagtgtagatcagcacagagcagagctacagcgtcacagtcacagaggggagaggtcacatctacggtaatcaataaatggcaacagtgtaattttggaagaagcaacctgctgtaacacaatctagaaaacattcatgcttataacaaagtccatgtaactgcaacagagaggagaaaatggggtttcagaaagcagtaagttctccgaaacaagacactggcaggaggaagtctattaatctctgttaggattctcatagagtacacagagaggatcagcagaataaatgaatgaagaaagacaaccacaactggggacagaacaacaagacacagtttccttaattacacaaggcttaagactttcacatggttctgaccaagatggctgtaaggttcccctcagcttgactcaactttagactattttcttcttgacttgaagggacctgatgtctcttttattagattactttgccttttggattaaaatacaccagttatatttatatttatgagttcataatgttattataccaaaaacaaatcatggtaattaatgttattcaaacatcatcattgaagaaagctttgtagataaactcatcatattaaaacctctaagtaaagagatgtgtgtaaacatttttcttgccttttctatacacactgaacttggtgataaccaaacagtttgtgaaggaaagttaattttcataaaactattatagctactatctgaaaatagaagaacagagttggcgtatcacatttgggccatccccagtaatataatgaattaaagctacaatcatcaataactgctaacatttcaaaaagaaaaacagaaatcaggaagtatacaacacagcctaagaaatgtttatgccaaacaattaaacctgaatccaattaaacatttaaatgttattgataggaaatacagggggacagatgttagcagacaactcaggaatgcaatgagcaagtcttatagcatggaaaagtttaaatggcaaataaatcatttttttcccaataaaacaactgaaagaacaaacatataaaggagacaactagtatattaaaatagttttaagaaatatgtcagtgtaattgcagcatatggattttgtttggatcttgatttgaataaataagcatataaaatgaatttataaaaaagtatattaagaaattatttttaaagtatggaattagtatggttggttttttagagatatgaatgtggaatttgactgggaattatatattagatagtttcaatattattgagtgtgataattgtagtatgggtagtaagagaatgtctctattttaaggagatatttgctaaaatactaatggagaagtatcaggatatgtacaaattactttcaggtggcttagaaagaaaacttttaaaatggcagtgctaatttggaaaatgggtaacatgaatgcccatcaaaaccttagtctctaactaggcctttcaatagaaaatatagggattccagttgagtgagaggaagtacaaccacttctctctacctcttccaagtaatgccgctaaaagtacctggaagaatgcatggaggtactgctggaggacttagaagtaaatagtaatagggagattaaagaaaaaaactagtttcaaagtaacatgaaactcaatgtgagttcgcctatatttttcctccagtgtatcctagccagtcctatgacagaatgaaatgcagaattggacatttgcacagacagagagagcttcagaagcagcaggaaagccaaacacagaaataaaaaatattgcttagatctacttacatgttgaatccaaaaaaagtcaaatacatggaagcagagagtagaaaagtggttgccaagggtaggaatgtgagaggaagtggagagatggtcaacgggtaaaacactgtggttatatagagtaaacaggcctagagactgaatgcatagcatgatgaatacagttaataatactgtaacatatactggaaatttgcaaagagagtagacttcaaatgctgtcaccaaaaaaattactaacaataattatgtgaggaggtagatatgttcatttgcttcagtttagtaatgatttcatggtgtgtgtgtgcgtgtgtgtgtgtgtatatatatgtacatattaaaacattatgttgtgcaccttaaatatatacaaattttattaaatatataaatataaaaaagtaaaaaacaaaaattatgaggcagaaaaccaatagggcattgtataatgcataaattagtctagcatcatttaagccactgatcaattttaaattatgaaatgtggagcgattagattgtatgtaacttatgatgcaatatgagaagtacctcagtgctacctctaaatatttttccttgcacataaagtctgaatgtaccccaaactctagatctaactactaatttaaactgttagcatagacacttaaacaaaactacaataaatcaattggccatattcatagtgtgggacatttttataaggaaaataacctaatttatcaaaaaaaaatcaatggcttcaaaaaggagggctggggttaaggcttaagcttaagacctgaaattgacaaactgctaaaagaaaacataggggaacagccatgacatttatgtgggcaatgatttttttggatataatccccaaagcacaagcaacaaaagcaagagtgggcaactgggattacaacaaacaaataaagcttttgcaaagtgaaagaaaaaataaattaaagagacaatctataaaataaagagaaactattttcaaaccatacatctgatatggggttattaatgaaaaaggaaatataaaaaaaccaagaataccaataaacttactttttataatgggcaaaggattagaattgaaatttcccaaagaagacttacaaataacgtacgtgtgtgtgttttttacctaacacctgttagaacagctattatcaaaaagatgaaagataacaagtattggtgagaatgtagagaaaagggaactctggcacacaatttgtgtgaatgtaaatcagtacagccattatggaaaacagtatgaagagcctccaaaaattaaaaatagaactaccatacaagccagctatcccactactgggtatatatctgaagggaatgaaatcagtatgtccaagatatctctgtattcccatgttgattgtagcattattcacaataactgggctgtggaaaccaattatattaattaagaaagatagaacgagaggaaggaatgtaatgagggataaaggaaaaaaggaaggaaggaaggaagaaaaaaagtaagagagaaaaagagaccgagaaagagaatcggaaaaaaaatgcattattaagaataccatgtctgtcctttctacatttttttcccacttcttttctgccaggctagaaaaggaatcactggagaaaggcaatagaaccaagtactgatatgggcctggtccatgatgttagtgagacttgtgctgccacaaggtaggagactcactaaaagagagtgtgagggtgtgctctgtggtatgagcagaacagcttaagaatgcatctcggttgctgtgagtccccagtaaactgtgaaaagcagccagacagttgtctgtgttgtaaagagttagatgaatacacactgtgagttaactaggagattcctccatgcctagcccagtagaaatggtatggactaaatggatctgaaatcagaaattttctcttctatcacatagtgtttgggcttgagaagggactgtcaccctgactgggactgcatttaccatatatattctgcaaaagcgctgacatgactgtgctaaaactaagttagtgaggttgtgtttctgctactaaactgtccaacaaattccagagattaaagttatgttatccagacaactgtttcccagagaataaactgctaacacttagtatatgaaatttgacctgatcgagttttagggtgaaaaagtgcaggtaaatgcttaaatattttttttttttgagacggagtcttgctctgtctatctaccacctgtggatcccaagaagctgattgattctttagagtggatggattatggccgagtaaatgatatcatgcgaaagttgataggagacagacctgacacatacatagacacaaaagcgttggcagaatatgttgtacaacaagaaggagcaaagctaaatgtggagattgtaaggccgtctattgttggtgccagttggaaagaactttccaggatggattgataactttaatggaccaagtggtctctttattgtggcagggaaaggaattctttgaacaatgcgcgtctccaataatgcccttgaagatcttgttcctgyagatgtagttgtcaacaacagtcttgtggcagcctggtattccggagttaatagaacaagaaacctcatgtcatataattgtacaacagatagcactaatcatttccactggggtgaagtttaataccatgtaatttctactttcaagaggaatcctctcgaacaggccttcagatggcccaatgtaaatctaacctccaatcaccttttatatcattactggattgctgtaagccataaggcctcagcattcctggatgatatctacctcaggatgactggargaagcccaaggatgatgaaaacaataattcatcttcacaaagctgtgatgttacttgagtatttcacaagtaattcttgggtttggaatacggacaatgtcaatatgttaatgaatcaactaaacyttgaagataaaaagactttcaatattgatgtacggcagttacattaggcagaatatatagagaactactgcatgggaactgagaagtacatattgaataaagaaacgtctggcctccctgcagtcagaaaacatctgaacaagttgcataatatatcttatgattttaatactatccttgtgatcctcatctgacacatttttattgcaagaccacaaatggcaagaaacatctgatactttgtggttagtctgtgttacaagtttctgtcatagtttcaagcatccagcactatgagatactgaagaccaagaactcagcatttgaacatctatgcctgtggtggactaaatgcacaaaatataaaatgtacttaagtcatttcaccttttgtcatgacattaaaccatcttagattggagtgtgaagtaaattatggtacattttatgtaacattttaatgtttatgctcataaaacctagtgaacacactgtgttttgccagctctaatctacaatagctaccaaaaccatgacttaatattttgagccctggaagaaagtggtgggatgaaggcaagagtggggaaatgggaacactaaccagtataactgcaattctggaacataattaaaatatgtctgaacatatagtgaatttctaattctaatgttcagtgcaatggaagatatttatttggacagtaatactagctaagttggtagatatttgattcttcagtgtctgatttttttcattagttgaagtgggttttaattttgttaaaattataaccaacctattttcacatcatcctgtaagttaaatgatatccaacatgaaagacatgttctcatttttcttttctgattaaatgtctgatgcatatcatttttctataagcaatcagctgcttttaaaatcagaatgctatgttactctagtgactgtactggttctgaatgggtttgagaatccacatcaacaacatatgctacgtgtttttttgatggaaagtgaaaacaaattcagtaaaactgttactatcaaaaagaatagaaatacagttttcttgcccacattatgatcaaataaaaatcctgtgaaattgtgtttatgttttgaagcaggaggatttcttaagactttgttggaagtgggagcattcaccatacttgtgttctcctccctgtataaattttattcataggactttaaaaaggcttgtgctatctttctgatgaaaactacaagtgtgttattatggaagaatgtatttgcaggtagtaataacattaagaaaatattctcatgtgtaaacacatactaattttgaccttgaaagatgaattccttcaagaaaaaataaaataatgcataagataatgtgtatgaaattaaataaaagactttatttacataccacataaagtagcaaactgttgaattagtttgaagatatttattttttatacatatagttttaggtttagaaagaaatgcattatagaaacaagtaataacaagaaaattgatgtatattttgaggatacattaaaattcccttttagtcataatagttagctctacctactgttttaacatacatttggtttcacagtttgttcatcataacacttctaattaagttgatcaagttgtactgtattaaataatcagcaatgtatctggagtatgtttaaagagaacagttcacaatacaaaaagttacatggaactttacatcttacatttcttgtcaatttaaatgcaatatataagaagtctattttgctattgtgaaaaaactaaatgtagaggaaatcacctactttcatgcaggtgtataatcttgaaaaggaaaaatgcttccatgttgaagccagactttctgtagtaaaactcttaaatattattttaaaagaaatatgtatataaatatctctatattctttggaatgatactaaagtctctggccttggacctacctgatataaaggtataagttaccatggcaatgtctgaaagttgaataaataatgatgcctttgatttaaagtggcccacataatatacatcgagtactccatctctccaaatgtatttccataatgtgttgaaaccatgctaacatttgcatgatttttgtatttctgctgaatagacttagaatcaggtgaattgtctttgtgtcttgcaaaagagttggggacaacttgggcagacctatgaagtgcatagtgtgtgtcttctgaaatgttttactgttcttgtaatctgacttaaagaaatgttaactgggagggtgctgaggccactgcattaattctgtgtgtttagaattctgttgtcaaaagtaaactaatgaataaattagtttgtctttctggaatttaaagttctaaaattagtataaagagtatatagatcattaatccccacctactagactttgaacttaagtcaaacttgaacatttgagaaatcatttgtgtcatttactagacatgatttttagctctgtttgactacgttttctacacaaactcattatttaacaggatagactactaaattaaatgtttcttatttcatttaactcatttgattaaactgcattctagaacatttggagtttttccccctattcatccttaatcctggcatatgcatttgtaaattgtgatgccattgggactatatttaaatttgatttggcaacattagcatgtcctaagactcagtgcagagaagcatggcagtatgtcctttgacttaaggatggcataaaataatcatttttgaacctgtgtaataaagcttgaaagcagggaaaataatttccttttcccccttttctgtgctgtctgtaggaattgatttggaattttttttaattatacttttttattttgttttaaaagtaaattgataatcttttataagaagtaaatagaaatattattgggtgtctttgattgtaaagcaaaaagtaataaatgaatccctgtatttccattatttattgtatttttatgttctgaaaattgtctatgaaacaatatggataggattacaggaagcagtccttacttaaacttcttgtctgctttgggtgtacttgttaattcttatgtcctaattttatttaattctgtgttgcgcacacggcattttaggggaagcatacaggcaggatgaacactttctgttaaagtgttatttttatgttttacctggaatgaggcaggtttttttctgtttcctaaaaacagtaaccaagagacctccagggtgtcattaggttccagctgctgtcctccatattgaatgatatcctgttaatttataggtatatttgtagtaattcatatgtctattaagtaagtataagagataattcattagtaatagaaattaactgaacccttttggagcaggtgagagtatcaggcaggggtcaggtaagtgtaaacggccttctgagcatgctcttccaggctgactgccagccctgacttgaaaccgttagcactgacttgctctgtttagagaaaatctttccaaacttttgcatgataaactagaaaaaggaatatatgccacgtaactggattacagaagtgagttaattaatagtttctctcataaaagatatatgaaatattttcttattgaattaatatttttggtcttgaagcattttcttgtagtagaatgtatttgtcttttttcctggtgttaccctcttagcatgtatctttgctaccctgaagatccttttaaacaaatcatctttgtcagttaagaatagttgtgcaaaaattgttaaataattcctttgatttgtctttattaaataaaaaatatgaggaaaatgtattaatcagggaagcatttattacaataattaatctaatatagttgctgttatttaaatatagtattttaaaggcctttatttgcaaactatgaagacagcaaaacatgaaaaaagggagcactaacataacatttttcaataaatttattacgtttttgcccaagatgtttttaaaaaaaactggtaaataatgtaaagtaatgatatagaagttaagaagaaattatttaggcagatagtgagggtaaggaagttcttggtaaggttttccttttaatgaaaagcggcccccaaatcattttattttctaactaagagcagccagtaaaatcgagctgcagacacagacaagcaagctggaggtttgcatgggcgagtgccggcagtggtgccaataggaaaaggctacctgggacgaggcatattcaaaatggtggttccatcttcccttttctttgccagccacgtgtactgtaagatgctgacaacatggtgccagccaactgcaaagtcattttgcataataagattatgcaagattattatgtcacacctggtccaaccaatctgtgggccttatgtaaatcagaatccacctcctcaagcctacttataaaatctggtgcactctgcagtgggccagatttccctttcgtgggcccctctgtcttctgagggagagctgttctcctttctctttcttttgcctattaaacctactctcctaaactcactccttgtgtgtgtccatttcttttatcttcttggcgcgagatgacaaactccaaatatttaccctccataaagagcatcctcacatgcaaaaatatttcctaattgtatcaagataaggatataatcatcacttcagtgcatgcctcagactacgaaatatatttttaaatgctacatttatttctaatgcagtctttctctaacatattaaacgtattcaataacctatatttaattttaaggaaatgtgtatttctttaatgtgcaattcttataaaaggataaattagatacagaaggagcatcaatttacatttgtccttatatgtttaattctttgaaataaagtgtcaaatcgattttaggtagcacgaatgaataaacttcaaaattgtgtttcacatgatggtttggtaaatgtaaaatgtatattaaacaggtgttttagattatgaaagactagaacatcatgccatctacagacaagtaaatacttgtaaatatttctaaactgatgatagcctgctacacgaaataagcatcagtagaaagataattttgtgcaacaatgggcttcattgcagatctccagtttgcattttcagttaaaaatatgttttgttacagtcctaattataatttctctggaagttgtaatgaattatgatttagtagtcagaatgtctttcagtgtatgtatggagggtagtggaaagtatataaacccagaagtagtataattaaaaagataatgcctacaatggtaatatatgaatatttacaggaattttcttcactaaatctgatacgtgaaaaatatatgtaaaattattgtttattggctttcttatattacaaaaaaatacccagtaagtgttagttattatttttagggcaacatttatttttaattgcaaatattttcattacaatcaatagaaaaatgcactgataaagatgaaggatacacacagaaaaaaatatatatataattccttagaataattttattttctcttattggagttgactcagtgacaaaaatattttattccttttaactagtaggcatcataagagttatttcaatatattttccttttgtgttgccagtaaacatatttttgttgattttgttggtgaagcaccaagaaaatatgtgatactttttcataaaatattttaaataaacaagttatttctataaagaacacatgcaaaaagtaagctgataatttttggttgaatacgaagatgagtaaaaatatacaatattgtgtatattctgtcattaattttcaattgttctgtaagtatgaaaatattgtctaagttgccctaattgctcaagaactatagaacttttaattacatatttgtcatatgaaaataaatgcacatgtgaagaaaagatctgaagaatgt

SEQ ID NO: 93806 - DNA, 53590 bp, Homo sapiens
gatcctttcttatatatagtaatatataattggactttttctgccttctttgcattttctatgcaccagacgtttttctccccttgactacctcacattggacagatgcattttattctgccagaccgaaagttacccattctatctgtattcttctagctgtcatcccttccttatgacagactgtaatttatgtttatttttcttactctatcccacaatttaaataaaaggatttagcaattatgttaatgaacactttatattcttgttaaatatattaaaatgtggccaggcatggtggctcacacctgtaattccaacactttgggaggccaaggtgggtggatcacctgaagtcaggagtttgagaccagcctggccaacatggtgaaaccccgtccctactaaaaacacaaatattagctgggcatggtggcgggattctgtagtcccagctacttgggaggctgaggcaggagaatcgtttgaacccaggagtcagatgttgcagtgagctgagtttgagccactgcactccggcctgggcgacagagtgagactcctcctcaaaaaaaaaaaaaaaaaagagaagaaaagaaaagaaaagaaaaatactaaaatgcatcttagcaagagggtcaatgagattaaacaaacaaaactaaagacctagatagatccattgcactccagcctgggcgacagagtaagactccgtaacaaaaaaaaaaaaaaaaaattagccgggtgtggtggtacatgcctgtaatcccagctactcaggaggttgaggcatgagaatcgcttgagcctgggaggtagagattgcagtgagccgagattgcaccactgcactccagtctgggcaacagagtgagaccctctctcgaaatcaatcaatcaatcaatcaatcccccagcaacctcatagctcaggaggaataagtctgaggcgtatgttttacactggctccagcaacttctccagtaggagttaagcttccattacctgccacagtatccgactggataacgtactctgttgggttcctccctgccttgctgcttcttccaccccttacctatggttcttttcctcctgaataacctccttgtactccgaagccttatcccaggattggcctctaggttcccccacctaagacaacataatcccaatgctgccaggaatctctgcagaaacagcctaaatgttgatgagtgaggaaggcagtactaacctttaagatttaagaagtccccttctttgagttgtttgacatcagtgagtcttgagtgctttgagatcaactagataacagatcatttttattttaactgcttcttcactgataagtttgttttggcatcatttccaagttctgacctttaaatagatttttgtcttttttggtttttgtttttttttgagacaggatctcactctgtcacccagactggagtgcagtggcactttcatggctcactgcagcctcaacctcctgggctcaagcaatcctcctgaagaggaaattaatgaattttacaatatgtaaagccagaaaattaactttcccctctgggcttagtataatgtagcaccgccatagtctaagttagagaagaatactaactgcctgtttttccttctgtgctctgagagacttatctgttctcactactttcacattccttgaggctcagtgagttcctgcttcacctccctagggcagctgcaaagttacaaagttgataaagaaacatggtttcccagggctgtagaacatgtagtatagataaatgtaaaagactgatcaactgtctttgttcttgcttctgtaagtacgcttcctgcatcacatagctcccagccactgactgcttaaaaggtggcttctttctttgtctggtgctcagactttctggaccctagtcctactgagcccgtgatcaccttaataataaagggctctcctgaactctgttccgtctctcccatctttgattgtcccgctacactcccacctcagcctcccaaggagctgggactacaggcacatgccaccatgcctggctaaatttttttgtcttttttgtagatatgggtttctgctatgaactcaagtgatccactcaccctggcctcccaaagtgctgggattacaggcatgagccaccacaccccacccaaactgattattttattgcagtaaagacaaccctgattttagtgccacccgtgataggctggcttttgctaataggattagaacatcctcagtagaaaaattytgtgaacctgagatcaaagtccagtttttacaagatcaaatattgagattaatgatgtgcaagaaatgtcagggccagaagagacctgtagaaagaaatctattttctgacctatktaaaacaactatcaaatttttattggcagcaccgggtaagtaatagtagctccactaatcagttacattcattcatttatttatttattttatttatttatttttgagatggagtttcactcttgtcacccaggctggagttcaatggcacaatcttggcttactgcaacctctgcctcccaggttgaagccattctcctgcctcagcctccagggtagctgggattacaggtgtgtaccaccacacccagctaattttgtatttttagtagagatggggtttcaccatgttggccaggctggtctcaaactcctaacctcagttgatccacctgccttggcctcccaaaatggtgggattacaggtgtgagccaccctgcccagcctacttagttaaatttagagcactagcaatagatagtcttagaacaagcagaaggtagttttgttctttctcaagtggcagaagcagacatgggttgtcaaaagcaaaaggagggtttcattagtccattttcacactgctaataaagatttaatggactcagtttcatatggctggggaggcctcacaatcatggtggaaggcaaaaggcacatcttacatggcagcagacaagacagaatgacagccaagcaaaagtggaagccctttataaaaccatcagatcttgtgcgacttattcactaccatgagaacagtatgggggaaaccgcccccatgattcagttatctcccaccgggtccctcccacaacacgtgggaattatgggagctacaattcaagatgagatttgggtggggacaaagccaaatcatatcaagggtaaaggaaagaattaacagggtagagctgagattgctgtctttagaaaggcaggctgccagggctggccctccactggcactgggcaactgagatctcaggggtgttctcaccattcctgataagagtggctcacactgcttaacacatgtgtacaaacaatctgatttatgtcactctcctgagagcctgaaattttggtacatgctaggcagcgggtacctatgtaaccagccccaaataaaaaccctggccactgagtctctaacaagctttcttggtggacaccatttcacgtgttgtcacaacttggttcaggaggaactgagcatggcctgtgtgattccactgggacaggactcttggaaccytgagcgttgtttcctctggagctcacgctatgctccttctccttttgctcatttgctttggatcttttcactgtaatacatcatagccacaagtccagtgagccctcctcttaaaccatcaaatctggggctcatgttggggaccccagatgtgcagagcataatgagttgttcactagagtgcatcaaagtacaatcataagcaagattagtatcagagcaaaggaaagctgaggtcagctagggctcacaggcagaagcaatctgccactagcaggccttggctcaatgcaagggactcaggtcaactctcctctactgtctgcagatctcctacaggaaatggatgtctggtgcaaggggaagacggtgtatattttttatgtttagctttattcatttatttttttgagacagagtctcaccgtgtcacgcaggcttgagtgcagtggcacaatctctgctcactgcaaactccacctcctggattcaagtgatttcatgcctcagcctcctgagtagctggaactacaggcaggcaccaccacgcccggctaatttttgtatttttagtagagacagggttgctccatgttggccaggctggtcatgaactcctgacctcaaatgatccacccgcctcagcctcccaaagtgtggagattacaggcatgagccaacatgcccgacgatgtatattttttttaaatcaggaaacatgagtttaagacttaatcccttggggaccatgtgcggtggctcacgcctataatcccagcattttgggaggccaaggagagaggattgcttgaagacaggagtttgaggccaggtgttcaaggccagcctgggcaacatagtgagactctctctacaaaaaatataaaaattaactgggcatggtggtgtacacctgtagtcctagctactcagaaggctgaggcaggaggatcccctgagccaaggagttggaggctgcagtgaactatgactgccctactacactccagcctaggtggcagaaaaagaccctgtgtcttaaaaaaggaaaaaaaataagactcagccccttgaagtgctgctgctgtgtcagctcctaaaagtccccaataagctcttatctatcaaggcttagtgcagttttttaatctggtatcttttccagcatccgcaacgtggcttcccactggtcccagggtacccagtccagtgcaaatagttggctgggtccttgattgcagaaggactgccaataagaaagttctgaacagttttttgtccatgatatcagttcctcagccttgcaaatctagacaacacctgtgtacatggaaagtggaaagttcagggccaatttcacctttgtagctattggcacccctgttctcagaggccacatccatattacatgcaatgtataaaaatgtcccaactctactctctcaaaagaattttttttttttgagagtctcgctctgttgcccaggctggagtacagtggcgcaatcttggccactgcaacctctgccgcccagagtcaagtgattctcctgcctcagcctcccgagtagctgggattacaggtgtatgccactaaactgagctaatttttgtatttttagtagagatggagtttcaccatgttggccaggctggtctcaaactcctgacctcaagtgatccatccgcctcggcctcccaaagtgctgggattacaggcgtgagccaccacgcccggcaaaagtctgttttcttataccttccaccagattaagagctcacagaggcaaaaacctaccatgtctttgtacctcttagtgctctacttctagtgtggatgggtaaataagcaaatgaatagatcatccattctactcattactaacaaaagacaattctgttattaaaactttaatagagccctattaaagggaagatgaatttattaccagaaagaactggaaaaaattagatacttttttttttttcacttggaagtgacacatgctcaaaagaacattcaggctgggtgcggtggctcacgcctctaatcccagcactttgggaggccgaggcaggcggatcacctgaggtcaggaatttgagaccagactgggcaacaccgttaaacctcatgtgattattagtactaagtgtcaacttgactggattgaaggatgcaaagtattgttcctggctgtgtctgtgagggtgttgacaaaggagattaacagggaagtcagtgaactgggaaaggcagacccaccctcaatctgggtgagcaccatctaatcggctgccagcktggctagaatataaacaggcagaaaaatgtgaaaaggctggactagcctagcctcccagactccatctttctcccatgctggatgcttccygcccttgaacatcagactccaatttcttcagttctgggactctgactggcttccttgctcctcagcctgcagatggcctattgtgagacctcacgttgtcatatgtaagtcaattctccttaataaactcccctttatacatacatctatcctattagttctgtccctctagagaaccctgactaatacaccccatcactactaaaaatacaaaaaaaaaaaaaaaaatgagctatgcatcgtggagggcgcctgtagtcccagccactcaggagagaggcaggaaaatcacttgaacccgggaggcaaaggttccagtaaactgagatcacaccactgcactccagcctgggcgacagagtgagactcagtttcaaaaaaaaaaaaaaaaaaagaaaaacatcgcacagggaattctataacttgtttttcaaagtgctacatgcattaagtttctcactagcggtttattcttggccaggaggtgatttccgaaatgcttctcaaaaggcaacaaaatcagaaagttcttaaattctgagaagtgtggtaatgaaatctggccccatatttctgcctccagcaaaaaacaacttccttaattctgacacctatcaataaagaaaagttttttgttttcttttttttagacagtcttactttgtagcccaggctggagtgcagtggtgcaatcttggctcactgcaacctccacctcccaggttcaaatgattctcatgcctcagcatcccaagaagctgggattacaggtgcccaccaccacagtgggctaattttttttttttttttaaagtagagatggggtttcaccatgttggccaggctggtcttgaactcctgacctaaagcgatccacccgcctcggcctcccaaagtgctagaattacaggcctgaaccgctgcagcctaccagtgaaaagtatttaactcatgtagcaattttacttattgtggattttataactagtaggaaaaatgactagaaatccatggttccctaatttttaaggcacatatttgaatttctggactgacttaattgagataaagggtgactgtaaagggcaaatcctttgatgacttcaaatctaggcatatcagcaagatcatttcctttcttatcattatttacaatatatatagtaagagagtgcaagggagggattggataggcagagaaacagaaagaagaagagaaggaggagagaggaagaagaaaaaggagaagaaagagggggaggagaagaaaaaagaagaggaagagaaggcagagagaagaggtgatgtcttagtctatgctgctataacaggttacccaagaccgggtaatttataacgaacggaagtctattggctcacagttttgaaggctgggaagtccagtatgaaggcacctgcagtttgggcattctcattgcaagatggtactttgaacgtgcgtcctccagatgggaagaaggctttgtctttgtcttcatagggtggaagaggaaagggcaaaaagagagagggcaggaaggggctgaactgacccttttataagggcattaatcccacccatgaaggcagagccctcaccatctaatagttttcccaagggtcctatctcttaatattacaaaggcaattaaatttcaacatgagttttgaaggagacaaatgttcaaactatagcaggtagggagaaaggaaggaagraggaggrggagggaaaagagactgatgggttaggaggaactttagcaaaagaatcagctctgccaggtggaaagggaaactaccaggagagaaagaggtgggggaaggaacctcctagaggaaagggcagactccaccrttttttttttttytyttttttttttttttgagacggagtctcgctctgtcacccaggctggagtgcaatggcaagatcttggctcactgcaacctccgcctcccaggttcaagcaattctcctgggttcaagagattctcctgcctcagccttccaagtagctgggattacaggctcccaccaccatgcctggctaatttttgtatttttagtagagacggrgtttcgccatgttgcccagkctgaccttgaactcctgacctcaggtgatctgcccacctcggcctcccagagtactgggattacaggagtaagccactgcacccagccgactctaccctttttgaacattattagaacttctttgatgggcaagaaaggatactaaggaactccgaaaggaaatacaatgaagaaggaaggataaggccctactgggatctgaggccttcacagcaggacccacatgatgatgagagaagactgtccctttgcagggtgagctgaggctggaagtggtctatggcccagccactttgttcttgcaggtgtsctctgtgatggactaatcagttatggtcttgggagctcacggtgggttccactgtggcctatgccaaaaccagagagtatcttcaacagcccataaagaagcataagactgtackgcagayakttttcattttttcttttctttcttttttttttttttttgagacgggtcttgctcttgttgcccaggctggcatgcagtggcacgatctcggctcactgcaaccttcacctcccgggttcaagcgaytctcctgcctcagcttcccgagtagctgggattacaggtgcgcaccaccacgccccactgatttttgtatttttagtagagacagggtttcgccatgttggccaggctggtcacgaactcctgacgtcgtgatccgcccacctcggcctcccaaagtgctgggattacaggcgctgagagttaaaaggctggggttgttcattgaactcccagaagtaggagtttgctagcagagaaggcagtggtgagttggggagaggcattctaggagcatagagaagcaaagttagagaaaaggaagccacggaccagagaaagcccggtatagtcggagtgtgacttccaaatcccgaggctggtgccaaacagcactgtattcggctgttcttgctttgctataaagaaatacctgtgaccgggtaatttatgagaaaagagacttactggctcctggttctgcagtctatacagaaagggtagctctggcatctgcttctagggaggcctccagaagccttgactcatgggggaaggggaagtaggaaaaggcacgggtcacacagcgaaagcaggagcaaaagagaaagctggatggggaagtgccatagctttcgaaggaccggatctcatgagaactcactatctctgagacagcaccaagccacgtgggatccgcccccttgaccaaaacacctcccaccaggccccacctccagcaggggggatgacatttacccaaactatatcaagcgccayctcctgtgctccaagttttcttcccagtcaaaagcattttacgctatcttctcggggctctgcattgggacgccatgrggaagcacagaggtagatctggctcttggggagaaaggggagcatgggcaaatggtgtgccatttccaccttagaaaaagatcaaatcacagagcgtcaaacaaaaagagcctgaggttttgtagcctgacactctccactgtctcctttcattgctcatgttctcattgaatctcacaccaatctcgcgaggcagctgaagaaacccaggcccagaatggtgtgtggtttacccatggcctcccaggggctgagtgattctagatgttagcccagcaccccacagctgtatatgcctgcaatgagaaaccagcaaaggaaactgcacacgacctgctaagaaggtcctggcccagacgctgattaactgtacgtttaagtcacattattgtctttacatttaactgtggttatagctatttcctggaggtcaaatcctctaagaatttttatttatttattttttaaagatggagccaggcgtggtgactcatgcctgtaatcctagcactttgggattccaaggtgggtggatcgcttgaggtcaggagttcaagaccagcctgggcaaaatggcgaaaccccatctctactaaaaatacagaaattagctgggcctggtggtgagtgcctgtaatcccagcgatttgggaagctgaggcaggagaatcgccgaacctgggaggtggaggttgcagtgagctgagattgcgccattgcactccaacctgggcaacaaaagcgagactctatccccccaaaaaagagagatgggatctcactcttgcccatgctggagtgcagtgccacaaccacagctcactgcagcctcaaactcctgggctcaagacatcctcccctccttggcctcctgagtagctgggactacaggtgcataccactgtgcctaatttttaaaaatttttgtagggattggggggccttgctatgttgcccaggctggtctcgaactcctgggatcaagcaatcctccctcctcagcctcccaaagttctaggattacagcctctcagaattttttaaagcaagaattgtaggccagacgcagtggctcacacctgtaatcacaatattctgggaggctgaggcaggcagatcacgaggtcaagagtttgagagcagcctgaccaacatggtgaaacctcgtctctactaaaaatacgaaaattagccaagcatggtggtgcatgtctgtaatcccagatactccggaggctgaggcaggagaatcgcttgaacctgggaggcagaggttgcagtgagccaagatcgtgccacagcactccagcctgggagacagagcgagactgtgtctcaaaataaataaatcaacaaacaaacaaacaaacagtcttgaaatcggctggagcaaaactacaattgcacataacattaaaaaaaaaaaggtgcgtattgtaaatccgacagtaaccactaaaacaagaaaacaaagagctatggctaataaggcaatagagacatacagaacagtttttaatacttttatttttaactttaaagaattattatcatagaagccggctgcagtggctcacgcctataatcctggctctttgggaggctaaggcaggcggatcacctgaggtcaggagtttgagaccagcctggccaacatggtgaaaccccgtctctactaaaaatacaaaaattagccaggcatggtggcgagcgcctgtaatcccagctactcagcaggctaaggcaggagaatctcttgaacctggaaggcggaggttgcggtgagccaagattgcaccactgcacgccaggctgggtgacagagcgagactccgtatcaaaaaaaaaagtgtaagtcactagttgtaactgtggaggctgggcacatcacatcagaggcctaaccgatasctagatggcttcctagatgaaacacgacccatttcttgtgagctatccacaggcagcagagtgtctgagatgaaggaatagtataggaaatctcatattgctggtagaacttgcctgaattctctacgtatggggatgggaggcattaaacttttacagccttatcaatgtaagctctgttctttatgtaactggcagcgacttcagccaggaataagaatagccaagtgttctctatactgccaacacaaagagccacaggccaggaacgctgcctggatgaaccaggaaaaaccctgctccagccctcagggcagactgcaggtgcttgcgaatcttgggcttggggttggaggctgcccaacaccctgggaacccacttcttgcattagtgtgacccagatgcaagacatggaatcaaaggagatcactttggagttttaagatttgaccgccctgttggattttggactggcatggggcctgtagcccctttgttttggccaatttctcccatttggaactgctgtatttacccaatgcctgtaccccattgtatctaggaagtaactaacttgcttttgattttacaggctgataggcggaagggactcaccttgtctcagataagatgttggactgtggacttctgagttaatgctgaaatgagttaagactttgggggactgttaggaaggcatgattggttttgaaatgtgaggacataagatttgggaggggtccagggtggaataatactgtatccccaccgaaatttcatctcgaattgtaactcccacaattcccacgtgttatgcgagaaacccagtgagaggtggttgaatcagggggatgggtctttcctgtgctatttttgtgttagtgaatgagtctcatgagatctgacagttttaaaaacgggagttcccctgygcaaactctctctttgcctgctgccatccgtgtaagatgtgacttgcttctccttgccttccaccatgattgtgaggcctccccagctatgtggcactgtaagtctgtgaaacccttttccagtayaaattacccagtctcgggtatgtttttattagcagcatgaaaacggactaacgcagagacattgcaggggaaacagcagggacgtgttaaaactcactgggagggcatgtgggagaattgatgaaatataggttccaagagcatggatcagtcatttgggctgttagtaccagtactgccctgaattcttgcaaatatattcagcatcttgactgggaattgcacctcaggctgggtgcagtggttcacgcttgtaataccagcgctttgggaagctaaagcaggagaactgcttgaagtcaggaattcgagaccagcctgggcaacatagagagacccccatctccaaaaagaaatttttagaattaggcaggtgtggtggygtgcacctctagtcctagttactcgggaggctgaggtgggaagattgcttgagcctgggaagttgaagctgcagtgagctatgatagcacccctgcacgccagtctgagtgacagaggaagactatgtctctctaaaaaaaaagggaattgcaactcaaagaaaagctagtttaaaaatctccctagaagactgcatgtgtggctgggtgccatggctcatgcctgtaatcccagcactttgggaggccaaggcaggtagatcacctgaggtcaggagttcgagaccagcctggccaacaccctgaaaccccatctctactaaaaatacaaaattagctgagtgtggtgatgcatgcctgtaattccagctacttgggaggctgaggcaggagaatcacttcaacctgggaggcggaggttgcagtgagccgagattgtgccactgcactccagcctggacaataagaggaaaactttgcctcaaaaaaaaagagaagattgcatttgtaggcgacttttgagatgctgaactagcaccctttctccatgattgtatctttactcattgtaagcatacggacagctgctgctgsaaagagkcctgtctgtattttagctaagagtcccccagaagaaggcaacatttcaggaggtggccaacagcaagactgtgcagtcgtcagtttggaagacaaggccccacagggagaagtctgtatcccctaasaagggcatcacttacgatgatttgttaagcaaaactgatcctcatcttatgaggaaycaaaaaggtcccctgtgccaaggtaggtaccctttctgccatctttagctcactttgcttctgaacccctgaacctcacagttcccacaaaagcctgtgcttgggtggtcttttagagtggtctcacctcctaagtctcagactttgaaatttcacctttccattgcagccatcacacactttccccatgccccattccttctctcctatggacttactctttgtccccatgacaacttccagtcctggggcctctttttccccagaaagtggagccctctcctgctgtccctttgtcactccccagtcataatcccattacaccctttctctttatggggcaccctcaattctctttcccctttggtttctgtccttccaacctgccagtctcatgcttgggtcaaccsatctgttcaccatctttgtttctgagcctatcctcattgccacagaagatcaagaaagctggctgacaccagtggtgaaagatacagatttcagtcacagctattggcaactgtggatttagcctttccagttgctcccactattgaccattccaactttatcctaatcaccagtcatcccataattgtccaatgatctctcctacattcctgggaaaagaggccatctgtctaaactctaacctcctctgcttcagcctcaaaatatctctgcagcatcaccccttccttccttcccttccccacttcccttycccccgtcctagatgaacaagtttcatcatgcctttttagcaataaccgctaccccgttttctactcctattcattcatttattgttcattccacatgataggaattccttgttcattcttgcatggtaggaagcaaggaggatgcaactgtgaacaaaaccaccaaagcctccatactcaaagagcttactgtctagcagtacagaaaatcagtgatgattacaagaatcctctttctactctaggactttgctccatctcaaagggatggtctcaaaccatccctttctctctttttaattttcctcaatcctgcctccctcttaagcactgtctccctacctcaaccatcagattactcatctgatcagtttacctggccatctcactctactcccatgaggctcctaaggcttctctcttgaagacagtgaacaatgttggtgctcagtccaaatgccctattgactagagtgggtgcagcccaatttcagcagcaaaccccagaggggctcccaggctactgtgcttttcccacaggcaaagagaagtacccgaagcttctctttcctggattagaattatcccattatcaccagcacgataggatactttcagttcttgtcttctttgatctcttagaggcattccacacctttttttatttttatttttatttttttttttttgagacagagttttcgctcttgtggcccaggctggagtgcaatggtgcgatcttggctcactgcaacctctgcctcccaggtccaagcgattctcctgcctcagcctcctgagtaactgggattacaggcatgtgcctccacgcctgcctaattwcatattttyagtagagacggggtttctccatgttggtcaggctggtctcaaactcctgacctcaggtgatccgcctgcctcggcctcccaaagtgctaggattacaggcatgagccaccatacccagccattttttttttcttttgggacggagtttcactctgttgcccaggctggagtgcagtggcttgatctcggctcactgcaaactccacctccttggttcaagtgattctcttgcctcagcctcctgtgtagctgggattacaggcgtgcaccatgacatctggctgatttctgtatttttagtagagacggggtttcaccatgttggccaggctgatctcaaactcctgacctcaggtggtccaacccacctcggcctaccaaagtgctgggattccaggtgtgagctaccgcaactggcccacacctttgacccgttggcatcctctgggctcttcctgagaggcccagttacgtctttgtcctcctatttccctggcatctccatctaacttttctgtcagcttctctttttctgcttggtgtttaaatgctagtgattctcaggactctatcctacactcttcacctgcaaaccactgactttcagtgcatcggtaattgagtttgaggagagtatgcacaactcccaacccctgaatggtaccaggcacaaatacaacaaatacacatggtatttttcttttttcttttgagacagagttttgctctttttgcccaggctggagtgcaatgacgtgatctcggctcactgcaaccttcacctccccggttcaagcgattctcctgcytcagcctcccaagtagctgggattacaggcacccgccatcacgcccagctaattttttgtatttttagtagagacagggtttcactatgttagccaggctggtctggaactcctgacctcaggcaatccacctgtcttggcctcctgaagtgctaggattataggtgtgagccagcgtgcccagcccatgagatgttttaatacasgcatgcaatgtaatgtcayggagaatggggtatccaccctctcaaacatttatcctttgtgttacagacaatccaattatactcttctagtcatttyagaatgtacaattaagttattattgactacagtcactctgttgtgctataaaatagttggacatcatacttgcttcctccctctcccacagtctccatatctaagaaattatcaattcctactggtttcatggtcaaagtggctgaagaacccaagccttcttttcatccttagctcctccacattagcacaaaggcagaatgcattaggggtgaaaagcatagtttctggaaccagactacttggatttgccctctggtctgtttcctacccacgtgtcttttttttttttttttttttttttttgagatggaggagtctcgctctgtcgcccaggctggagtgcagtggcgtgatctccgctcactgcaagctccgcctcccgggttcacaccattctcctggctcagcctcccgagtagctgggactacaggcgcccgccaccacacccagctaattttttgtatttttagtagagatggggtttcaccatgttagccaggrtggtctcagtctcctgaccttgtgatccrcccgccttggcctcccaaagtgctgggattacaggtgtgagccaccgcgyccagccatccacgtgtcttttagtcagttacttaacctctctgtgccttagctttttttaatcttcaaaataggggacataataccttaattattcttgtgaataatgcctacatgattgaaaacacgaaaagtcttaataggtattgaaagcttagaagggtgcttggtccttagtgttatgtgtttgctaatattataaggccaggtatcactctttatcatctagatgtctaaaacagcctcttaacttgattttactgtctagtcagtaattctgaaagtcaattcacctttttccaccttccagtggattctcttcttctttttttttttttttttcagacagagttttgcttttgttgccctggagtgcagtggcrtgatctcaggctcactgcaacctctgcctcctgggttcaagtgattctcctgcctcagcctcctcagtagcaggtgcctaccaccatgcccagctaattttttgtattttttagtagaggtggartttcaccatgttggccaggcccatctcaaactctagacctcaggtgatccgcccactttagcctcccaaagtgctgggattactggtgtgagccactgcaccagccttgccttccagtttagttaacttcttttattttcctaatagatggtacattgtgtctcctctgggccacagcccatgtcattcttcctgctttgttgttttcattgttctttcataatgttctgagattacctcatttcctgtgtcctctctttctttggcaatccaaagaaagtcatctttcagattgtctgctcagagttcatctcaaagcctggcaagtgagtatcttatattttaaattatctaaaaatcatagagtaataccttctcagatatgtctcatatgcacagcctatagttggattatcttttaatctaatctgcgaatattgctttgtaactagagaatttagtctgtttatatataatataatcactggtatctggggcttaatctgtcatcttgtattcaatttttatttgttttacctgttctatgtttctttcccttgccttttctcagttctctttttgattaaataaacatttttctcttccagtttggatgatttacagtctgtttctattcttctaagggmtagcctgagaaattaaggcatgcatatttatacagtctaaatttagtaaaacctcacagataatgtaaggaactttgtttgcctgtgcctggctttgacattatttttgccttgtattttaattttatatatatatatttttttctttctttttttttaaattttgagatagagtttttccctgtcacccaggctggagtacaatggtgcaatctcggctcactactgtctttttcattcctccttgcatctcctatcttccatctgggatcatttactttctgctcaaagtatatcctttaacgtttctttaaaaattgtctcctggtgacaaacttagtttttacttgtctgaaaatgtctttatgttgccctgtttcctaaaagctgtttttactgggtatagaattctaatttggcagttcttgtctcttagtacttgaagatatcattctattctcttccatgtttttgcattgctgtgagtccatccccacctctcctcacctcctggctccttttaatagttttcttctgtgtttcttggttttgcagtttcattgtaatgcatctctataaagattgctttttttgtaatctattctgctggacatttgctgggcatgttttatctttggactagtactatgcatcagttccacaaaaatctaagccattatctctggagtattgtctctgtcccactctccctcttctctcgtctggtacttcaatcaaatgaaagcatctagaggtttcaatcaaatgaaagcatcttgaggagagagtcactgttattcttaccggaggatgcctccagtgttgaaaacaaaacccaggacattttactcaacttggaaaatatttcttgagtaaacttggacagtggttaaatgtttaatcttcccaggtatgattgatcacagaccgtgctaagtcaaaaaataatacaaaacaaggtttttatgtacttcaattagaaggagttggagtaattcaacctaattttatgaaaactttgtaatgctccataacaacttttaattgtcaacaccaaaaaaatttgtatcccagctctgactgcctayttttcttggaagaacttgctctctttttctgcctttcatatcattacctaagaaggaactatttccaggtaaagtcagwgaaatcctcatgagtcattcaggtgatttttttctragagttgatggtggctctggcccagaattactaagaaaaggctctaagaaacaaacagatgggctccccaccctctgtaaactttcttcctctatttaggcacatctttctgttcctaaaaatgccctccactgcatgacaaaagctttaagctgagggattcacctgagctccctggaactgtgttgaaagtcacaactgagcttgacaagttaaccgtggccttaaaatgaatacttgggatccaaggagctcctaggaagtcagaagataaagacctttataaatgacagatctgtacttgaggtcaggagttcaagaccagcctggccaacatggtgaaacccccgtctctactaaaaatacaaaaattagccaagcctggtggcgggtgcctgtaattccagctacttgggaggctaaggcacaggaattgcctgaacctgggaggtagaggttgcagtgagccaaggtcgtgccaccacactccagcctgggcgatagagcgagattcagtctcaaagaaatgaataaataaataaatgtcagatctggccgggtgtggtggctcacgcctataatcccagcactttgggaggctgacgtgggtggatcacttgaggtcaggagtttgagaccagcctgggcaacatggcgaaaccctgtctttactaaaaatacaaaagttatctgggcgcagtggtgggcacctataatcccagctacttgggaggctgaggcaggacaatcatttgaacttgagccactgcactccagcctgggcaacagagtgagactccgtctcaaaaaaatataaataaataaataaataaataaataaatgacagttctttcagtagttatttttcttctcttttctgaatacttgaagattgcaaaatgggaagtttggcacagcagtgaagcctttttttagaatccctctttcttgagatttattttattttactttttgagatggagtctcactctgtcacccaggctggagtgcagtggcgcgatctcagctcactgcagacttcatctcccgggttcaagcgattctcctgcctcagcctcccaactagctgggattacagccatgggccacatatccggctaatttttatatttttagtagagatgggggtttcaccgtgttggccaggctggtcttgaactcctgacctcaagtactgggatgagccgccacgcccagccactttcttgagatttaaaagagcacaactttacaaacacttagaaagctaagacatctctgttgccaaaacaaacatccctcacccttaccctaattttctagtatgtatggaatgttttctgttcttttaggagcaggcttgtttcatggctagagtctggaaatgttgcatctttgtctgtctgtatatacgtgagcagtcctgttaatggaagcacttactgctaattggatatgaatggggtgggatgggggtggtgactccttatctgaataacatcagttgtgttggttctaacscatttcttcttctcctttgtcatcaccactgtcatttttttctcttctctgtcttctccttccttttcctctgaccttctttatttttaacagggattggagaggtcaataagagtcagcgcctttaaaaagaaatctactcactcttctgtgtgcataaggccgagcagaggttcttcgtctcaagaggaactgacttctgttgagcactcaacacgccacagagaccagccatcttgcaacctcacctcacagcatggagagaggagaccaacctaagagaaccaggcaggccaccccttgtgccaccaggctcttcctccatcccaggggctccgataccctgcctttgtacggctccctttttagtttgaaagaggtttctcagccaggtgctcacacttgtaatcccagcactttgggagcctgaggcaggtgaattacctgaggtcaggagttcaagaccagcctggccgacatggcaaaaccctgtctctactaaaaataccaaaaattcaccgggtatggtggtgcaccctcagggtggtggtaatcccagccactcgggagggtgaggcaggagaattgctgaaacctgggaggtgcaggttgcagtgagacgagatcgcgccactgcactccagcctggttgacagcaagaatccatctcaaaaaaaataaaaattagtcttttttgcctttatctttaaactagtaattattaacataagtgcccaagtaaaaagcagtgagtttttctccagaaattatccacccccccaaaaaaagttttcgtttgtgcctaggttcatagaaaatctctcattttatgagtgttctgaattattttgttatgaagaacaaagtaccctttacagaacacaagttaacctgaaaagatatcagttggtgttagttttggatgtttgtagagatcaactgaaaaaacgagaggggtataacagattgcatcattatactagggtttagaacctcatatttgggaatattatatatctttgtaaggaatttaaggatcaatttggaaactttatagaaattgtttaaattgtggtcacaaatgtgtacagataggatgactttttcaaaaagaacttttcctaatatcacctgattgggtacttggatcttgggataaaattccggtgacattataagtagatttgtttgtttgtttgttttgagacagagtctcactctgtcacccaggctggagagcggtggtgcgatctcggctcactgcaacccccccctcctgggttcaagtaatcctcctgcctcagcctcccgagtagctgggattacaggtgcccaccaccacacccagctaatttttgtattattagtagagacagggcttcgccatgttggccaggctggtctcgaactcctcacctctagtgatctgcctcccttggcttcccaaagtgctgggcttacaggcatgagccactgagcycagtctataagtaaatttaaaaagcactgtttatcaaacattcagaaggaagtcaaaattatatgctctataaaacttacatataacttgaaaagtggctctggagatcatgaagataccaagattgaagctgcccatgaacggtttggataaaattattctccaaattgtgaaaaaggcaatttctgaattaacatttatgtcactttaagtgtgcatataaaatgcacttactgaatgttatatataggtatttgactatttcacctacatccctgaaagtttatttaatttaaaaattagagacaagggctgggtgtggcttatttttgtaatcccagcactttgggaggccgaggcgggcggatcacctgaggttgggaggttgagaccagcctgaccaacatggagaaaccccgtctctactaaaacataaaaaaattagcttgacatggtggcacttgcctgtaatctcaactacatgggaggctgacgcaggagaatcacttgaacctggaaggtggaggttgctgtgagccgacattacgccgctacattccagcctgggcaacaaagtgagactatgtcttttttttttttttttttttggagactatgtctccaaaaaaaaaaaaattagaggcaagatgtcactctgtcactgagactggaattcagtggtgcagtcatagctctctgcaccctcaaactcttaggctccagagatcctcctgcctctgcctcccaagtagctaggatcataggtgtgtaccactatgccaacctaacttttaaattttttgttgacatgaggtctcactatgttgtccagactagcttcaaactcctggttgcaagtgatcctcctccttggcctcccaaattgctaggattacaggcatgagctaccatgcctagtcctaaaaatctrtgtattcaaattgtcaacacagactgtaaaaatcttttttgccctttcttattggaaaaatttgcaatcactttatatatgaacatatgtttcttataattaataaagatttccattaaaacacaggtaattcagtatagggaacttaattgatatacataatgttaaatatatttgaattttctccctaggaatgaaaacattttcaactgcttatacaaaaaccctgaggcaacttttaagctgatttgctttccctggatgggaggtggctccactcattttgccaaatggggccaagatactcatgatttgctggaaggtatgttaatttttaacatcatttaagcaatttaaaagggcagatgacataaatgtattagaatttgaagtttggtcaagactttccttcctggtaggtaattgataataaactttcaagattatgcttcaatagggtgacttttatgtttctaaagtaactttctctttactttgtttttatcgttagagctagaaggaccttttaggagatgacgttctaatactgcatttgtctttggtataattattgatatggttgaactgaatctaccatcttgcaattgtttccaatttgtcccatgatgtgttctattttcccttttctgcttttctttcgaattaatasagagtctaaaagactgctataaatccaggcgcagtggcgcacgcttgtaataccagcactttgggaggctgaggyaggaggattgcttgaggccaggagttcaagaccagtctgggcaacacagtgagaccccatctctataataataattatttatttatttattgtttttgagtcagagtcttgctctgtcacccaggctggagtgcagtggtgcaatctcggctcactgcaatctccacctcccgggttcaggtgacgcttgtgcctcagcctccgaagtagctgcacttacaggcatgtgccaccatgcccagctaatttttgcatttttagtagagacagtgtttcaccatgttggccaggctggtctcaaactcctgacctcaggtgatccacccaccttggcctcccaaagtgctaggattttttttttttttttttttgagacggagtctggctctgtcgcccaggctgsagtgcagtagcttgatgttggctcactscaagctccgcttccgggttcacaccattctcctgcctcagcctcccaagtagctggaactacaggcgcctgccacagcgcccagctaatttttttgtatttttagtagagacagggtttcactgtgttagccaggatggtctcaatctcctgaccttgtgatccgcccgcctcggcctcccaaagtgctcggattacaggcgtgagccaccgcgcctggccccaaagtgctaggattacagatgtgagccactgcagccggcctctataataataatatttaaagtcaaaaataaaagtattaactattctgtatgtctctattgccttattagccatagttttttgttttcttgtttttgtggatgctgtcagatttacaatatgcacttttttatttaatgttatgtgcaattgtaaatctggctgatttcaagactgtttattattattattattattattwtttttttttttgagatggagtcttgctctgtctcccaggctggagtgcggtggcatgatcttggctcactgcaacctctgcctcccaggttcaagcgattctcctgcctcagcctcccaagtatctgggattacaggcacacgccaccaggcccagctaatttttgtatttttagtagagacgaggtttcatagtctttactaaattcacattgttaacaatcagaattcttaacaattctgattggttaaagtatatagcataaaaagttaacaagtatgtaggcatcttaaggtctggagagccatgactgatttaatcccgtctctgtgcttcatctgagagggattagccatctgatctaatggctgcaagccttgcaggtgagtgttcagctttaattcagaagcttgtttttattacacatctgtccaacctgtcgacatcttgggcaatttttgaagatttttctttcagattttccctcttctgacagtatccttagagacacacctattatctgtatgaaatcaatgaacttactgtatttttttcttccttctcctctaaaaaaacggttgtattatttttactctatcagagcatataacatcatccctaattttttttttttagtcttagaaccacaataaagtcttcaaaactcaccgccagtcgttttgccaaactttccctaatcatgtattctttggatgaagtttgtcttctagtacaaggatggtgagctttttctgtaaacggcccaatagtaaatatttgcacatttgtgggatatacagtgcttgttgcaactcttcagctttgccattgtctcacaaaagcaagcacagacaatgcatacaaaatgagcatggctgtgtcccagtaaaactttatgtaccagaatatgtggctgcaggctgggcatggtggctcacgcctgtaatcctggcactttgggaggctgaggtgggcagattatttgaggtcaggagttcaagactagcttgaccaacatggtgaaccctgtctctactaaaaatacagaaaattaactgagcgtagtagtgcacgcctataatcccagctactcgggaggctgaggcagaagaaccgcttgaacctgggaggcggagattgctgcgagccgagatcatgccactgcactccagcctgggccacagagtgagactctgcctaaaaaaaataaataaaaacaatgtggctgctggctttgacccatgggttatagttgtttgctgttttagtagattcttcaggcagactcatgattccaatatatgctaagttcctccatctctaagactgctttgatactggcaatactttctttttaagaaaattttttttgtagagacagagtcttgctttgttgcccaggctggtctcaaactcctagcctgaagcaatccctccaccttggcctcccaaagtgctgggattacaggtgtaaactacagtatctggccaggagataaattactgatgtgtatacttctttgagtttctttaacaacttgttttactgtttgttgtcttgcttcagattttgttatcaaagagtgatatcatcctgatttgcttcttttataaatgacttggtaatttgtttggagggcttttcttttttttttttttttggtgacagagyctcactctgtcacccaggccccaggctggagtgcagtggcgtgatctcggctcactgcagcctctgcctcccgggttcaagtgatcctcctgcctcagcctcctgagtagttgggaatacaggcatgcaccaccatggctggctaattttgtattttagtagagacgggggttcaccatgttggccaggctggtctcgaactcctgacctcaagtgatccacctgcctcggcctcctaaagtgctgggattacaggtgtgagccactgtgtctggccacaaatcctcaaattctaacattttaatgcaactactatgggtcaagtttctcaagcatatgataggctcttttaatatgtcrttttctttcttattttatttcagggaatgttacagtaggtagttagacataaacaaggcaggagargcccctccacccccagccaggaatgtcaagtgactatcaggtgatggtcaggcagttgttaaaccatctatctaaaataataattagtcaccgccggttccagggaaaggcagtcccccaatagctacaacacactgaaagttggcaatcagcagcttcctgataggatttcagaaactggtcaagtggattcacacatgcgcactaagaggcaaaatggtggtgtttaactggtccttcttccagaaaaactagtaaggraaaaacactttcagtgagcatgcatacaactccagtaaacacactgggcatgcagcccctcccaagttctggcaggccactgtgcatgcagagagcccaccccaagggaagaatcaaggtagaagggatgcaamcccccgaagcatgccaatgtataaaaccccaagtcaaaggtcaaacagggcacttgatctctcaagtcatccacttagccctcttccaagtgtacttcacacttcacttccttttttgtttctgttctaagctttttttttttcccttgacacagggtcttgctctgttgcccaggctggagtgtggtggtgcaatcacagctcactgcagcctcaacctcccaggctcaagcgatcctcccaccccagccttccaactagctgggaacacaagcataagctaccacgcttggctaatttcttttttcatatttttgttgttgttgtttttgtagagatgggcttttgccatgttgtctaggctggtattgtactcagtcaaggattcacccgcctcaacctcccaaagtgctgggattataggcrtgagccacagtgctcaatcctcttaagcatttttttttttttttttgagatggagtctcgctctgtcacccaggctgaagttcagtggcgcaatctcagctcactgcaacctctgtctcccaggttcaagcaattctcctgcctcaacttcctgggtaactgggattttacaggagcctgccaccatgcccagttgatttttgtatttttagtagagacaggatttcaccatgttggccaggctggactcaaactcctgatctcaagtgatccacccgccttggcctcccaaagttctgggattacaggcatgagccaccccgcctggcctttttaagatttttaataaactttcactcctgctctgaaacttgcctcagtctctcagtctgccttatgccccttggtcaaattcttccttctactctacttccttctrcaagaattgaggttgtcacagagccattacgattcgctgctgctaacaggagtttgcatgaattaaatattgattattttccagtgttttattttgtttagttttcttgaggctctccatgtgtccctatgctggaaccttttctgccttctatgactactactttgttttgtaatgttttcccttccatgactactactktgttttgtaatgttttctctgtcccgcttttgtttcctagctcttttgcttgtactccatatctaattcaatacagcactttgcatccactgtgttgtgggcaacttttagtcatttttgaaataatttttgtctttttaatccatttctgtccactattctgtcagctctttgtgcaatttttttggtctatttctatgaagaattttacatttctgagttatagtgttctttcgtttccactatttctggtttaatttcatccaagttggagtgttgtgctgtttttttctgctttgtgaggtgttttttgttttgttttgtttattattgagacagagtctcactctgtcacccaggmtagagtgcagtggtgtgatcttggctcactgcaacctctgcctccagggttcaagtgattctcatgtctcagcctcccaagtaggtgggattacaggcacatgccaccacgcccggctaatttttatattttttagtagagatggggaaagtgttctcattgcctgaaaaactttgatttatactttctatattctgtatgatacatttatctttgtttacgacaaagtgtgttagattttcctgacgagcaagaatacgtcattccactggagctaaggttggttgctgactagtgaagtgcagttttaaaaaccacctcgtttgtgtgggtgggggttctgtaattctggttctttgatattttcatgtttctgtaggactcttttctatctccagccccatccttctttatttttagctatcaggattcccaacactatacctgtgtattcctcaaactttccaagtctcgtcctttctacatgctggtagccaacactctgatatcaagtctcaaagaaaataatccattcattggaagaagagagccctgtaattcctaaaggtctttttagaaattatcagaaatacttttatatgaggkttttaatcaatagctgatggttcaatacatacaattaaaggccactactttaaacaagttttcaaatagtagatctataaaaatgtataccataaacttaaccgtgtccactgctccccttaaagaataaaacagtaccaatataattgaagtctccctctccatttatggcctcctcaaacactgacttaagcaagatatagtataatctctcatatttctaactttatatacttttttttttttttttggagacagagtctcactctgtccctcaggctggagtgcagtggcacaatctctgctcactgaaatctccacctcctgggttcaagcgattctcctgcctcagcttcccaagtatctgggattataggcatgtaccactatgcccagctaatttttgtatttttagtagagacaggatttcaccatgttggctaggctggtctcaaactcctgaccttaggtgatccacctgcctcagcttcccaaagtgctgggattacagacatttctctgaaacttgcttttcccacaatctagtttttagtattccattgtgtgactataacacaatttatgtatctattctgttctcaggcattaaggtcatttttattctttgctattagtataaacagggcttctatgagcatcttatacatgtcttcttatatacatgtacgagagagtctacatctaggaatggaatttctgggtggtagagtatgaacatcttcaactacaagaaatattgtcaaattgttctccaaaggaattataataatttatactaccaagcagtataggaaaattcttattgctctatattgttgacaataccgttgtaattttttkctctgtgcatgaaattattctaactttacattgattaacccttattacaagtaagattagacatttttttcacattttgattgcttgtctttttctcactgacatgtagaaattctttcctttctttctttccttccttcctttccttccttcctttttctttcttttcttttaacaggatcttgctctgttgcccaggctggagtacaatagcatgatcttggctcattgcagccttaacttttcagcctcaagtgatcctcccacctcagcctcctgagtagctgggactacaggcatacaccactatgctcggctaattttattttattttatttttttgtagagacagcatctcaccatgttgccaaggctggtctcaaactccggcgctcaagtgatcctcctgcttcagcctacycatgtgctggcgtgagccaccgtaggcgtgagccaccgtgcctggccaaaattcttggtctattctggattctaattttttttagtaggttttttgtgttgaaaatgtcttctagtttgtgccacctttctttttaatgtggtgtcttctgactcacagaagctttaaattttaatataatcaagcttattactcttcttttaaactttatgctttttatggcttgctttaaaagcaagcctaacctaaccctataccctaaccccaagtcacagttatttgcctatttttcttctatcaattctaaagtattttgtcatatttgagcctgccttttgtatatagtgtgagctagatatccaagtttacttataccacatgaatagccagttggcttagcaacgcttactgagaggtctatacattcccccactggttttaagtgtcagttgaattgtaaattgagttttcacatgtatgtgggtctatttctgggcttttttttttttttttttttgagatggagtctcgctctggagtgcaatggcacaatctcagctcactgcagcttctgcctcctgggttcaagcgattctcttgccacagccttccgagtagctgtgataacaggcatgagccactatgcctggttaattttcatatttttagtagaaatgtggttttgccatgttagtcaggctggactcaaactcctgacttcaggtgatccacctgcctcggcctcccaaagtgctggaattatgggcatgagccaccgtgcctgggccgggttctctattctgtcccattggtgtacttgcctcatrtgataccagaaacacagcatcttcattctagcagcagggaagtctcagggtaattgggatgtttccttgatgccttcatggaaaaaaatgagtatctgcgagtccatgtgtaggtctatttctggattctcttactccaccgatctatacgtctatgtttactccaaaagtatactatcttgattactgtggccttataataagccttagatatccagtagcataagttctccaactttgttcttctttctgaatgttgttttggatattttaagtcctttgcatttccatacagcttttaaaatcagcttatcaatttcctgagattttgtttggggttgccgtgaagttatagatccattttgggaaaattgacatcataacaatattgatccatgagtgagatctgtttctccagtttaaaaagtattgttttgatttagcaatattttgtcattttttgtttctggcctgcttcagcttcttgagtagctgggactataggaatgtgccaccatgcttggttaatttttttttttaagtttttcgtgcacatggggtctccctatgttgcctaggctggtcttggactcctgagccaaagcaatcctcccaccttggcctcccaaagtgctggaattataggcatgagccactgcacttagccttccaaaacacatctttaaatgatcacagtctactttcaaattttattataccagttcatttttaatgaaagaatcttataagagtgttattccattcctctctcttgacctttgtgctacttttgtaaaacacttttctacttatcaattttgtgtagagcagtcagctgtcttttttagtgattttaaagtgaaaaaaaatgtttagtaagaacttctgagtttgtgggggggaaaaacaaaatgataaaaaataatcttttatatatatttacatgattacctttgttaaagtagatccagattttcatctgacattatttttattctgcctgaagaagttcctttaatatttattttagtgcaagtctgctggcattgaattctcgtgggttttatgtgtctaaaaagtctttaacttccacttttgaaagatattgtcacaggatatggaatgccagggtgacagttgttccctcccttcctaccccctagtattgttctctggcttgccctatttctccccttccttccctccttccctctctccttcccttccctccctccttccctccctccctctctccttccctctctccttccctctctccttccctctctccttccctccttcccttccttccctctctccttccatcccttcccttccttccctctctccttcccttccttccctccctccctccctctctccttccctccctccctccccccttccctccctctccccttccctccctctccccttccctttcctcccctccccttccctcccctccatctgtccatccatccgtccatctcatcctgtctcccagcttcagtgcagtggcacaatcacggctcactgtagcctcaacctcccaggctcaagcaatcctcctgcctcagcctcccaagtagctgggactacagatgtgcaccaccacactcagctgatatttttaattttttttatagagataaggtctcacttcattgcccaggctgtctcaaactcctgggctcaagcaccttcagcctcggcctcccaaagtgctgggattacaggcatgagccaccgcacctggcaggcttgaacaatttctaataagaaatgtgctgtcatggcctgggcacagtggttcatgtctgtaatcttagcactttgggaggccagggtgggcagatcacttgaggtcaggagtttgagaccagcctggccaacatggtgaaaccccgtctctactaaaaatacaaaaattacccgggtgtggtggcatgtgcctgtattcccagctacttgggagggtgaggcaggagaatcacttgaatctggaaggcagaggttgtagtgagccaagatggcaccactacaatccagcctgagaaagagtgcaagactccttctcaaaaaaataaataaataaataagaaatgttttgccattacctttgtatctatgtctctcttctgtggctgctttttaacatcatctttttatcaagtgtttttagcaatttgatggacaagccttggtgtggttttcattgtttattctgtttgagtttccttgaacttcttggatctacgactttgtaagtttcaaattttgacatattcagccactattttttttcaaatgtttttctgtttccctcttctcttctctccttctgggactccaattacacctatgttagatcgatttatagtgtaccacagtgtactcatcagctgtgcatttattttgtcatgttctttctacacttaattttctttttttttattttgaagacagagtctcagtctgtcrtccaggctggagtgcagtggtatgatcttgactcactgcaacctctgcctcccaggctcaagtgattttcctgcttccrcctcccaactaactgggactacaggtgcatgccaccacgcccagccaatttttgtatttttagtagagatggggtttcaccctgttggccaggttggtcttgaactcctgacttcaagtgatcggcccacctcggcctgccaaagtgctgggattacaggtgtgagccactatgcctggccaayatgcttaattgtggatagtttctttttctatgtttaagttcactgatctttttcttcttggtatctagtctgctgttaatcccatctggtgtttttaaaaatttttcagatattttacatctctacgagttccatttgggtcttttaaaaatctttagtttctgttcttatcatgttcatgttttcattcacattagtgagcacatttgtatttaataaccgtttaaggtccttgtctgctgactccatcttttgttatttctcttctgtttcttacgtttgatgctctccctggagttgttatgggtcataccttccagctttttggcatgtctggtgagttttgattagaagttagacattgtgagttttacattgttgggtcctggattttgttgtattcctgtacagtgtgttagactttgctctagcaagcaagccaataagttatttgggatcagcttgatgtttgattctggagatgcttagattgtgtatttattcattaggagatgacttgtcattgtttctgttaggcatcctgaagtgctactagcccagggtcatttcaagttatttttctgcttcactttctataaatttgaagtttatttatgttacctgcactccagtctaccaagataacataaataaacttcaaatttgcataaatacaaggctttgtttaaaaaaatctaagggcagactttttcccccatccagagccaaggcaaaatcagaaagttcttcttttctcctttgccatttggagaataaatactttatttgtagtctactttttcacagagggtctagaatttagggtttcttagctttgtgtaaaggactcagttctaactctcaaatttaatgcattccagtgccttatctcctgaccctctaggtcacccttgaaacctgatgttttattttcctgatataggtaacggttgttggggtaagcatttcatcagcacatgatcatcaatggaattttcagttcctttgtttttttttttctttttcttctaggtgttccctttatcttattgkgagcagattcttagtctgctatattttatcttcttgcttttattatcagcaaattctaaaacttttaccttgctggacttaactgttatcattcatttctttgaaattttttccatcaggtaaatatgagcccttttataacatcacaatatctcattcactgtctgtgcgtgttcacttgtgtttctccatctccagtgcactccttaaggcttcctggaagagaaagcagagttgaagaacctcttgaaaatgacatctcccagttagttgatgaagttgtttgtgctctgcagccagtcatccaggataaaccatttgcattttttggccacaggtatttgatatctgttttaaaagacttcaggggagtttcttctatctgaagtttgaggttaatgttattctttgtgttttgtaagatgcatacctttgtattggttaracagcatgttaggtaattatggccatcacaacttttacaattcaccagtttgtatggtaagtatacctattttttttccttttaggcaaataaagtcaacacttgtaaaaccaagactttaacagcagcttacattctatttatttttgaaataagaaattatgcaaagagtatatgtttcttaagctacgttgtataattctgaggttaagtcagagaccctggggttctggctatctcttatcrgttgtatgaccttgggaaaatttcttaggcttctgagttagttcctttttctataagggtacaataacaatagttcccatttgtgaggcttaaatgaatagtgatcttaaataaattggtatatagtaaggaatcaataaattttggctattatataagatttacaaatatggtcaagcagaaattgaaaaataaaaagtatccatcatcctactacccagataacaatgctttaaaattctgatgtagttccttagtatttttacacaatggggtctggttttatatatttacttgatctttttcacttaaaagcaatgtacactcacaggatgtgaaagatgtttattgctataatatttatattatagtaatattaaattaaatatatttatattattgccataaatatctttcacatcctgtaagtatacattgcttcatgatttgtttgattaacctccttttgtggatatgagctatttctatctttttctgttataaacaatagtccagtgaacattctttttttttttttttgagacagagtctcactgtgtcacccacgctggagtgcagtggcacgatctcagctcattgcaacctacacctcatgggttcaagcaatcctcccaccttagcctctcaaatagctggaattacaggcacacacgaccatacctggctaatttttatatttttaatggagttggggtttcaccatgttggccagactggtctcaaactgctgacctcgagtgatccacttgccttggcctgctaaagtgctgggattacaggtgtgagctgtggcacccagcccaatgaacattcttatagaaaatttagtataaatctcctatcagttttttaggataaattctcagaatttatgttaaacaatatgcacattgttaaagttcttttcaagacagggtcttgctctgtcacccaggctgcagggcagtggtgcaatcatggctcactgcaacctctgtctgccaggctcaagtgattcttccacctcagcctcccaagtagctgactacaggagcatgccaccacaccctgctaatttcttgtcactgatgttttatagagatggagtttcgccatgttgcccaggctggtctccaactcctgggcccaagtgatccacccacctccgcctctcaaaatgttgggatcacagatacgaggcactgcatccagcctgtagaagttgttgctatatatttccaaattacctgcactttacactccatgcgcaatgaacatggtgctgagtttccctttctttcagaaaatatatacatgtgcaatttacaaataagcaacctctggcagttttgtcaaccaaatgtatttacataatatcaacattttcaatcccagtacccctttatacttttaagatgcattgaggaactcaaagagcttttgtttatatgtgatatatctggcgatatttatcatactgaaaggaaaaactaagaaattttaaagacgtttattaacttacctaaaaataacattaacaaacctattatacattgacataaayaatatattttaatgaaaaagactatattttccaaaaaaatgtgagaaggtgagaagagtggcatcatttgatacttttgcaaatctgcttaatgtctgacataatagaaggcagatggattctcatttctgtctctgcattcaaattgttgctgtatcacatgtcatatagcttctggaaaactccactgtgtattcattagagtaaaaaaggcaaataacattttagtatttatcctgaaaatagctttgacctcatggaccatccattaggawytyagaaatttycaggggtccctaaaccgtattttgagaactgcggatatatactgttaaagacacagtgatacacacctttaaggaagaaaaggaaatttaaaytaatttgaagacactgtgcaaatcagtactaaatcttagagtgaattatctaggctgtctttgaaacagtttttatgctgatttaaatcactgaaaagatagacttcttaatcaactcacastttcctttcatctattacatgatcattgttgtgttyatgatactgttccttttgactttcggtggatcatcacgagttttgcttaacagttcttgtcrtgtttttctttgctgaatttagtatgggatcctacattgcttttaggactgcactaggtctraaagaaaacaatcaaccagaaccattgcatttatttttgtcaagtgcaactcctgtacatgtaagtaatttagytttttcctaggaagggcagtggagagcagggaaatggggataaaaataagccattatttctctatctggtgaattctggtccagtatgatgatgatggtggggatactaataggttggtgcaaaagccattgaggtttttgccactactttctttttccgagatggagtctcattctgctgcccaggctagagtgcagtggcacgatcttgtctcactgcaacctctgcttactgggttcaagagattctcctgtctcagcctcctgagtagctgggactacaggcgagcaccaccacagccagctaattttgtatttttagtagagatggggtttcaccatgttggccaggctggtcttgaactcctgacctcaggtgatccacccacctcagcctcccaaagtgctgggattacaggtgtgagccagcacacccagcctgccattacttgcaacggcaaaaaccacaattgattttgcaccaacctaatacttgctgttgaaaagtcccttaaatctctttcaatatcattctctgtttccctgaaatgcacttcagctrtttcctactggtactattcctggcgtctctgagctaatgctgaccatagtgctttttccttcattgtgggtcagctgggaacttaaccaactttgagcaaagtaactggatcagaaccaggaaagactccttgaaatgttaaaaggggacagtgatgtcaagttcttaggactaccatggctttttaaacctggtgctgttgctcctgctgctcttcctcctacctctttggtctttcccacttcatctggagaaagatcctgcctgtcccaggattctaaatctacaaagccattttggtggcattatgatgctgtagttattactgatgagccttcttctccctactttcaaaacgacatagttctttcctgaagcctatagataaagcagtctacttcccagccttggtttaatgacttttcccttagatcaacagttttcagtttatgagccaagtgtgttatatgaaatatcaggcctgtgttgttgttcatgtttcaagtcaaaggcctggcatcgcattcccaaagatgatgaattgtcagaagaacaaataagtcattaccttatggaatttggaggcacccccaagcattttgctgaagccaaggaatttgtgaaacaatgtagtcccatcataagggcagatctgaacattgttagaagttgcacgtaagtaacagaaacaaggttttttctttttttggtacaattatttgtagaaaaacatagattggcagtgctctgaggttgcttatgtgggaagacaaaattctaagagtttggtttcatttcctttggggccacctatggtatgtatactggtttagaatggagcctaggcacagaaattgtatctgtaaaagatgtctagcatggccaggcacagtgactcatgcctataattccagcactttgggagaccaaggccagtggatcatttaaggccaggagttcaagacaaggctggccaacatggcaaaaccccatctctaccaaaaatacaaaaataagccagatgtgatggtgcacacctgtaatcccagctacttgggaggctgaggcaggagaatcacttgaagtcaggaggcggaggttgcagtgagctaacatcataccactgccctccagcctggccaacagagtgagactccatctcaaaaaaaaaaaaaaaaagtctagcatgtatttttctttaaaaaatatatgattagacatgtatattttatctcataataacatagtaaatatctgttgaataaattaatgccaaagcattttcatcttcttagaagggtcagcagaaatagattgttacttattgtaagtgtggaggcaaaccagtgtggagaaatttgctaggtttgcttttttgtacattttgttccagaactcattaagttctatgaatatctctccattcccttgtctcatgggatgtctgtatagacacttgattcttctgatagaactgaagtcctgatactctgtaaatccttccccaataatctttcctatttttattttatttatttatttatttatttatttatttatttatttttgagatggagtctcactttgtcgcccaggctggagtgcagtggtgtgatcttggctcactgcaacctccrtcttccaggttcaagcgattctcctgcctcagcctcccgagtagctgggattacaggcacccgccaccacacccagctacttttgcatttttagtagagacgggttttcaccttgttggccaggctggtctcaaactcctgacctgaggtgatccacccacctcagcctcccaaagtattgggattataggcgtgagccactgtgctcagcaaggactaagtttttgagatctactgcacagcactgtgactacacatgtgtatttcaaaattgctaagaaagtagattttacctgtgcacatcattttaaaaagttaagtatatgaggtgatggatatgttaattcgcttgacttaatctttccataatgtatacttatatcaaaatatcacagtgtacctcaccaatttatacaattgttatttgcgaatttaaaacaaaattgaaaaaactgagaagtaatccaaatcaccatggacattcaatgcaatcatggatgcaaaagctggcttttaataattaagccttgcacaatggtgaaacatgccatctttagagtccgcttagcagactgaaaccctgtgtcttactcactgcgagattctgagcaagtttctttaacggtctgtgtctcatctcatcaaagaagkgataagaatagcaccttttcaaggtgttgtgtgagaattaactgcttggtagaggggagcgtctggcacacaacaaaccatgagctatttttaaaaaacaaaacacaaccaaaaaactcacaaccaatgagttttttcactccaaagaaacctccaaaacaccagaartaacacattaacataaatcattcatggggatattctactcacagaatgtagaaaatgttgacattctcaccctttctccagtgagccaaattgcagtagttactcacaaattttaacgtcctctctccaaatttcaaaaactcttccaaatcctgccctcctgcaccttctccttttcaatctgatctctcccacgtcctcgttatctccctgctttttccaatacaaatgaaatcaggcctacagagttttttccagttctctttccccatcactaccactaaagctcagagctactggccaaaatggaaattgtcagccgagaagtgccagaagctgtgactacttcagctcatataatctgtcctcctctcttgcttcggactattgttactgttcctcctctgggatcctgatgccacatacactagggtgtttcataattgatatcatcccaaatctcttgcaagttctgttttgtttctttttttaaagtttcctttgtgtttcagtgtgaataatttcctctgactgtcttcaaggccgctgactttcttcagctgtatcaagtctactgatgagcctgtcaaagaacttcttcatttctgttatttctagaaatcccatttgactctcttctggtttttacctttctaatgaaattccccatgtgttcatgaatgttagccaccttttccactaaatctgttgataaattaatcctatgtattttaaagtccctgtttgagagttccaacatctgggtcttatctgtgtctgattcttttgactgctttgcctcttaacaatgggttatttcttgctttcttgtgtgtctgataatcattattactattattatttgagatggagytttgctcttattgcccaggctcgagtgcaatggcgcgatctcagctcactgcaacctccgtctcctgggttcaagcaattctcctgcctcagcctcccgagtagctgggattacagacacgtgcccccacacccagctaatttttttgtatttttagtagagacggggtttcatcatgttggccagcctggtctcgaactcctgacctcaggtgatccaccccacctcggcctcccaaagtgctggsattacaggcatgagccaccgtgcccagtgataattttataaaatcaaaagccagttatcatgcataaaaacagtagagactgaaggtaatgttttacacctgaatttgaacacgtctctgctttttgacaggccgttagtgtggggaattgagttagtctagactgggcttgagctgggtagggttttgttgttgctgtgatgaccttgagtgcaccaccagctctcaaatcctctggtatataatcctctgctatgtgtctggtgtgggatgcagttgttccagaccttttctcagcagtcctgccctacccttggcgttcaatgttccctgtgactcatagaacagcctctcttcctcctgttgccctccccaatgtagacagctgttgcttgttactcaatgtatgttagcctgtgggtaacacagggagttcctggacatctagatagtctgaagcatgaattctaggtagcgtccccgtgcctgggttctgtgagtggggctttctcagcatgcctgctccttctctcttgcaaacacatttttgccttctatctgtggttgccttggtggaagattcctgccccttcctgcaagcagcagaactctgcttggttttggtgtagaattgtttctcatcccttcctcaggggtagagggcttatgcttttatcctccctgcagcagccacagggcttcacctgcaccctggtggcgagagggtttcatgcccctcttccagcagcttaaggcttctgcttacaatgagagcagacctggtcaggtggcagtctagtgccagtccaattgccacagctaactaactgccctgtggaggtgtctctctagcctctcgcctcactcctaattgttctcgtcaacccctagtggaggcccatggaaaagaggctgcatggctgggcayggtggctcatgcctggaatcccagcaccttcagaggccaaggcgggcggatcacttgaggtcaggagttcgagaccagcctggccaacatggcgaaaccccatctctactaaaaatacaaaaatagctggatgtggtggcagacacctgtaatcctagctactcgacaggctgaggcaggagaatcacttgaacccaggagacagaggttgcaatgagctgaaatcacgccattgcactcaagcccgggcaatagagcgagactccatctaaaaaaacaaaaaaagacaaaagaggctgtgagtcagtgggaactccatctaacacaccgttctcactgtgtctccaacactttaaaatttcggctgatttgagtcttatcgcatgtacagcagatacctcttccgcctggacattgtgccatctgaccctgtctactggccccatctctctgtagtgggagtctgtcttccttggaatttgatttctaacttgccttgcaaacacagctctctgttgagttcacgacaagtcatgatgctgcagtttctctgtttttttttttttcctctcattgttaggatggagtgtggggtgctgctgcttttttacattccaggcaggagcaaatccttgctgggattactgcaagtcccactcacttgggcctatcacatacacttggtccccctccgatccgttatccacactctatccagaggatagaagtccagtttgatcatggtgtaccttgtttgatctttttggtgacttcctttcactcttaggacaaccaactagacttatacctgcatacctcttataccttaatttgtcccaatactccactttgttctctgaacaatagccttttttgttgttgttgttttgttttgctttgttctttgagatggagtttcgctcttgttgaccaggctggagtgcagtggtgtgatcttggctcaccgcaacctctgccttccaggttcaagggattctcctgcctctgcctcccaagtagctcattacgggcatgcaccaccatgtcctgctagttttgtatttttagtagagacggggtttcccgtgttggtcaggctggtcttgaactcccaacctcaggtgatccacccacctcggccccccaaagtgctgggattacaggcgtaagccaccacgcctgaactttttttttttttttttttttttgagacaggatcttactctgttgctcaggctggagtgcaatggtgcaatcacagctcactgcagccttgacctcctgggctcaagtgatcctcccacctcagcctcccgagtagctggaactacaagtacatgacaccacacctggctaatttttttatgtagtagaaatggggtcttgctatgttgcccaggctggtctcaaactcctggccttaagtgatcctcctgccttggcctcccaaagtgctggtattatggtgtgaaccatcacacctgacctagccattaatttgttgtctttctcttccctctctccctgctggctctatgccctttgactggttcttctctattcattcaggcttcagatcctctcccctttcccaggagacttgccttgaccctgtccccacctcctccctcctgccaacagttctccatccccctggacttgatagcaccttccatctctctctagttgaatgattgtttctgtaatgtctctctcccagccagtctctcagctgcaagagggcagggactgtgtttgtttctccacgtgcccctagtgtctagtgcagcactgagcctctgactcaataaacacgtttgctgctgttgtgaggttctgtgcagagcaaccctctgctgggccaaggagagctaagagttactaaagaggtcttcgtttctgatgacagtttaaaggactggttccaccagccttaccttgagttgaactgtgtgccccagtgccatcctgctgccacgtgtcacatcctagaagttagatattggaaattagtctccacactgagtctcaggcaggctttgacaggtagaagtgccattggtgaaaaatgttttacactgctagagtagccaaagaaaagaagtgaacccaccccaagtttcattgacattaggaacaggaaaagattctgggatgttgatttcaaacaattactaaccagctcttttatgtttatagctctaacgtaccatctaaggctgttctttcctgtgacttgacatgttttgttggatctgaagacatagcaaaggacatggaaggtgaaattatttttagtctcgagtattgtattgaaatatatgtttgatggctttaaaatttttttttttcttttgagacagagtctcgccctgtcacccaggctggagtgcaatggcgcaatctcagctcattgcaacctccgcctcccaggttcaaacgattctcctgcctcagcctcctgagtagctgggattacaggtgccggccaccatacccggctattttttgtatttttagtagagatggggtttcaccatgttggccaggctggcctcgaactcctgacctcatgatctgcctgcctcggcctcccaaagtgctgggattataggcatgagccaccatgcctggccagcttttaaawtttttttttttaatttttatgggtacatagtaggtgtatatatttacgttcgatgatttttgaccaatgtcaactagtagttactgcaatgagtaaaaaattagttgaagttgtatttagtgtaaaaggagagatgttggtcttgtgtaaaatgagagaactgctgtatactgataggtctcaaagaaataaaaaatgcaggacacctagtgtaagagttaaagaaagaggaaagacaaacaaaatgcagcttaacagtcaaagacaggttttctttagataaaacctgagaggggctcctggcagacttccatcaggagcactttctcttacagatgaagagtatatattggttttagggtgaggggcttattacaagcttggaatgtttctgtgtgagcgagaagttttatggtagggttggaatgtctctgggaggaggggaggctttcttggggcagacatctttctggcggccggaagcaaggttatctcgaggccgtcatcttcctggccagaggggggttatcttggggctaacatgtctctggtcagggaggagtttggaacgtttctggttggagatgttatctatggtttatggttatggtgaccttagccattaggctgatgatgccttttggatttaggtggtttttgattaaggtaaactttagaatgaggggcttgtccaagatggcaatgctcctgcttcatcacctagaacataaggccttgaaagtaaccgtacttcagggtgtcagctcttaaagaaatgatgwcttgatgtgaatctttagttgctgttggtgttgttattgaatacaatcttgtttattttcagcctggaaagatgtaaccagtggaaatgctaaaatttaccagcttccagggggtcacttttatcttctggatcctgcraaygagaaattaatcaagaactacataatcaagtgtctagaagtatcatcgatatccaatttttagatattttccctttcacttttaaaataatcaaagtaatatcatactcttctcagttattcagatatagctcagttttattcagattggaaattacacattttctactgtcagggagattcgttacataaatatatttacgtatctggggacaaaggtcaagccagtaaagaatacttctggcagcactttgggaggccaaggcgggcggatcacgaggtcaggagatcgagaccgtcctggctaacaccgtgaaaccccatctctactaaaaatacacaaaattagcygggcgtggtggtgggcacctgtagtcccagctactcgggaggctgaggcaggagaatggtgtgaacctgggaggyggagcttgcagtgaaccgagatcgctccactgcactccagcctgggtgacagatccagactctgtctcaaaaaaaaaaaaaaaaaaatacttctggcagagtcttttatcttcctattaaaatctcasttgattctcctttatgggaagtttgtcgacaaaattcatgattagtaaattatccattttttccttcagttagtttaatggtgaagatgattaacaggggaaatgcttgaagtaaatgattgtttcaatggcataccgtgtctcaaagcttgatctcattttttcaaatgtagaatagccccacatagtaagaaaatgtaacctactgctttgttaaaagagatcccaaaataattattgtcacctgtgcaggcaagtcstcagaatgcctataccccacccctctaaggagtttattctacaccacttactggggggctctgccaccctggcatgtctggctgggacctggatcgtccccccagtggacaaccaatctagagtgttgcctgtgacaaagggagtggccaagcacaaatctcacacctaagaggctgcctcagcctcactcagcaataacttgaayttgacttagggagaaagcacaacagctggaagtaaacaggaaccaagagaaaaagaaaagcagaaataggagccaggctcagtggctcaacacctgtaattccagcactttgggaggctgagtagcaggatcatttcaggtcaggagtttgggagacccctgtctctacaaaagattttaaaaatcaaccaggcatggtggcgtgcacctgtagtcccagctacttggaaggctgaggctgaaagatcgcttgagcccaggaggtcaaggttgcagtgagctaggatcatgtcattgcattccagcctgagtgacagagtgagaccctatctcaaaaataaaaagtacataaggtcttagtaaataagattaaggaaaatgcatacaggtggtattttcctaaatttatcactctttttaaacaaagtacaaaaaatataaaattaactatttgggggaggcactttgagtttaggctacaaatagtcttaagcaaattatgttgtagtatgtgttgtactttatcctttaatttgatactatttccagggttcccttactgaaagattggtataaaagtaattgggaggccgggcatggtggctcacgcctgtaatcccagcattttgggaggttgagacgggcggatcagctgaggtcaggagttcaagaccagcctggccaacatggcgaaaccccacctctactaaaaatacaaaaaaattagccaggcgtggtggcggacgcctgtaatcccagctactagggaagctgaggcaagagaatcacttgaacccgggaggtggaggttgcagtgagccaagaccatgccactgcactccagtcttggcgacagaatgagactctgtctcaaaaataataataataattaggattcgtgattattaatttgaaaaatgtttagtcaatatagtctgcaaactgaagtttcatgatggaacaaatgccaggctttgggggtaagctttttcccctgcatctctacctggtggaggtaaagtccacatgggaacaactttcaggagttttcaagccctcaactgtaagacaccaagtctatcattgatgatgtcttctctttgaaggaattaggccttggtatcatcgtggaagacgtctatcattaggcgaaatttagaaagatgagaattatcttgattgccaaaattttcccgatgagaaatcaacctcgatttttaaaagtaaactttttgaggtaactgcagattcccttttatttgtaagaaataatacagagagatttgtgtagccttttacccaatttcctttaatggtaactgttatgcaaaactatagtataatatcacaatcaggatattggtgttgctacaatcaagacagaacattccatcactgcaggatcatccctcctgctgcccttttaaagccacacccacctccctcctccctggcaaccactattccatcctttgcgtctataaatgttccctttcaagaatcctggctggacgcggtggctcatgcctatagtctcagcactttggggggccaaggtgggtagatcacctcagatcaggagttccagaccagcctgggcaacatggtgaaaccctgtctctatgaaaaatacaaaaattagctgggcatggttgcacgcacctgtagtcccagctactctggaggctgagatgggaggattgcttgaccctgggaggcagaggttgcagtgagccgagagcgtgccactgcgctccagcctgggtaacagagtgacagcctgtctcaacaaaaaaaaaaaaaaaaaaaaagaaaagaaaaagaatgttatataaatggaattatacatgtcacatttggggactggctttttctgctcagcataattccctggaaattcatctagcagacctagatagttttgttgttgtagtaacatgaagtggatctattcctctggtcataccattccaaatctaaatttttatgcagggaatagaggtacactgttttgggggatatttatcttaagggatctcaaacaattttttgaattgttaacatgagactgtcttctttcaaagagcctgtgtaccatccagaaagactgagtagggggccaatattatattccagactctatttttactcagatagaactgaacatatggggtacagtagtggtacagtttatcactagatacattttagtttgcctttttgtcttaaatgtcttaaatgtaaaaatttaaagaaaaatagatattcctatgggggctttttaaatttctttaaactgctatggacagacttgtaatttttttttttttttttgagacggagtcttgttttgtcgcccaggctggagtgcagtggtgtgatcttggctcactgcaacctccatctcctgggtaaaagcaattctcctgcctcagcctcccaagtagctggaattacaggtgtgcaccaccaatggctggctaatttttgtatttttagtagagatggggttttgcaatgttggtcaggctggtctcgaacttctgacctcagtaatccacctacctcggcctcccaaagtgctgagattagaggcgtgagccaccacgctcagccttgccattgattcttaataacctgtttttatttcaccagtaacattaacttattgtaacagaacagatgagccaaaagaacaaacagctgttcaaatctgtacacatattaccagggctagactttctaaaaagtcaaaaaacaacagatgtggagaaaagggaatgcttatacactattggtgggaatgtaaattagtacaacctctatgaaaaacagcacggaaatttctcatggaactaaaaatagaactaccattctacccagcaatcccactactgggtatcttcttaaaggaaaataaatcattctatccaaaagatacctgcacttgtatatctattgcagcacaattcacaagagcaaagatatggaatcaacctaagtatccatcagcagatgatgggataaagaaaacgttgtatatgtataccaggggatattactcagccatataaagagaatgaaattacggcttttgcagcaacgtgggtggaactggaggctattatcttaagtgaaacaactcagaaaaaaataagaaaataaagatttttaaagaaccctcagaaacaaaaaaaaataccacatgttttcacttataagtgggagttaaacagggtgtatacagggtcatggagtgtggaataatagacactggaggcttggaaaggtgggagggggtgagggatgagcaattaccttttgggtacaatgtacagtattttggtgatggttacactaaaagcccagatttccccactacacaatatatccatgtaacaaaactgcacctgtgaccaggtgtggtggctcacacctgcaaccccagcgccaaggtgggcagatcacctgaggtcaggagttcgagaccagcctggccaacatggcaaaaccccgtctctactaaaaatacaaaaattagccagccatggtggcaagcacctgtaatcccagctactcgggaggctgaggcaagagaatcacttgaacccaggaggcggaggttgcagtgaaccgagatcacacgactgcactccagcctgggtgacagagtgagactcctcaagaaaaaacaaacaaacaaacaaaaactgcaactgtactccctaactctataaaaataaaaaatacttttctaaaagaatttttttttttatactttaagttctgggatacatatgcagaacgtgcagttttgttacataggtatacatgtgccatggtggtttgctgtacccatcaaccggtcacctacatcaggtatgtctcctaatgttatccctcccctaaccccctagtccccgacaggccccagtgtgtgatgttcccttccctgtgtccatgtgttctcattgttcaactcccacttatgagtgagaacatgcttggttttctgatcttgtgatagtttgctgagaatgatggtttccagcttcatccatgtccctgcaaaggacatgaactcatccctttttatggctccatagtattccatggtgtatatgtgccacattttcttaaaaagaacttttaaagacacctggtttaagcaagtacaattgagttaactatgtagtttcagtatacttctaagtactacagctcatgctaatagcaaaaatatacatgatacatcaagttaacagtatgcctctccctctaaatgttaggtcatgatagcatttggaagtcttcaaaaggaaaaattcctcatatgctgtattctaaattccgtatttttctatcagctcctttgctttagaaatataggcactcgtcgcatcttccgtcgacaaccctagaaagatacaaacaggttatctccctgattggtgcactgggaaattaagaaagtttgctttaaacttgtgaaagactaaaaaaccttttttgaggttccatgcttcccatttggctttgccttttaaatctagcattcctggacacgctggcaaaagaaggagacatgcatttgcaggttaacattttactgtgcacttctatagacattgttcaaacggagtatattactatattttaagtaattatatattataatcgcaattaatatattaattgtaacatatgaatatattaatattaataatatataataccaatattaatgtctccaactattgcttgtttgtaaagcccatagagttctttcagttctccatcatctggtcttgctttcagcttcctcacatcttctgcagccctgtcaaaatcagcctaaaggaagaacaaacaaacaaacaaaaggagcattttaccaccaaggaataggaactcaaagagcaggaagaggaaggttccaagtagaaatgaacttctgctgctctggttctatcagaatcatcttaatttacttgaattcctaggagttcacctctcctgggacttacctaatatgaggaactatagaaaattcttaatacagaaaatgttcggtttaacttctttttttttttttttttttgagccaaggtctggctctctcgcccaggctggagtgcagtgcagtggcaccgtctccactcactgcaacctctacttctggggctcaagccattctcctacctcagcctcccaagtagctgggactacaggggtgcaccaccacactcggctaatttttgtattttttgtagagatggggttttgtcatgttggccaggcttgtcttgaactcctgacctcaagtgatccccctgcctcggcctcccaaagtgctgtgactacaggcgtgagccactgaacctgatggtgagtttgcttttttttttttgagactgagtctcactctgttgcccaggctgaagtgcagtggcaagatctcggatcactgcaaccttcgcctcctgggttcatgccattctcctgcctcagcctcccgagtagctgggattataggcacctgccaccgcgcctggctaagttttgtatttttagtagacacggggtttaaccatcttggccaggctggtcttgaactcctgaccctgtgatccacccaccttggcctcccgaagtgctgggatta

SEQ ID NO: 93807 - DNA, 48803 bp, Homo sapiens
ccagcctggacaacatagcgagatcccgtctctacgataaaataaaaaattggcagggcgtggtggtgtgtatctgtagttctagctgctctgaaggctggggtatgaggatcacttgagcccaggagtttgaggctgcagtgagctatgatcacaccactgcactccagcctgggcaacagagccaggccctgcctcttaaaaaaagttaagatggtaaatttaatgttaagtatttttttttaccacaattaaaaaattttaaatacaaaatggcaaacaacaattttatacttaagaaaaaaaaaggccaggtgtggtggctcacaccagtaatcctagcactttgagaggctgaggcgggtggatcacctgaggacaggagttcgagaccaacctggccaacatggtgaacccctgtctctactaaaaatacaaaaaattagccgagagtggtggtggacacctgtaatcccagctacttgggaggctgaggcaagagaaacgcttgaacatgggaggcggaggttgcagtgagctgagatagtgccattgcacttcagtctgggcaacaagaacgaaactttgtcttaaaacaaacgaacaaacaaaaaacgagtgtttctacactttactgggtcctgacttccctgtaaagtttatctggcatcaggaaagcttcctaagtagacttgggtcctctcacgttctctctgtctgcattttttttttttttttgagacggagtctcgctctgtcggagcactttcggctcactgcaagctccgcctcctgggttcacaccattctcctgcctcggcctccaggtgggactacaggcgcccgccaccatgccaggctaatttttttttttttttgtatttttagtagagacggggtttcaccgtgttagccaggatggtctcgatctcctgaccttgtgatccacccgcctcggcctcccaacgtgctgggattacaggcgtgagccaccgcgcctggccctctctgtctgctttctaccgagggaaaacattagctacagaagagcgcatgaccaaaacttgtttgccttgtctgtttttccttctgatttaggtttcgttgtcaactgccaaagccgaggcgagggtgtgtccatggtgatgaccttctggtacagcagctcttgtccccatcacacaccccttggcctgcagattctgcgtcagcggcactatttgcaggacaacccgccaaaattttgtgctgcttgctgttttttgatctgtaaacctgagtctcagccagtcaggttgacacagaggagactgggccagtgatctcaaagcagctgtcttgttgctttgcagtggcttcctaggccaaagtcctacctacgaaaaagatgagtccccttgtagacagacgggtgagggacatgaacagacaattcacaaaatgggaagagcaaagaaacatgaaacatgaccaccctcgctaaaatagaggggacagagttaacagaaataacagcagcacttggataccatttttcctccatcaatcagtttggcaaagatttttttaagaaaataattcccagggtttgcagacaattactgatagaaaggtaaatggccttttttaaagcaatgtggctgtgtgtataaaaaactgtaagaatgttcattctggaatagcatatgccagaaagagagtcaagaagatacaggaatttagtacaaagtgacattttaagtaaggaagaagacagatttccttttctggctgtattgaggacaggataacctagaaaatcttccattacaaaaatatttagacatacttgataaaatataacaaaatgcctgagctcccaagataaaaagggaagaccccaggggtcacaacctataagggaataatctaagtctcctggtttaatgtccagttggagacaggacaccaatcttacaggctgtgtaaatgtgggagggggagttggatccgtgtctccttgaaaatctgaaccttgaggccaggtgcagtggctcacgcctgtaatcccagcactttgggaggccgaggcgggaggatcacttgatgtcaggagttcaagaccagcctggccaatatggtgaaaccccgtctctactaaaaatacaaaaattagccggatgtggtagtgtgtgcctgtagtcccagctactcgggaggctgaggcaggagaatggcatgaacccgggaggcggaggttgccgtgaactgagatagcgtcgttgcactccagcttgggtgaggagggtgagactccgtctcaaaaaaaagaaaagaaaatctgaaccttgagtgacagaaatcagtcatagtagccttctcacattgagaaaaatctgattcttacttgatctcttttaaagaccagtggtctcaacctctgacaaagattctctgattgaccagacttttgtcaggcttctggatcttcttctaagcccatctgcacttccttgcaagatccagttttagcaaagaaccctgagtcattttggcaagatttcccaccctgcatatctgaccaggttcctcattctttgccgtcccccagggaatgtttggtcaccatggcctgtcttcagcaggatgacactgacactggccttctaggtcagtttagcagaatcccccttactcctgatgattcctcttactttttccatccttggctataaatccacacttgccatcaccatatttggagttgaatccaatttctcttccccactggaaaatccattgcagtgggccgtctagctattggaatggtcctgaataaagtctgccttaccatgctttaacaagtgttattgaataattttttttaacacctctgagtctctgtccacctggagaaccactacagtaacactcagtgaggtacctgtgtcatctctcaagcacagtatattgtcatgacaggtagtctgaactccaagaggttgttcaaattaaacatatttgcattgctttcgtctttgtatagtccgtaattgaaactatccctcaaataacaggatatgcataaaagttctctatcaatcatgaatgtacaaggacattcgatatgctttattttttattttatttatttatttattgagacagagtctggctctgtcgcccaggctggagtgcagtggcgcgacctcagttcactgcaagctccacctcccggattcatgccattctcctccctcagcctcccgagtagctgggactacaggcacccgccaccaggctgggctaacttttgtatttttagcggagatggggtttcacggtgttagccaggatggtctccatctcctgacctcgtgatccgcctgcctcagcacccccaaagtgctgggattataggcgtgagccaccacaccaggctatttatttttattttttattttttgagacggagtctcactctgtcgcccagactggagtgcagtggcacgatctcggctcaccacaacctccacctcctgggttcaagcgattctcctgcctcagcctcctgagttgctgggattacaggtgtgcaccactgtgcctggctaattgttgtatttttagtagagatggggttttgccatgttggccaggttggtcttgaactcctgatctcagatgatctgcctgccttggcctccaaagtgctggggttacaggcatgagctgccacgcccagcccacacattattaagattttaaaaaaagcaagctacagaacagccctgtccaatagacagaatgcaagccacatagtgacttcaaatttcctaatagaaatattttaagatataaaaacaaataggtgaaattaattttaagaatgtattttattttactcagcacaccatgtattttattatcatatattttattatatattttattatatatatacggtgtactgagtaaaataaaatacattttatatatatatatacatatatatatatatatatatatttttttttttttttttttctgaggcaaggtctcattctgtcacccaggctggagtgcaatggcatgatcacagctctctgcagccttgacctcctgggttcaggtgatcttcctacctcagcctcccaagtagctgggactataggctcatgccaccatgcctggctagtttttgtatctttttgtatagacggggtttcactatgttgcccaagctggtcttgaattccttagctcaagtgatccatccaccttggcctcccgaaaggctgggattaccaaaggtgtgagccaccatgcccagccccaaaatattctttaaacatgtaatcatacaaaattatatgagatattaacattctttttttatactaagtcttcaaaacctgatgtgtattttacaacacatcttaattcagaccagtcacatttcaagtattcaacggccacttatgactagtagctacaatattagacagtgcaactatagaccacgtttactctccatttttttagcaactcccaaaccagctttatacgtattgtaataaacatagaaaacatttggaagggtacacaagaaatgactaaaaatgatttttttatataaaatgagaatgcagggagggaaggtgatcagggtttaattcacgtacatctctatttgaatttattatataaggatatatcatatttactaaaaatgtaaaagagaaatgcttattctttgcaacacagtccttgtatagaaatctgtcttaaggaaataatcaaatatgtaaactaacatttatgacaaggatgcccttggcccaagacgtgaataattttttctagtgtatccatgctatagacgttacctgccattactgtataagaaaaaacatagtgtacctagggctcagtactacccatggtttcagacatccataatttcaggcatccactggaggtcttggagtgtgctccctgtggataaggggggactactgtattcaaccccactggaggcttgactccctgaaaagtgaatggagaagaacaaactgatgtgaaaaatctttgtcttccaacaaataaacagacaggatctgagccctggggagatcactgaggcttctcttaacccttcagtgggtggtattttccatctgctcacaggaatgttgagattttggctgtggaccttgtgttttgcttagcaaagttgttttgtgtggatcgcacctgacattttaaattcttccaacaaccataggaggtaaatgaagaattcatgcacagtgcaaggataaaactgcacaggtttcagctgccttggacaccctgtgcttttcagctatttgttgaatggaacttaagtgcccaatttgttctgattggagcaaaactttgtggactgacaaggatgggcgtccaagatgtaggaagttaaaaaaaaaatgttgccaaacaaggtgtagagcacgatcctatctgtgttttgaaatctatgaaattatgtatctatgcacctatatgtaatgtatctatctctgaatggagggaaagagcctgaccattaccaccctctacccctgggagtgagaatgaagtgtacagggagcaggtgcaaggaagaatgctcacttcttactttatatatttctgtactgttaaaattttaacaggctgttttgtaaaaaaaatttaataaaagctatcaactgtaaccagaagtactttctgacagtagatgttctcaaaccatctcaccaagtgcccagaaagagttaacacaggagaattccagatgtttgaagtgaggacaaattcctgctttgagggtgggaggtgggcttagggatgagaggcaatgacgggggagaggaggaaagaagctgaggggagagctggctgctgagttgtcattccaaccaatggcatgaaagtttcaagcccaacgcccatttgtggagactatttcaggagttaggatttgcatctgagttcattgcccctgtaacctgtcaaagaagagctaagggagctttcggggttggcttcttggaggctgctttctcctttacttggaaggtaaaaatctcaagcccaagctgatcaggcagtggtgactgattgagctgttaatttttttctttttggtgtattgatttctttttccagctagggctgtaacatgcttatgggataaggttttacttttactaacaatgatatttacatggaacttctaacaagatggagtggttcttcctggtcctctgcagatgacaagaagcattaggtagattttcttgrataggctcgcatggaaaggaaggagaacctatgctttgactgatgaacaattttcatcttattccttcttggtttcacatagagcatggttaagctttgacaggaattgcagatgcgtgtagcaaatcctacttaagtagaatgggttcttgctttattttccatctcagtaaaaactcttaaaactcccccattcatagtaaagctactttacaacagaaagtagaaaaaaaaataaagagagagtttggaaagacacttttagtgaagtcacccaatgtttaggtccaaatgtagctcctctgtcccccagcgctatgttatcaacatcacagggaacttctttcccctcgcaggcttcgctagtgatggacccatacatgattcagatgagcagcaaaggcaacctcccctcaattctggacgtgcatgtcaacgttggtgggagaagctctgtgccgggaaaaatgaaaggcagaaaggccaggtggtctgtgaggccctcagacatggccaagaaaactttcaaccccatcygagccattgtggacaacatgaaggtgaaaccaaatccaaacaaaaccatgatttccctgtccattggtgagttggggacactactgaggggctgtcattgtcctcctctactctcatgttcacaggctggttggagaagatggcagttgggggtgagtctgagtactgaacatgggagaataacctcttggctccttttgtgttttcctcccataaaaaggggaccctactgtgtttggaaacctgcctacagaccctgaagttacccaggcaatgaaagatgccctggactcgggcaaatataatggctatgccccatccatcggtaagctcctcctgagactccatacctggtgactgccaaatctttagtgctcttataacaggactaaatgtctagcaatcctcttcactttcctgatgcacaattcctaaggagaggctaagattacatggtcctttggatttgggaaccgggtctcgggatgcttaaatacaaggcatcaaggtccaacttctttcctggctttctttgacatatgggcacttcccctctaggctcccaaacatacttatttgtcaagtaaagctcctatcctatcattactaattctaatctgaaggccttgagtctggcaggagctttgtgtttgctgagcctctaggtcctaaatggatttacttattgctctgtgtatatagctcctttgcttcatttctgcttctctatgtattgaaggcctattttcattatggtcctgagcacattgaaatgcaattgttacygtttatgactaacgggtttaaacaaacaaataaacaaacacccaagaacaacaaaaaatgggctgtcaaactgaaggatagaaggttgtttctgatagattgaaattactcctttttaggtttctctccatctattaaaaatttctaccctgaatattttggtaaagtacatgattccttgactttcagtattgaacattttttttccttatgtgtacatagaaacacattcttaatgcagaataaaaccccagtttcatgataaaatcaaattttaaaaacactttaaagagttatatcggggacttcgtggtttttcggttgattacttacattttataaagtttcatacaacaaaaataaaagcaaaatcaagaccaaaagttgttataaaaaaagtttctaatgactttaacatccaaatattaggaaactgatttaacctgaaaaaccaaaaccaagtctccatttgacaaatgttcaaaggttctgaacatttcatttcaaaggagatacaggtgttaatatatgtctaaaaaagtgttcttcctcattagtaattaaggaagtgctgatttgtataactttgagacacccatctatacctattaaattagtaaacattatgaaatagtgcctctagccttgctaagttgtctttttgaacataaattttgcaaaatattatgatgggcatgaaactgctgatacttcaagcttgtaagccaacatttggaaatattgtacaaaaataatttgaaataaaaatttgtacaaaaatactgataagaatattacataacataaaaaacttaaaatggaccacatgaattgaatgcactgattacaacttctttttttttttttttttttttttttgagacgaagttttcgctcttgttgcccaggcggagtgcagtggcatgatcttggctcaccgcaacctccgcctcccgggttcaagtgattctcctgtctcagcctcctgagtagctcggattacaggcacgcgccacaatgcccagctaatttttgtatttttagtagagatgagatttctccatgttggtcagactggtctcaatctcccgacctcaggtgatccacccaccttggcctcccaaagtgctgggattacaggcgtgagccaccgcgcctggcgattacaacttcttaaaaaatacagtccctaaaaaagatttgggaataatagaaatccttgtattacacagaataaaatataatcacagaaatcaagatggtgcagagtatttggggagctcttccttgttatcatttatacattcgtgcttatactaaaattgtaaaacataaaatgtgaagtgaatctcctttatccacaatggctgagagctgaactaaatagaatgccctctgagcaggggcagaggcagcctgaagcccatgctgggcctccagggcatagcygtcagttgagggatgaaaacttcatcttcttgccaggcacagtggctcacccctgtaatcccagcactttcaggaggctgaggtgggaggagcccctgagcccaggagtgtgaaatcagcctgggcaacagagggagattctgtctctacaaaaaaaacaaacaaaaacaaaacaaaacaaacaaacaaaaaacaaaacaaaaaaattcaaaaattagctgaatgtgggggagcacgactatagtcccagctactcaggaggctaaggtgggaggatcccttgagcccaggaatttgaggccgcagtgagctatggctgtgtcactgcactccaagtccgggtgacagagtgagacacagtctctaaaaaccaaaaaagctccactttccactcttttctttcaggcttcctatccagtygggaggagattgcttcttattaccactgtcctgaggcacccctagaagctaaggtgagccttatacaagacaccagctctgaagcaatttagggcaaactatccctttttmcttgtttctgttccacaagaagtacgggtgtcagagggggaaaagctgagaacaatttccctttagcaattagaagacttctcatatagttggggtcactaatcagtgattatagttaatgtcattacagtgtgataatgaccatcccatacaacttaatgtggtgtctgtctcaaggaggccgaaaggatccagagagcacctatatttgattgtctgtaaaagatcatttgagaacaactcataaacactaaaaaattattttaaaaaattttaccaataggatctttcttttttaaaaaaaattgtagcttttctcatttactgtaaggtcatttagagagaaagatagaagtaccaggacatactgaattgatggcagtgccaagtttaaatgatgtccttccctctatagtctactgtgtggggtcagcattttctaacataatgtgtgtctgtcacctgtatgtcagcgaagagccaggcttcaaatctctggccaaaagtaaataaataaccaagcgaaaaaggtccaaggccagcatgctctctcatggaagtctgctgagtcacagccaacctatcctttttaaagtgatttaagtggccaacatttcaacaatagttatcaacatatataaatttcttttggttttggcttagtacatttcctactacttacaacttgttaaaggaagttcacaattgctcccaactcacccacctgacaacttcttttctcctgttgctgttggaacccctaatgaaattaaccttttatttccttcacaggacgtcattctgacaagtggctgcagccaagctattgacctttgtttagctgtgttggccaacccagggcaaaacatcctggttccaagacctggtttctctctctacaagactctggctgagtctatgggaattgaggtcaaactctacaatttgttggtaaatgactttttaatcttagactcaaatgctcagttactaacctgtaaaaaatatatgaacattacttcagcagaggaaggtctcaaagtggtggttgaagccagagacagactttattgcttacattggacccttgagataagtgaggattccccctaaatgtttcagaatcatcttagtctcatcctttctttctctccagccagagaaatcttgggaaattgacctgaaacaactggaatatctaattgatgaaaagacagcttgtctcattgtcaataatccatcaaacccctgtgggtcagtgttcagcaaacgtcatcttcagaagattctggcaggtacgtccagcagacttcacagaggacgaggtggggacagaatccttcagctgttgtgtgaaatgacaaaaaccagtcattccctaagttccaagcctggggtggaggtggggagctccactgatgtctctcatcaatactgtgccataggagtggtaggcctggcctaaaagaagaaaaagaagaaatacttgtctcttcatcactcccaggagaaaaagaaatagtacttgcctcttcatcactcccatcacgttgaagatagggtctgaaatatctagttacttaaatggtgaattcaggctctgcactctggaagagtatgttaagaatttacagttcttaaataggaagacaaaacacacaaacatgaaatgcaaatcacactttgcttgtgctttttgtctttctctttaagaattgtaacttcttaatattacgggatagggaaattacatgatattatgtgactattacatgataaagcaattcacattaaaactgatttcagcatgttttattttcagtggctgcacggcagtgtgtccccatcttagctgatgagatctatggagacatggtgagtcttgatcaggatatatcactacagtaatctcaaattattttatgggaactttagaagtggaataatcagaaacaactcctaatcgtttcattacagcaaatcagcatccctgcactttttacaaatatatagacccacaactccttagccagttttctgaaacccaaagaactttggaaatccaaagattcctggaattcatttggttacaaaacctgatttgacctgatatttgtagatttttatttttcccacttgtggatctatatatttgttaagagtgtggggaaaatggcagaaatgttaatattcttgattaggggtactatcctagacagctctgggagtgttacataacgtatggtaagtgtgctacatggcctttctgaagcccaaaccattttgcattatgaaaatacctggccccaggaatttcagataagggattgtggacttatattttaaatctgtaactcctatagacagtaatttcatagagccagcttcatggagttgtaaatattactgggctagggtcagtttcctcattttaggcttcctttaatccagtccagacaccaaattaaatgtctttgtgtagtccccttcaaagcctcttgcaatcccagtcatgcttcagggtagggatgatcccattaatccaaggacctgtccctagtgatagaaggaaatgggtgggagccacgggatctgggattgcagtgagaagtagacaagaaaacaaccataacaagtgcctcttctcaggtgttttcggattgcaaatatgaaccactggccaccctcagcaccgatgtccccatcctgtcctgtggagggctggccaagcgctggctggttcctggctggaggttgggctggatcctcattcatgaccgaagagacatttttggcaatgaggtgataatatggwgaaagagtatgtgtaatttagggtatatatttatttcatgagcacagtggggacaagggaggcttttttcttttctttctccttgtcagtcaagcagcaygtgtgtggcagagctgggctacgaacccagagggtctgatctaagaatgccactagacaccatcactttccaagattaaaaacctgatagaaaggtcagaacaagaaactctaagacagagatgcttaagaaaagctaaacaacatgtttcttgtgggtgtcttttagatccgagatgggctggtgaagctgagtcagcgcattttgggaccctgtaccattgtccagggagctctgaaaagcatcctatgtcgcaccccgggagagttttaccacaacactctgagcttcctcaaggtaagggcagctcctgccctccactttgggagtttgggagtcagagaatgccgcccgtggaattaggaataattggttctcctttctggagccatgttccaatattaggagacggcatcggtgtaagcatccacacacacgtttctcacttccggccattctctctgcccctggtgaaaagcttcaagtaatagagctttttctttttcactccttatgccagaacatcacacctacgttcccactcttcaatgaggggkctatttttaatgacttggcttttcttttacttaaattttgatccttgatttctccttgcctcttcttgtagtccaatgctgatctctgttatggggcgttggctgccatccctggactccggccagtccgcccttctggggctatgtacctcatggtgagtatgtgggtggcaggcactaggtcaatgcatgttgtaaggcaaagggcagtcattcagcagaattgccacaggcagtcacgcagggtacaaagacaaccagctggcctcctaagccaagcagtttaggagttgtcttattctgaattgtcccactgaggtaatttagcctctatcagttctcataaaactctttaaatgacttaattaggcagggcatggtggctcacgcctgcaatgccagcactttgggaggccaaggtggacggatcacttgagcgcaggagttagagaccagcctgggcaacatggtgaaactctattgtctctacaagaaataaaaaaaatgagctgggcgtggtggcacactcctgtagtcctagctccttgggaggctgagatggaagaatgacttgagccttggaggttgaggctgtagtgagccataatcgtgccactgtactcccgtctgggagacagagtgagaccccatccgaaaagaaaaaaaaaaaagatttaatttttcagtacagagaatcattttatatatgtagatacagggaagatttaaaacacaaataagaggcttttcataccattgtaattctcaactgggagtgatactggttccctaagggtatctgggaatgtatgggaattttgtttgttttcagaatgactaggggctgccattttgtgggtcagggatgttaaatatcctgcaaggggtgggctagtctcatgccataaagagttgcctggccctaatgccagtagtgtctcttttgagacatactagcattctatttccagcttttatttatcagcatcagggaaggaactctttaatatttattaataaaaatatatcctgtcttccctgagaaaaattccataaatattagccctcttatttatcagtgatcagtagcacagttccaagatatcttttaaagtagcccctaccttaatttctggcacaggaaattggcctgttctccctccttctgataagttggcctctccctcctgttggtataggttggaattgagatggaacatttcccagaatttgagaacgatgtggagttcacggagcggttagttgctgagcagtctgtccactgcctcccagcaacggtgggtgcctgtgtccctcaggacattctcaacagtttctagagccccagaagcaagttctgagctggtttttagcctgatcttttctcctccaacaaaatgtcttctcatttgataagattcaaactgatgtgtctcatggatcctatttaaaatttgcttctcccccccatcataatcccatccatactgggaagaaaagttgtaaacaaacgttctaggtgagaggaaattgatcctgtcccacaagtcattttaagatgaatgaactcagttgctgacttagcatcccagtcatgggagctgaatgaactgatggccctgatgaaatggtaccacttcttgtggatcagggtcctgaccattttagggtggtccagtaccagactcaattgctctgaaagtaacagactcttctttttgcagtgctttkagtacccgaatttcatccgagtggtcatcacagtccccgaggtgatgatgctggaggcgtgcagcyrgatccaggagttctgtgagcagcactaccattgtgctgaaggcagccaggaggagtgtgataaataggcctgcatccattctcctgaggatgtgtcccatctagggaaggctggactaggccttgcggctcctcagggactcaggtggccctactgggagaggggcctcaaatgcaccatgtcaagggttcaagattgttcctgcttttccccaagtacaaccacacccacactcagatcctcctcattcacatcgcagattctcccttgctctgcgctgctagagtgactcactaattcattaatctgcctccctctcgtaagatttccttctttttttcttgaaagtaccaggtgaacaaagtttaccagaaagcagttgagacaagaaaataagagctcaggatgagggaaaagaaaaagattgagagaatttgtgcccccaaccatttcctcagactctaagaaagaacacgctctctccaggcaggtctgaagctcaactctcttattgcctcacttcaggtatacctcactttacacaatagaattataactggaaagaagttggggacacatgtatttggtgattacattttaaacacattaggaaaagttgctatttgaactttttattgatttttggggggagtaaagaattattttgtgatgcaaataaatatcctttaattgatcgacttgccaaatttagatttgtgtgcatcaggctttcttttttttctttttttagagaagttcaatataagcttttcttttctttgtttctttctttctttattttgagatggagtcttgctctgtcgcccatgctggagtgcagtggcgcgatctcggctcactgcaacctccacctcctgggttcaagcgattctcttgcctcaacctcccaagcagttgggactacaggcgtgagccaccatgcccggctaatttttgtatttttagtagagacagggtttcaccatgttagccaggctggtctcaaactcctgacctcaggcaatctgcccgcctgggtctcctaaagtactgggattacaggcgtgagccacctcgcccagcggcatcaggctttcttaaagtgagagcacgcctgtactagagcaagcaggaatcagagaccttccagaaatactactgtgtaagggccagaaatatcttcacttgtcattgttatataatcattattacttttgctgtaatgttaatattgatttattaatatatattatcttttcatacattttctaagaaacatttatattgataagatcttttattttgccaagggcataaattattgtttttctttttttttttttaataaatttcaccaagtatggctcttctgtgatgtgtttttttctccgtttgggaatttctaatcccaggcactcctcagtctcattgtttcattacctatgaggtttcatttacttctttgtaaatgtactgacttttggagttacttaagaaccacagttcctaaaacattttatttgggagctcaacttctggcttcctacttaccaagaggcagtaagttataacctctkgcctttgtctttacattttcaactttctggatccctaacctctggtcccaagttactacscttgcctatatccactaaccactcactaggtcacaaagttgatggctctggcttgacccagtgaatgagaagtgtcctagatgttttktttttwttttttttttcgcaaatcttcataggcacagttgcctgtttaattttttcttcagcccttcccttagaggagggagccttaagttacctttcaaggttgggggttaggaatctatcataactagtctagagatttctcaccaagggaaattttccttatctaaaagaggaacttcaggtctcaaccctgccagtcacacccaattaatgtccttcacaaaaataaacagcatatgttccctttcaatttgagttcagtgagctcacagcaaaatttaccttttaattttcttcagcaaatccaagacgaatatacaaaggatgagattagataaagatttcagtttcccgtatgccaccgctgccgccaattttccaaaaaagcctggctcctcttttcctgttcytccatccaagcccccaaagatctctaaccagaaataaacaggaagactcagtgatttacaaaagacattttagttttacacgtacagaaaattctacccagcattacagaattcttagacttcttaaattcctgattttccttggtatttacattttgataagggagccaatggttcttcaaacatttgaaaagaacacatacacactggacaatttcaaacgatacaaacaaacgcaactgtccttctttctcattcctgtccttcagccacccagtttcttctcccctgagggaatcagttatcatttgctggtcatacttccagattatmctgtgcctatgtaagtgtgtgtgtgtgtgtgtgtgtgtgcacttttcattttttcaaataaagtattactcaactttgtaattctgcgcgctctggaggtcaaaggagggatggcattgctggggtgtcccccacatcctgagtgtctctagataaaaaggagctaccgggcggcggctgctttccacacaagcttaaaattgccaagagtcaactgccagttgctttgggtggtggcgtcagagtgtcttcagataacacgaagaatgcgtgtaaagatcggagacggccgggcgcggtggctcacgcctgtaatcccggcactttgggaggccgaggcgggcggatcacgaggtcagaagtttgagaccatcttgaccaacttggtgaaacctcggctctactaaaaatacaaaaattagccragcgtggtgacgcgcgcctgtaatcctagctacttagaaggctgaggcaggagaatcgcttgaacaccggaggcagagcttgcagtgagccgagatggcgccactgcactccagcctgggtgacagagcgagactccatctcaaaaaaaaaaaaaaaaggaccggaaacaagggctctcagctgcgaattcaccttttctttgtgtccgagccccgcctaccgggtaactggagagtatcaggactgggtgctaccaagcgcctcacagcagcccccagccgacaccaacatcccaaccctgggcgacccgcggctgcgcaggcgcggatgcatgtttagggggctgcgctagtcagtgcgcatgcgccgtcgctaggcaacaggacacagctccgggcgccggcgtagaatctgagctgcaggtgagggttagttcctttattcggcctctgcgttctcttaggatgttacattttgttkcctttttcagcctgtctaccctggtcacaccctgcttcgagtttctcttcctcctttgcccccggtttgggctctgactggtggaattgttccaggaagttgacaaaacatcctaggcttttgtaatcacctgttaacctttcccagctctggatcagaagcagcaacttccatgagttgtgacgcagagcagacaattctattagctggtgttagtttccaatggtatagccccttggaacttttctccaaagaatcgtggccctcaccgtccgcagtgcctgacattaggatctctactcagccagaaaaataaatccacccccgtgcctttgtcaaagacaaagcaggacagtaaagcggttgagacaggttttaaccagtaatatactaatggaataaggaggagtccagcacgaactgaactcaactttgatttgtacaaatgttactcagactttaaaggaaaaatggggaaatagggaaggggagaggaatgagggggcgctcagaagagtgagggaagtgaaagattacaaaaagtgcgaagtaggggttagtccatgtgaaacccatctgggtttgttaaagggtgtttctggaagttaggcttttatcctcctacagatgctgggagataggagccatatcttaaggtgttggctggaacagtaaattcctttggcagcctgagtttttttaggcaggccctttaaagcggggctggagtcatcctagagatgctaccttgaactgttagagactgtgttagagttttgttcaagtctgttgaggcctagtccacaaatggctcagaggaacctggctagagtttggtcaaggagagaatttttgttactccgcatattctgcacattattctgtgtgaggtgttgtattttacgtaccctgaagtttgaattattgcatatatgttggaaaagaactgaattctcagtacatattatttatatccttatttattttaaacaatttaggtttatttacaaacaagtttcatataatgttatagaacctgcaaatacagatgctctctataggccaaattgtttcacagcaccttccaaagaggcagtcagtcatttgctaaggttaaggttgaagctgtataggaggtgatgcccaattcctcaaagaaaacaataaacagaagaactagcacatgtgtgtcttaatttttgtgtgtttcaaatgtagaaaagaattattggtctttaactcatttgatagcctaaatttaatgtatttttacgttataccatatttaaaaagtaaagctgtgggagtgttccctttggcagtgcatattctaaaattggaacaatacagagaagattagcatggtactagcaaaccaaattcaacagtatgttacaaggattatacaccatgatcaagtgggatttattactgagatgcaacatataaaaatcaatcaatataatatgccacattaacagaatgaaggacaaaaaccacatgatcatctcaactgatgtagaaaagttagttgacaagatttgacaccttttcacgatagaaacactcaacaaactagaaacagaaggaacctacctcaagataataataaggaccatctatgaatagcttgtatcggccaggcaaggtggctcacgcctgtaatcctaacactttgggaggccgaggtgggtggatcacctgaggtcaggagtttgagaccagcctggacaacatggcgaaacctcatctctactaaaaatacaaaaattagccaggcgtggtggcacatgcctgtagttccagctactcaggaggctgaggcaggagaattgcttgaacccaggaggcagaggctgtagtgagccaagatcgtgccactgcactccagcctgggtgacagagcaagactccatctccaaataaagaaagaaacaaagaaagaaaagaaaagcttatatttaacttcatactcaatggtgaaagactaaaatctctttttctaagatcaggaaaaaagcatggatgcccactttcaccactttgattcaacatagtattggaagtagtggccagagcaataagacaagaaaaagaaataaaaggcattgtgttgcaggaagtcagggaccccaaatggagggaccagctggagctgaggcagaagaacataaattatgaggatttcatggacatttatcaattcccaaaattaatacttttaaagtttcttacgcctgtctttactgcaatctttgaacataaattgtgaagatttcatggacatttatcacttccctaataatactcttataatttcttatgtctgtctttactttaatctcttaatcctgttatctttgtaagctgagaatgtacgtcacctcaggaccactattgtacaaattgattgtagaacatgtgtgtttgaacaatatgaaatctgattgtaaaacaggtgtgtttgaacaatatgaaatcagtgcaccctgaaaaagaacagaataacagtgattttcagggaacaagggaagataaccatagggtctcactgcctgcggggtcaggcagaatacagccatatttttcttctcacagaaagcctatagacggatgtgtgagtaggagaaatactgctgaattcttttcccagcaaggagtaaccctggggaaggaattcattcctgggggtaggtctatagacggccgctctgggagtgtctgtcttacgccgttaagataaggactgaaatacgccctggtctcctgcagtaccctcaggctttgggaaattccagcctggtaaattctagtcagaccagttctctgctcttgaaccgtgtttcctgttaagawgtttatcaagacaatgtgtgcacagtgggacatagaccctcatcagtaattctaattttgccttgccttgtgatctttattgccctttgaagcatgtgatccttgtgacctactccctgtttgtacaccccctccccttttaaaatccctaataaaaacttgctggttttgcggctcggggtcatcatcacggtcctaccaatatgtgatgtcacccccagaggcccagctgtaaaattcctctctttgtactatttctctttatttctcagaccagccgacacttagggaaaatagaaagaaccatgttgaaatattgggggctggttcccccagtagcattcaaattggaaaggaagaagtaaaattatctttgttcacagatgacatgatcttatatgtagaaaaccttaaaagattccacaaaaactctgttagaactaataaccaaattcagcaaaattgtagaatacaaaattgatatgcaaaagtcagttgcttttctatacactaacaatgaacaatccaaaaagaaaattaagaaaacagttccacttacaacagcatcgaaaagaataaaatacttaggaataaacctaagcaaggaggtaaattatttgtacaatcagctgggcatggtggctcatgcctgtaatcccagcactttgggaggacaaggtgggtggatcacgaggtcaggcattcgggaccagcctgatgaacatggtgaatacccatctctactaaaaatacaaaaattagctgggcatggtggtgcacacctgtaatcctagctactcaagagtctgaggcaggagaattgcttgaacccatgaggtggaggctgcagtgagctgcaatcatgccactgcactccagcctgggtgagagagcaagactctgtctcagaaaaaaaataaaaagatttgtacaatcaaaactacaaaacattgctgtaagaaactaaaggagacacaaataaatgagaaggcgtcccattctcatggattgcagtacttaatgctgtgaagatattcatgctgccccaagtgatcaatagatttcaacacaatccatatcaaaatcccaatagcattttttttcaaaatagaaaaaaatcaccctaaaattcacacaaaatctcaagggaccctgaataaccaaaaaaaattttgaaaaggaagaataaagttgaaggagtcacactttctgatttcaaaagatattacgaaaccacagtaatcagaacagtgtggtactggcataaaaacagataaatgggccaatgaaatagaatagccaagaaataaacccttgtatatatggtcaaatgatctttgacaagggtgccaagatgactgaatggggaaagaaaagtgtcttcaacaaatggttttgggaaaactagatatccacatgcaaaggaaactgggcccttatattacaccatatataaaaattaactcaaaatagactaaagacctaaatgtaataccccaaactataaaactcctagaagaaaacatgggaggaaagcttcatgatactggatttggcaatgatttcttggatatgacaccaaaagcataggcaacaaaaggaaaaatggaacttaaaaacctttgtgcatcaaagaacataatcaaaatgaaaaggcattttcttctgcctatggaatgggagaaaatatttaaaaattatatatctgatgaggcattaacatttagaatatataaagcactcctgccactcaacaacaaaaaagtcaaatgacccaacttaaaaaggcacttgaataggcatttctccaaagataccctaactcatttctctcaagttcaaagttcaacaggtccctggagcaggggcacaatgctgccagtctctttgctaaagcatagcaagagtaacctttactccagttcccaataagttctgtgaaagaaaaatacactttggggccccaaaattgctaagctaaagggaaaagtcaagctgagaactgcttatggcaaacctgcctttcattctatgcaaagtcatccttatgcacaatgagataaatgcatatctgattgtctcctttggaaagactaatcagaaactcaaaagaatgcaatcatttgtctctcacttacctgtgacttggaagccccctccctgcttgagttgtcccacctttccagacagaaccaatgtttatcttacatatattgattgatgtctcatgtctcatgtctccctaaaatgtctaaaaccaagctgtgccccagccaccttgggcacatgttgtcaggacctcctgaggctgtgtgatgggtgtgtgccctcaacattggcaaaataaactttctaaatttactgaaacctgtctcagatatattagtttcacagtacctcatcttcatctgagacctcctcagcctggacttcactgtccatatcaccatcagcattttggtcacaaccattcaagaagtctgtaggaagttccaaactttctcccatcttcctatcttctgggccctccaaactgttccaatctctgcctgttatccaattgcaaagttgcttacacattttcaggtatctttatagtaatgccccacttctatagtaccaattttctgtattagtgcattctcacactgctatgaagaactacctgagactggttaattcataaggaaaagaggtttaattgtgctcacagttttgcaggctgtatagttttctgcttctggggaggcctcaggaaacttaccacatggcagaaggtgaaggggaagcagggacatcttcacatggccagtgggagtaggaggaggttctacacacttttaaacaagcagatcttgggagaactctatcacaagaacagcaagggggaagtccacctccatgatttaatcacctctcaccaggcctgtccttcaacactgggaattacaattcgacatgagatttgggtgaggacacagagccaaatcatattactcatagagacagaaaatagattagttacttctagagctagaggtgaggccatatgtgggagatggagagagatggctaatgggtacagagtttctttttggagtgatgaatatattctaaaattgataatggtgatggttacacaactttaaagaaagtaaaaaccattgaattgtacaatttaagtgggttgagttgtgtggtatgtagatcatgtctcagtaatactgttttttttgtgtgagtggaaaaaaagatataaaggagtcagactttagggagatcaactcaaatatctgtgtggcatttaaaggatttttaggtttttaaaraaaaraaaaagcatgtaagattgccagtttgtagctatctgttcatggtggaaaacagtaactttttctcatgttcatcctagtcacaaacattgtgatgttacttcagacataatcattctaaaaggcagagataacttcagttttttaaagataaggagtgcacacttgcaggaattagtttggggactagaactagatggggtgacctcatcattgttgtttcatttaagggtacaaagtgcttatttttcctgactctggtatttcataatggaagcagggcaaagtgtcagttgggcttccacactgggagcaataagaaatttctagaaaaacatctgagatgtttctgtaaatagcagaattagcatgtgtgataaactagtggtttttacactttttcgttcatgtgttccctaaaataatttagaattcttgactgaaaattcaaacatatataaaagtagaagcagtagtataattagcaccaatatacccatcactcagatttaatgactctcaagatattgccatttttgttccttccttctttttcttgttttctttgccaaaagattgtaaagcaaatcctggacatcgttagttctccccataygcctcagtacacatctctaaacacataatttcttaaccacagtgccacatcacatcaaatagtaagatatttttggttgcctccaaaatgtcttcttatagttggtttatttggatcaggattcaaacaaagtttaaacattactttttagttttatgtcttaagcttaaatatctcttactctagagaaggctcctgtttttttttttttcttttcataccattgacttgttgcaggaatggctgtcttacaaaatgttctacattctggatatgtttgttggcttccttgtggtgtcatttaacttgttcatttaactagagcatgcatttttcaacagagatgatattggatmtttactagaaatttaccttcttttttttgttgttgaaacaggatcttgctctgttgcccagactggagtgcaatgacatgattacaatcatagctcgctgcagccttgacctcctagactcaagtaatctttccacctcagccttctgagtggctcggaccatagttacatgccaacatgcctgcctaatttgtgtattttttgcagagatggggtctcactatgctgcccaggctggtctcctgggctcaaatgatccttctgctttggcctcccaaagtgccaggatgattttctttcttcatcttgtatttctgttttatgttttaccccagttttatgttaacgttatccttatctttgaaagtattttattgatcatacttctttgccacaaaaatactgactgatatggcaggttgctagaggttccccaatgactttctctccttgtagtattaaaactgctgatggggctgggcgtggtggctcacgcctgtaatcccagcactttgggaggccaggggggcagatcacctgaggtcaggagttcaagaccagcctggccaacatggtgaaatcccatctctactaaaaatacaaaaattagccaggtgtggtggcaggcacctgtaatcccagatactggggaggctgaggcaggagaatcgcttgaaccttggaggcggaggttgcagtgagccgagatcgcaccatcacactccagcctgggggacgagagcaagactttatctcaaaaaacaaacaaataaacaaaacaaaacaacgacaacaaactgctgatggaatggatcaggatcacttttcagtgaatttctcaactttggggtttccagaccatacaggtaggttacatttgaacactaaacccatgtaaaggaatgcctatgcttacaaactgtcatgggagagttttcttttttcttcccaggggccagaataagaaagatttctttataatccatcttgttactcagccttaacatttggaagggcttggctttgtggagaggtctaaattttaaatccctgccktacatgggtckaagtcctcctccactagtgttaaactctaaacccatgattactgagatgttaccagcataagcatactcttattttccaaattttcaggcccctctttgtttttgcttctttggggattctgttactctcttgcaagcttggctctgaatttgaaaatacgtttgttagattttatccatcatatctagatgttttgaagcccaaacattttcatatgatctttcttgtgatgttgctttggaagtctccatacttctcttacatctctccatcctgatgtttcctccttccgttctccccctgcccaaaatctttgttccatagcaggtacaattatctgccatcatcaaactggttacttctttgccttaactgtaacttcgctcttcccctaaagtcactgtttgttcttttttttttgagacagagtctcgctctcttgccaggctggagtgcaatggcaccatctcagctcagggcaacctctgcttcccaggttcaagcaattctcctgcgtcagcctcccgagcagctgggattacaggtgcgtgccaccacacccagctaatttttgtatttttagtagagacagggtttcaccatgttggccaggatggtctcgatctcctgacctcatgatctgcctgccttggcctcccaaagtgctgggattacaggcgtgagtcactgcacccggccaactcactgtttgaaatagctttttttcccacatagcccagactctaacttattgtcttttttcatatctatactcccccagactcacacaataaccagcttcctttaaaacatgtgctgaattactttatatcctttctgtgcacactcccttatttatttagggcctgatacatgggaaatttcaacacttgggaaatttcaacatctctgtggatagcctcacccacactctaacctcaaggcctcttgcttattccaaacatgaggagctgtacaatctaccccacaatggccccactcccaaagccacacctgtgttccttgtcatcacttgaactagactattttaggattattaatccctaacatgtaatttactaactgcaagctgctcaccctccaactggctcacaatctgacacctggacattwtacagccctttaatctcttcaaacatttcccaagtccattaactcccttgcattgttacacttcttttttgcctcatggtgctgtactctgcccacattcctgccagcgacctcaacttcttagcttccttattccacagcatctactgtgcacagcctctacctgggattaatctgatcctgaaccttctcaatttctatacttaaagtaaaaataaaggtaaatgggtgccactggtacacggtctctggcctcgctagggcctcagcactgttttggcaatccctttacaaacactggaccagtgcttccttgagttgaagatggcaggcccatagaatgagaggagccgggtgcttcaattactgctccgagaagagctatttactgaccatgttggtcttcatttgagcaagaaaacacttcaattgtgtttgagccatcaagcttttggtatctgtttgttgtaacaattaccattactttaacaaatacaatgagataccattttaaaattttaattttcatcagcaataagagaaaatgttattttatttatttatttttttgagatggagtttcgctcttgtttcccaggctggagtgcaatggcgcaatctcggctccccgcaacctccgcctcccgggttcaagtgattcttctgcctcagcctcccgagtagctgggattacaggcatgtgtcaccacgcctggctaatttcgtatttttagtagagagggggtttcaccatgttggtcgggctggtctcaaactctggacctcaggtgatctgcccacctcggcctcctaaagtgctgggattacaggtgtgagccacccgcccggctgagaaaatattatttaaaaccagcaatacaaaatttaatttcttcttcttttttttttttttttcagacagggtgtcaccctgtcacccaggctggtctcgaactcctgacctcaagttatcctcccgcctcagcctcccaaagtgctgggattacaggtgtgtgccaccacacctggcctaggaaatgtcctttcatttttgcttctcatctccctggtcctacctgccttatcccctatagggctcactatttttagtttctcatgtattcttgagagtttctctacaagtatataagcaactttgagtatagttttattttcccttaaaacaaaacatagtgtgtaatcacaattttatactttccttttatttcttcttttccttctccttcctcttcctctttcttttcctccttctcctcctcctcctcttcctcctcctccttcttctttgccttgctctgttgcccaggttgacgtgcaatggtgtgatcatagctcactgcagccttgaactcctgggtcaagtgactctcctgcctcagcctcccaagtatctgagactacaggcatgtgccaccacgtttagctaatgtttttgcatttttttttttttttgatggagtctcgctctgtcgcccgggctggattgcagtggcatgatttcggctcactgcaagctccccctcctgggttcatgccatcctcctgcctcaggctcccaagtagctgggactacaggtgcccaccaccacgcccggttaattttttgtattgttagtagagacggggtttcaccgtgtcagccaggatgttctcaatctcttgacctcgtgatccacctgcctcagcctcccaaagtgctgggattacaggcatgagccactgcacctggccttgttgtttttaaattttttaatagaaatggggtcttgctatgttgccccagctactcacaaactcctggcctcaagcaatcctcctgcctaggcttcccaaagagctgggattacaggtgtgagccaccatgcccagcttgccttttcgtctttaacaaaatatattggggaattggggagttttccgtatttacacacagagaaatttctctgtctgtccagctgcacaatattctatagtatggttataccataattttttgcccatcagtaagagattggttgataagatgattgcttaataaagaaattagggtgtactttgttttctagccttggggaacatggggacagaagcccaagggaagagcagcttgtccaagaagcagtagcaacaracacgtgcctggagggagtgtgatagcatctgccaygtggaggagagcatgagccattcttcagcactagagaagatggcattgcagccagcaggaatgtggcatcattctgaaagcaatgagaatgacactaatgctgtccccaagctcaccacttccctctcaggccttcactcaacccctctacttcttatttccagtgtttctgcattaactaccaccttctttttaagaaccaatgaatcccagaggttcccatgggccaaattctccctttccaacaccatcttaaccgtgcttcagtaaacataagttgtcaactctcaaatgtgtgtctctagtctagacttcccttctgaactttagacttgcacatccaactgccttctcccatctgcacttagaggtcgctaaagttccaccaattcatcatttccacgctccctccaggcacctgtctgttggccactgcttcttgggcaacaagattccttaggactttctacacataagattatgtcatcggaaaatagagataattttacttgtttctttccaatctgggtgccttttatttcttgcccaatttccctggatagaatctccagtatgatattgactacaaaggtgagagtagacatccttgtcttatttttgatcttgggggaaaaacattcattctttcatcattaagtatgatgttagctgtgggtttttaatagatgctctttatcagtttgaggaagttctattgttgatttttaaatcatgaaaggttgctagattttgtcaactgtctttctgcatctattgagatgggtcaagtggtttttatcctttattctattaacatagtgtattgtgttaattgattttacaatgtaaaaccaaccttacatttctggacaattcccagttgaaaatggtgtataattctttttacatgttactggattccattgactagtattttgttgcttttacatccatagtcataagatatattggtatgtagttttttgtgtgatatgtttgtctggtttttctatcagggtaacattggcttctagaatgaattgggaaatgtgtactatttttctgtattttggaagagtttgagaggattcatagaaattctttaaatgtttgttagaattcaccagcaaagtcgcttgggctattctttatgagagctttttttttttattagacggagtctcactctgtcaccaggctagagtgcagtagcgtgatctcggctcactgcaacctctgtctcccgggttcaagcaattctcctgcctcagcctcccaagtagctgggactacagccgcgcaccaccacaccgagctaatttttgtatttttagtagagacagggcttcaccatgttggccaggatggtctcgatctgttgacctagtgatctgcccgcctcggccacccaaagtgctgggattacaggcgagaaattttaaattactaatttaatctctttacttgttataggtgttttcggattttctatttcttcttgagttagttttggtagtttgtatctttctaggaatgtgtccatttcatctaagttatctaactggttgtttttagtattccctgataattcttttttatttttgtaaggtcagtaataatgtccctctttcatttctgattttagtaattagtctgttttcttttgttggtcagtctagctaaaactgtctattttgttgatcttttcaaagaaccmaatttggttacactgatttttttctctctcccacttctcactctctatttcctttatttctgctctaatttttattgtttctctctcttgctctctctctctctttttttttttttttttgagatagggtcttgttctgttgcccaggctggagtgcagtggtgcaatcatggctcactgcatcctcracctcccaggctcaagtgatcctcccacttcagcctcctgagtagctgggactgcaggtgcacaccaccatcgctgctaatttaaatttttttttttttttttttttagagatggggtctcactatgttgcccaggctggtctcaaactcctgggctcaggtgatcctcctgctttagtcttccaaggtgctgagattataggcatgagccaccatgcctggcctattgtttctttctttcttcttgctctgggttgagtttgattttcttttcttctgttttcaaggtggaagtttagttattgatttgagatttttcttccttttttaacattgatatttacagctaaatatttccctttaagcactattttagctctatcccataagttttggtatgttatatcttcattttcattcattcttttaaaaatattttctatctctttattgataatatttgttggatgagacattgtcaacataccttcctttaattctttaagcatggtgtcgtttagttctttgaacatatttataacaggggctttgaagtctttgttaagtccaacatctgggctcctcaaaggcatgttctattgcctgattttccccctttttgtttttgggtcacacttttctatgtctttgcaaatctcataatttttgttgaaaattatgcatttcagataaattttatagattctgaatattaatcaccctctcatctggggcccgttatttgcttttttttttatttctttagtgacttggctggaacagattattgaaatccatttccctcatagtgtaatgttgctccttagagagtgaagccttggccatgcacatagtccctctgatgagctgagattactggagttttagcagggttctctttaattatattttctctggtcccctgttaarcttctttctggtctgactttmtcggtaacatatccagctgttagctaccaataactgctagctggttgctctattttttttttgtaacaatgtctggggcataaattgctccatcacctgattcagctagtcaggtccctttgctggggcggtctttgaggcttgcttcgagcccaggagggctctgcttagctgtctctttccctggttctctgttaaacttctagctggtctaccattttatttgttgctagtagtttaatggagctaagagactcctcctaattgtttaccaccaaaatctccagtttttgacagcacacttaggcatgaacttcctcacattttcctctaagtacagtaagtccttttattttattttattttattttattctattttattttattttagacaatgtcttgctctgttgctcaggctggagtgcagtggcacgaccttggttcactgcaacctctgtctcccggtttcaagcgattctcttggatcagcctcccgagtagctgggattacaggtgtgtgccaccatgcctggctaattttgtatttttagtggagatgggattttgccatgttagccaggctggtctcgaactcctgacctcaggtgatccacccccgctggcctcccaaagtgctgggattacaggcatgagccaccgcacccagctcagtaaktcctttttgaaagagtctctgagctctctattcttatggccttctctccccctggacagaatctctgccactacatcagagtcggggggacaaggaatgtggtccacttcttctgaaatgatacacctgccttgctccacaagtggagccttggatttggatggtagcccctagtctttctagcctgcgcctcctggcataaaacctatgagtgagctggtgtggaggtaattgagacaattttctgagccttctgtgcctaggaatagcttctgccatacaagtggggactgggttttggaaggaaaccccagttgagttccctgcctcaacttctgaatagtaaaagagcttctgaatagtaatggaaggtgaagtatgctgaaagaaaagagatgagagaccagttagggggctcttgtagaagttcaagagagatttgaggttgctttggatttgaggttggattaacactgtagcggtagaaatggtgagaagtggtctgattcagggtatattttggaagttgagctcacaggatttgctgatggatagaatgtagaaggtgagagaaaagatcaaagatgactattcccccaagccattcctttaatcatacttggccattatgagagtggagaaagaaaacaagccagaaactttcttcttggagatttggctaaaaaccaggttgtaaagcaatcagtcagcaagtatttgccaagtgcttgcaggtggcaatcgattagttcataagcttcaccctgtgaacacatgtgttaccggaaaggggtcctgatccagaccctaagatagtattcttggacctcacgcaagaaagaattcagggtgagtccatagagcaaagtgaaagctagtttattaagaaagtaaaggaacaaaagaatggctactccgtaggcagaagagcggcatgggctgcttgactgagtatacttatagttatttcttgatcatatgctaaacaaggggtggattattcatgagtgtttcgggaaaggggcaggcaattcctggaactgagggttcctcttccctttagaccatatagagcaacttccaggtgttgccatggcatttgtcagctgtcatgatgctggttggagtgtcttctagcatgctaatacattataattcatgtataatgagcagtgaggatgaccagaggccactttcatcaccatcttggttttggtggattttggcgtgcttctttactacatcctgttttatcagcagagtctttatgacctgtatcttgtgctgacctcctatcacatcctgtgactaggaatgcctaacctcctgggaatgcagccccataggtcttagccttattttgtccagcccctattcaagatggagtcactctggttcaaacacctctgacccatgcagctcttcagaaaaccagccataattttcagcctgtcttgccacaatattattattaaaaatacaagtcaacttcagttttcgaatctctgctttgcccaccccctcacctgctaccttactcgacccagcacttctgagctgttggctttaagattcagcttcccttatttctctcaaagaggaaacttttaaatggtggctctgtcttatctggatctgtaaggatgtcactgtgtttctcagagtaaaagcttctgttattggctgaatatgctttttttccccctaaatactatataaaggatgagccctttacatataatgcagatagaatcaaggtcttcattcattaaacagacatttattgagtgcctactatgtgccaggtactatgctaggcattgattataccgcagcaaataagacagtcttttccctcagagagttcaaagaacatgcaaattgaatggttttataacagtgtggtaaatgctgtgattatagaaatcacacagcagtggcttcccacagggagttgggaggcaaggcaggcaagactttcagagatgttgaaacttggaggatcaaaaatattagccagagaagttaggagtgggacaaagtagggtactccaggtaggagaaatagcatgatataaaatccagaggaaggtgtgtatgtggtaacttgatagatctacaaatatgagatgggtagaaagtagagtccaagaaggagggataagagagggagacaagggtcagataatgaatgcagctttctaaatgacattaagcaatttagactttctgaatttttaagacagtgtagatactggattgatgttggcagtttggaggcaggatgacagacagtggttcagggaagaggtgatggtggcaggaacaaggcagggaggaggaggttgaggaaaaagagaagcagatgaacttaaatgctgaccaggtagaatcaacagttcttggtgaatgactgggggaagaagtcaagggcaaaatccaggttttggatttggcaacaagttgaaaggtgggaaagagacccaggaaggatgaggatgcttggcatggtctagtctggaggagggggaaaatcatgaatgcagtgtttggacactgaatctgagggtcttctgagatgtcaaatcagtgataggatatacagatctggaactcagagaagcctgagctggggatatacatttgcaagtcatccacatacaagtggtgttcaaaatcgtgggcaggggtgagattgtctaaaaggaaagcctacagtgaaaaagaagaggctgttctatgcctgagccttgaggaactccaatttttaatagctatgcagaagagaatcttctataaaacactgagaagtgtccagagaaatggaagaaaaattgggatacagtgttttaaggagaaaatggtcaataaggttaattgttgccgagcgttcaggtgaaatgagaattggaaaatatctgttggagtgagtgggcaccatggaatttaatttttattgttttctggagctggttcaggggacagtagggagcaaaatccagattggagtgggttgaggaggaaatggaaggtagaaaataaggcccatgaatgtagacaacgctttagggcagtttggtcgtgaaagtgaagagagagaggctagtagctgtatcaggatataggaacgagggggatttttttcaagaaggaagatcattaggttaaaaaagccaaagagaaggatttagtggaagagaagttcagcaaagaagaagtgaatattaaaaatgtacagttcttgagaaggtgggagaggatggaatgcaaagccgtgatggtgggactggccgccaacagcatatggaacatctgtaccatgtgatagaagaggaaagacgggctatgaagggaatttatacgtttggcattggagagttaagaagttgctgtctgttaacttttttttccccactaggaaggaggagaagaaatgtggtcggaagatgaggaatgaggtggtccataaagtgaggtaggtgattataaattacatgtgaagtaaacttccctagcgtgtgggtctctgtatttaacctctgccttccaggttcatgcgattcccctgcctcagcctcccgaatagctgggactacaggtgcgtgccaccatgcccagctaatttttgtatttttagtagagacagggtttcaccatgttggccaggatggtctcaatctcttgaccttgtgatctgcctgccttggcctcccaaagtgctgggattacaggcatgagccaccacacccagccactctactcctttcttaatataactccagttaaattcaacataatcaagtttttcaagtttatttgcatccagattgctttgtgtgtgttgcatctgtaaaggcctcatagcttggtttatgatgcatcataaaagaacagggggccttttttccttttaacatgtttccatcttcagcacttagacatcgaaatccatactgatttagggcagagcaagagctaaccctgaaakgtgcctcsttttttttttttttttgaaatagagtcttgctctctccttcaggctagagtgcagtggcgcgatctccactcactgcaacctccgcctcccgggttcaagcgattctcctgcctcagtctcctgagtagctgggattacagatgcctgccaccatgcccagctaatttttgtatttttagtagagttggagtttcatcatgttggccaggctggtcttgaactcctgacctcaagtgatccacccatttcagcctcccaaagtgctgagattacaggtatgagccactgtgctggcctgtacctcgttcttcatgaagagcagcatcatgtgcttactgcatgtgttttaatgaaatgtacgtttctgtcattaaaacacaaacaataaactagcctccttattgcccttttaggtccataagaagcccgcttgaaaactggtcatggggtgggcacagtggctcaagcttgtaatcccagcactttggagggctgaagcaggaggatcacttgagctcaggagttcgagaccagcctgggcaacatagggagactcccccatctctacaaaaaagtaaaaaaaaaaaaagaaaactagccaggaaagcagggccaatgcccatcccacacggttaggttgagggttggggatggggagaggacactagtcgtagttacttgtattgttattattattttttttattattgagagagagtcgcctgctgtcayccaggctggagtgcagtggtgcgatctcagctcactgcaamctctgcttcccagtttcaagcgattctcctgcctcagcctcccgaatagctgggattacaggtgcctgccaccatgcccggctaatttttgtatttttagtatagacggaatttcaccatgttggccaggctggtctctgatcttaagtgtttcacccgtctcagcctcccaaagtgctgggattacaggcgtgagtcaccatacctggccacttgtattatttttttactactacaactaactgacattgtcataggtctttacagtttgaaaattgctctcctatgtgtgatttgcttaatcacaattaattattgttgagcaaggaacatagttgggggtttgacagatgaaaagatatgtcgagaaaaaaagagaggggctggggaaggagctgaaaaaattagggacagtggattaaatcatacattctcaagggaagtgaccatggagtggtaaaagttggttcttgggcagggggcaagaacccttagatattacaatggtttgtagtccttcaaagggctacaatacataaacaaatcgacagtatatttgttttgttttgttttgtattgagacagggtctcactctgttgcccaggctggaatgcagtgacacaatcacggatcactgcagcctcgacctcccaggctcaagagatcctccctcctcggtctcctgagtagctgggactacagtgtgcactaacactgctagctaatttttgtattttttttgtagagacagggtttcaccatgttgcccaggctggtcttgaactcctgagctcaagcgacccacctgcctcagccttccaaagtgctgggattataggcgtgagccaaagctgggcccaacagtatatttgtgatattaaaattttgtatgggggtggcgattaggtggcgattaggaaaacaatgtctacaaggctcgctggagtagtggttggggatgataatgaggaaaaaaaataaaaaaaggttgagaaacactgatctcaatcttgcagtgcctacagagctttttggcattcgtgaatggtgtctctgtttccagtcacacatgtttgtccagcacatttgcttcaggcttcattcatcctgcccgttttacccgaggccctaaatgatcatgttttgcctctttaaaccctttcctcttctggccacaggtgcctgaattagggtggacatgagccatgactagttaaggcacagcgagtgactggtcccaggaaggctggctgcacctcacttcctctcctgagtcttttcttggttcacctcgtgtgacgcagctctgtagttttgtaacagctactctaccaactatccttttgagatggttactaatggagtgggtatcaaaaagccctggttatatctccccagtcaggacatttgggctggtggcacatgcgtttgaatgaggttggatgagatgaaagggaaatccatttgagtcatcagctctttatccttatccctggttggtgtagagtgggggttttcaacagctgcacgattgacattttggaccaaataattctttgttataggaaactgtcctgtgctttgtaggatgttatttaacagcatcccaggcccctacatggtagatgccagtaacactgaatcccccgctctccagttgtgacaatcaaaaatgtctacagataaatagataaaattattgtcaattaaaaataaaatatagttgggcatggtggctcacacctgtaatcccagcactttgggagagtgaggagggtggatcgcttgaggacaggagttcgagaccagcctggccaatatggtgagaccccgtctctactaaaaatacaaaaactagccaggcatggtggtgcgcacctgtagtcccagcaactcaggaggctgaggcaggggaattgcttgaacctgagaggcggaggttgcagtgaggtgagatcacatcactgcattccagcctgggtgacagagtgagactccatctcaaaaataaataataataataataataataataataataataataataatamtactaaaataaaaaaagtctccagacattgtcaagtgttccctgtgggacaaaattgcctccagttgagaaccactcatgtagagaacctagaagatcaggaagtataaatctcatcatttcagcatgatcagaaatgccatagaagggttcagatcagaaatgggagaaaagcattgtaatcatgatattcacagctaatgctgagtgagtgctcgctaaggacgttccacacactgactcattagcccttccagtaactccaaggagtcgtcctgctgtttccacccactctatacttgagggatttaagacatggggatgttgaggaacttgcctgaggtcacgtagctggtaatagtggagtcacccaggcagcccggttccagtgccccagcgctcgggagtgcataacctctctgtcttaccgtcacggttctacttccttatcctccagggggcgcacgcagcacagtaccaagcacacaataggttctcattagactcattgattctgtccatactgacattggcatctactggggcactctgcccctagatctctgcatggcaacctcctttacttggaggtggtctctgctgcaatcccacgttctctgcgaagaagtctcctattgcctctgtagaatagcaccctccttcactgccaagccccttccccttatttttctttatagtacttagcatctgacatatattttttgttctcttgcccccaacagactaaaatgtctgttgtatgaaaggagaggctttgcctgttgtgtttgctgctgtatccacagcacctagaacattcctaggcatatagtagatgcccattaagtgtgtggaaaaaatgaatacatcccttagccaagtgctatattcaaatttccttactctggttattggttactacttttcctcatcactgcattgaaaaaaacaaaacaaaacaaaaaacacaaaaaaacctttctctgaatgaccaggcacctttatccagaagtggggcataacccttgacacaaggggcaatggattggggatcctcgactaatgcctgtcagaggtttattgttaactggactaggtcacttacagagtttatttttaattttgctttgtcagtctgtgaaagtaattcaacagtgtcatgataatgtacatagttaatgaagttaatttatatttagcttgggtctaaatcacataataaattataaatgatattttgagaaacatattatggacaattcaatggcagatttttgcataaaaattaacagaagttgattctatctttctccataaccactattcataagttgaaaaaatgtagttttaatgaaaatgtattaaaaacttagcaactgctctcattctatagaaaatgaagccacggctgggcacagtggctcatgcctgtaatcccagcattttgggaggacaaggcaggcagatcacctgaggtcaggagttcaagaccagtctgaccaacatggcgaaagcccgtctgtactaaaacatacaaaaattagccgggcgtagtggcagacgcgtgtaatctcagctactcgagaggctgaggcagggggaattgcttgagcccaggaggcagaagttgcagtgagcagagatcgtgccacaggactctagtctgggtgacagagtgagaacgcatctcaacaaacaaacaaacaaacaaacaaaaaaacaaataaaatggagccacatagtaactatagatagaaaagtagttaagttactgttggcacccttttgcctcaaacacattcccttctcaccatccagataattatttataaagtttgagacctccaccccccgactcccagttgcaaacataggacttggagcagttgcctagtttggcattttgtaaagaaatctattgctgtattgcaattaggcaattcaggctgttatggttacattagacttgagagaagctcattccctaaaccctaaaaatcagctttgagaaatatgatcaattcacccctaatctaggtttaaactcatgcacagaccctatgcagctagacaggctaaggtggaaagaaacacctttctgttgctgggggttggggatggaacagatgcctctgaattaggaaggatgtcttgcagaacaccatcctctatgcttgtcaccagttctcatgtccccaaatgcctcatatctcaattgagtgttgccattctcaccactgaatcccagctccagcctcctgaacacttcaacaagagactgtgccattgttcactgcagccttgttcaacactgggtcaggcttttaagattatatagcattttttttttttttaagacagagtcttgctctgtcacccaggctggagtgcagaggcactgtctcggctcactgcaacctctgcctcccgggttgaagcaattctcctgcctctgccttccgagtagctgggattacaggtgtgcaccaccacacccggctaatttttgtatttttagtagagacatggcttgtccatgttggccaggctggtctcagattcctgacttcaagtgatctgcccaccttggcctcccaaagtgctgggattacaggcatgagccaccacacccagcctatatagcatgattttatattatgcactctatgctatataaaaatgccatgatattatatattctttaaactttttggcctaggaggatggggctgaattagggattagatgatacacatataaaaatgaatttagaccagaattgtccaatcaaacttttgcaatggtggacattatatctatgctgtccaatacagtagccactagcctcacgcagctattgggtccttgaaatgtggctagtgtgactgaggagctaaaaatttattaaattttaattaacttaaatctaaacaactactggtggctagtggctactctatcagagagcacagatattttcttcaagggtgtggctcttagattctggacctcattggatatctcagacttggaatgcaggaaatttaaagctgttctaaagtggatcttgaataagactctgagacttctgtgtggctagtctcttttcttgtatcaggatggggtgatttttttggagaaggacaagcaggcatcacacagggatggctcataaagaggttgctaactttaaaacaatccagacagacactggactttcagaagggaaatcagaggtggttgagtctaccactgtctgttccctcaatggccctcttcactctgttcacactgtcatctgctgttctggtcttattttcaatgctgggaaattttactctgacactgtttaggaggtaaacatttgccttgtagaggcaagcatttgcctgggagatcctaggctcttaggagtttttaaagatttggacattagaataaattagcttctttgaagccaaatataaattaacttcaacagaccgagctaggaaaagtagctactcaagtatctcaggcagtggagaagctcaatcactactcggccgaatggagtgcgagagttctgacctgacatccaggaagctttatgaagctcgtcaaaaggtggaaacaaaaagaaagagaaaatgacacaatctctcagacttggacaaagtgaaacatttaaaagtcaggactcagaggtccatggaattccagacatatagggagcttctttctattctttccaacccaaggacagcaccagtggcaagagcaagtggcatacatactctgcatttgtggaagaatcacctttcttagagcaagaaggcgaacagtgttgctgcctggtgcaaggtgcgctagtgccaggctagccatggaagagtcaccagaactccagcccccatactgggggattctgattctagcagatttgtggtagtgcctggcaatctgcattttttaacaggtgaaattctattgtaaaactagatctgggggctcctgccgagatcgggagtaacaacttttcttattaggagaagtggccaggaggagctaaatagcaccagtcatactagaactgaggtcctctggctgagggatcagagtaaaagaactctcttcccagaccctagggtgacacatatggcgttatcacaacttatacctcacacaagaaagaaagggcttagctgctaattgtctattttccaccaattcttaagagggtatagacttagttcatcatctgaaaccaaatattatcttagcaattttctgtataaatgggtgatagataatagcaaaggtgttttaaaaaaccaataaagatgattacatctattcttagcttaggatcccataaaaatgaacatttactgctaataattaagaagcataaaaagggacattctaaacagaaccttatttgggaattttagtattaacagatggcagcttcacaggtcaaagtcttctatgtgatgggaaaatgcagaggggaagtgatattcaaatgcagcccaggcaccctgtgaacttaagagcttgctcttttgtgcagagattttgtttcatatttctgattaccgatagctgtgatggtcaagctcataagtaggcatccaaccttgttcccacttccttccttgaatccactgggaactccaagggctcagaatttgcatctctgtggaaaatgctggtgagctctttggtgaaagatccattccccattgggcaagatgtggacagggaggtttatggatcaattccactgatactgtgtcgtgcttaataggcctccaggccacaaagtctctgaagtctgcccagacaggaagatcaagaaaagaagaagagcaataccctgtttcactggtgggatgtgctgctcacataaggttccccagtctgttttctagacacaagcatggacacaaaagtccttctgcttgagcacgtgtggacacaactcacactcagtgtgatacccacagacatgtagttaaggctcagagatgtaggcaaggctcagaagcattcagagaaagtgactgaggctgacaccaggtggcagcaaagccttctcaaccctcttagtggatttgctcagggacagtccaggtagacagaagatccagcaacaggtttctctgttcttgttcagatctgacktggcggtagcccagcaaattcatggcatcgccacaggctttctgaagtcgagaaaccttttcatagggcaaagaccagcgccaagcctgggagacattaagggcatccctggcatttgtgtggaaagcgtggtcacccatgcccttgcctcgggtgatgttatgcacccaggtctgaagatggggcaagaattccaatcccacgaattcatacattcgggaagtctgggccacaggggctcgagccaggtcctcatagcgcacaagcaggtagcgttcctgcagggccttgggcaaggactggatggtcttgtagatctccagctggctttggcagatgacctgcatcacatagtagggttggtcctccttcttgagtttttgctcatgctgccccatcacaatgcgactgtcaatcatgagatctccctttgtgcgttctcgggaacggaacacggcccgggggtcccggaccaggtgcacgatatgcaggttgagggaggggtctttcagcagcgggtagagggactgcaggttgaagaagcgcacctccttgagcaccacgtggctgtaggagcggcaggccttctccaccacctcaaagggctgttgactgcacaggagcctgcagtgagcccgggggatgatttcatcttgtgggatgatgtcacaggcaggtgcagaacacagggcccggctgttctcccactgaaagaggctggactgtctccggggaccaggttccatgtaggcatcaaagacgctcatgtcgcacaagaagacggcccgtatcagatcccgcacagccatgtgcagcatccaggcggtgctctgcttgaaggtcatccacacgtgccaggcgggctccatcaggtagaaaacatctgggtgctgcccaaaaagctgccccacaaaagaagagccagagcgccaggaagacagaaccagcacgtgcatgcgctcgggctgtgccttcatagacagggagctgatgttgtggctgtacatgtggaagaatagagccaagatggccatctgggaaaccagaaacagcaggagcttcatttttttaggcagtagcattgtgctgaagtggaagacctttaaggaacaaacagaaagggtggagttgggctgctgttttattgtttgccttctattccccttctggccaaagccacctgctctctgaccccctaccaaggagcaacatggaaagccagaggattcgtgccaacaatggcaccagtccttctccaaatcatttcctgtcccttacacttagtgtgttgatatgttctccttcagggtctttaattcctccttcctggtctttctaaaccaagccacgttgcccattggtttaccaaaaatatctgaactcaaccatatttaatcaacataaggaaatgtctccatcatggtgccctgatgacaaggatgtcttcagacaggccacccaggggaggcgtcacctcagtctgactcaagtcttggaggaatggcttgtgattcctgcagagacagagggagataagctacctagtgaagaactgcctcgaagccactgcttagccatccctccatcataagggagactgcaaccaagactgtgtctcatctccctccctcactgcagttaagcacaggactttccactccagtccctcaaaagatagggctgcaggctgtgcaactgcttggctttagttggaattgtctcctcaaaggcagagccaggtgctcatggtgcctgtcatctatttatctgctagctggtgttttgccatcagtgtagagtgaaaagtctacgtctagcacctgacctcacctgcccatttctcaccttgccctagatagcaaatccttctgatttggtgtcatcccatgggaccaaggccatggggagttgatccaatgtcgaccttgtatctgtgtaggtaataaactatctgaatctatttgagctgaattagagttatttgagctattagtgtctccttacctgccaactctaagaaagtgtggcaagccaacctaagtgctacagatctcagaactgtatcactctcactggggacacttgtggcccatgactcccacactgctgcttgaggcatacttgattacgtgggacaacctactcaaggcagctcagtgcagttgggcaagtgtgtatcacacaaccctagggagtgccatcccatcaagaatttagatatttattttcaaaatgttttttgtaggtgatagtaaagtatcttggtccaacaaartaagtatattaaggccaggtgcagtggctcatgcctgtaatcccagcactttgggagactgagctgggcagatcacttgaggtcaggaatttgagaccagcctggccaacatggcaaaaccctgtctctactaaaaatgcaaaaattagctgagtgtgttggcacacgcctatagtcccagctacttgggaggctgaggcaggggaatcgtctgaacctgggagacagaggttgtagtaagccgagatcgcgccactgcactccagcctgggtgaaaggctgagactccatctccaaaaaaacccacaaatataacaaaataaaacaaaaaataagtatattaagatggttttccagttgatagacagtaaatatctagagaaagggtctcactttgtgattcgtactgtctcatactgactgatggcaacattttgcaatcagggcttgcttcgtgtgaaaggaccacggttcccagtggtatgctagaatgttattccaaaggatattttaacctccttcccacatgactttgtcattctgggtgaccttctgacataaataactattgggagagagaatagctattgcacattgtaaaatattcatagtagtagtaaggtgttcatttgtatatcaccatgtacacaagaaattctcccttccagctttagtaaaaaatagaggctagatttccagatggtaagtggggctggatttgggggtcagctgtttttgtggtggcaggtcttataccaattatttaaaagtttttattatttatttatttatttttgcagagacaaggtcttgaaatgttgctcatggctgagcacagtggctcatgcctgtagtcccaacacttttggaggccgaggcgggtggatcatatgaggtcaggagtttgagaccagcctggccaacatggtgaatgcctgcctctgctaaaaatacaaaaattagctggacgtgttggctggtgcctgtaatcccagctaygtgggaggctgaggtaggagaatcacttgaatcagaaaggcagagattgcagtgagccgagattgtgccattgcactctagcctgggcaacaagagcaaaactccatctcaaaaaagaaaaaaaaaaaaaaaaaaagaaagaaatgttgcccagtcagatcttgaactcttggcctcaaacaatcttcctgcct

SEQ ID NO: 93808 - DNA, 257605 bp, Homo sapiens
  misc_feature (1)...(257605): n = A,T,C or G
gaaactcgacagaaatattatcaaaatagtgacagtgcttggtatatttggagtgaagttgtgagtgaacattcttccctgaataccctgtaccctgctctgtagttgtaaaatgttgagcagatgacttctacacggaaaagtttaaaggctcatcatgctacgatgagcatgtgacttttacaaggaaacatgcaggaggctggcatgatgtcatgtgatctgaatgaccctgcacctgcttcgagcctgctcctgctgctggaatgccagcttcttgaggacaatgtctttttctgttttgtttttcaccgtctcatccctggtgtctagaacagcgcatagcacagagaatgcattaaataaattaaatgcatgcgtgtatggaggttaagccacacagcgctgcctgggccagctggcttggggtcctgattgggctctgttcttcgctaggtatcctagaggctgtgtgaggttggtaaacttcttaattctacagcgttgctttccttatatgtaaaacagacatacataccttgtaagacctttgtgaggattagaaataggaaatgtaaacccctcacacacaattggttcctgaaaaatgataactgttactaagctgattaatgaggaaagtatccccataattcaacagctccctttctagatgaattctgggtgacgtcagagcttactaatggcaaaatacctctgcctaaagtgaccaggtctagccactcccaaagaggacaggaccctggattcctttcactgtgcacctagccaggctctgtctgcagacaattatcttgagtgagtcacttaacctcagtgtttttatatgcaatggagtaagtctgacccacccggcaggagtactgaagagcgatgattattagacgctagaaatgcactttacggctgcgcagtgctagacgcagacatgccgcagggcaccttctgaatctgctgtggacatgcatgagggatgctggctggaagcctctgataactatgaatccataagcaaattggttactgtcttaaacgaagtaacaatgtgatatttagtgctgtcctttttaaaaagctcgcaatatattgttgtctaataaaagtcttgggccgaatttccctcctgggagaacaagagctttgggccaagtggctgaccaggttgaagagggttggcagctgctgaggaattcatccatggtaggaggaggaaaatcgggcaggctctgctccccatctccctctctgctccttgcagactaggtgggcccaggatctccttaagccaggtaagtaggtctttaggaaactcgttattattattattttggcaaaggagcaaatacacggggcaatatttcaagggtgaagaagggcacacaagggagaggcatcctccctctcacctggtttcatgagtgtggcttttaacacaggtgacacaagtggccaatgtctttctgaacataggagagccaggccccgggcacagtgacaggtctgccatgcccatgcagcggtcggcatgctgatatgatctaaggtgagggcccagccaggtcagccgggagaaagtgaacacaggaagggcacacccaggaccccagggccccagaactcaggtgagcatgaagggagccagcagaggagactgggggtggtcagcgcagttgggagggaagagcaggaatgccacagatgccagggcaaggctcacttccaagaggcagccagtggtcaaccgtattggaaggtcagctgcaatcaggcctggggggctggcccttgaattaggatgccccatggggtgtgggcatgagaagcacaattcgagggcctggacaagagtggtccattggcatgcggggcagagatgggcagacttttaggacaaggtttgcagcaaggagagcagagaggggggaggaaaatggaggggcacaggctggaggcttccagagatctgagagaccgcagcatgcttgtgaactgccgacgtgacccaggagggggtggccttgggcggggacaggcacctcattccatgtagcagcatggaggatgtgcaggacagacaccagatgctggatgtgttgacttagtggcgtgatcacagtcagaatccaaatggagtcactggtattaaaaaccctgacatatagactgtggaagggcatgaagggagggttcttatgcagacatgcttgatagcaagaacaatcacaaaagactgcaaaaatcacagccgtgcacaaagaccatcacaacttacacacacaaacacttctgggaagacatctgcccagtagctgcctgtccagcctcagactggcaccatccttcctggagatccttgtagccaaggatcattgattcaaaacaatgatgtaatcctcctgtttcctttgaaaatctttgtcttcctttaccttccttgacccacacccaatttacgatggcacacatattctattgcaatgaatgttcccgagtaaatctcattttcttttagagagcctctctctgttatttagggtgacagtgggaaaatcccagactgcaaatccttcctcaacaaagggcaaacgtttcctccagggagcgtagttggtggttagagaaggggaaggctgcagtggcctcttggagtggtggagtgcacatgcgcagagccaggaggcctagtgctcarcgtgggtgtgcctgagacctgggagatgccaggggcatggaaataaggtgttgtctagtttttcccccaatttagttttctctaatttgggcgcaggttcactgtaagcaagtaaatcagtcctgggggccagctgggtgagtgctggggggcagggagaggggagggagtgggtacacaaagtgattctaccctcagagagaagcagagtaaggcaggaagaagaggtgtgcacatgcgtggtcatgtgtgcacgtgtgcatgttcgtgcatgcgcatgtgcagatgtgtgtgcgtgcaagtgcatgcgtgtgcatgtgtttctgtgtgggtgtgcacgtgtggcggtggctaacgaaggcatgggagcagcatgggttgtaggtttccatgaggtcccacggaagtgaaaccaaaggagaggaggtggtggggagggcaaggtgcctggattcggccttggtgtggtcattggtgatgagaacatccaggctatgcccagggccgtggatgcagaagtgggaggtccaggccgcacccccttgggttctggaggttctggtaatgagcacggaatataggaggcaggagaactgtgaggggctgaacctgtggtgggtgaggggtgcatgggaaagaggaggtggctgcctggaggaagggcagaggccaacgtccaggcatggcaggagctggctggcgaggagaggaggaggggggagcagggagggcacaaggggtgggggacgctgcctcagccgggtgtgagggcacagcctgcggggagaagtgaggaggcaatgtcccttctcagaaagcacgttccagggatcagtgacacccccacatttggtttctactaagggtacccttggcatgtgctgattttgttaaaaagaaaaataagcgactacatcagtcagcttcagctgctgtagcgaaatatcacaggctgggaggctgaaacaagacttttacttctcacagttctgggggctggaaatccaagatcaagttccagcagcgttggatttctggtgcagggtttgtggctggctggggtgaagcttcccactgtgcactcacactgccacttcttttgcacatgtaagggtggggacagcactgagccctttctattaaacactagccctattgcacgacttaacattaaacaccagccctactgcacgacttaacattaattacccccgctagcccacctccgaatacagtcacattggaggttagggcttcaacccatgaatttgcggggtggggtggggtggggcgggcggaattcagtctgtagcaggcacctactgactaaagtagacattggtttatacatcaaatggattttgctggagtcctgctcagcggtggccgtaaggaggaaccctgggggtgttaacacaagccagtgatgcggcctcagcacaggcctggggcccgagcctgcagcaccattcctgccgccccgccctggcagcaggtgtcttcctagaacagaacaagccccttttgatgtcattgggcattgccttggcggtttactcagaagctggaggctagcctcgctagagcccattgccaggccctgaccgcccctaaatctgtgtccacaaaatcctccggagtgcctgctccgcatggtggccactggccacacagggctgctgagcactggaagcggccttgtgagctgctgccaagaggcaggtgcccgtgcaaagccttcctgtgaaggaatctcactgaggttgttaaattctggttacatgttgaatgatgtatctatctattgggttaagtaaaacgtattgttaactttggctattacttgttacctttaaaaaatgtagctactggaagctttaagatgacaaatgtggttctcctcctccatctacaggcatgtcccggttcacggcggctgtgtccccgcggcctcagacccagggtccagcccatgctctggcccctccggcggccaggatcagcatcgctgccccggggcccgcgccgagccggctgctcctccgtgctctgcgctcctgggcccgcaccagccccctcccctggagcccccttcgtccctgcgagggttccctgcacgccccgcgctgagacccagcctggcccgggccggagccctccgcgacgtcaggatgcgcctggcctcacgccgcctcccctccgtcttctctgggccgcagccgctcctcgtgagtgaggtcgcggccagggagccgggtggacgcgccgggaagctgcacggtccacgctccgtctgcgcggagagccgggcgcgcgtggcccggcccctgcaggcgcgactgccgccgccccggtgggctcccctcccccgcacgcccggcacgcggctggacgactgcggccgcgcgggggctggaacatcccctcagagccgcaagagagcgcacccgccgccggcgcccggaacccagggcccctttaagaggcgccgccggagcagggccgtgacgtcatagaagtgcgaagggcggagtctgtgcgcagccgcggcgcggggggcggggcgggggcgcggcgttcttgcgggcctgactgacaggagcgccctccgggagcgaccagtactaggccgccggtcgcaagagcgccccgcgtaggccccgccccgaaaggaggccccgccccggggcaggccccgcctccacaaggacaccaagtcccgcacaagccacgccccccgcaggccccgccccactctgttcagatctaggcccaactcaggctccgcacctcaaggctccgcccccagcaaggctccgccccaggcccggctccaccccgcacaggccccaccccgagtcaggctccgccccgcccaggccccgccccgggctcggctccgcggggcnnnnnnnnnnnnnnnnnnnnnnnnnnnnnnnnnnnnnnnnnnnnnnnnnnnnnnnnnnnnnnnnnnnnnnnnnnnnnnnnnnnnnnnnnnnnnnnnnnnnnnnnnnnnnnnnnnnnnnnnnnnnnnnnnnnnnnnnnnnnnnnnnnnnnnnnnnnnnnnnnnnnnnnnnnnnnnnnnnnnnnnnnnnnnnnnnnnnnnnnnnnnnnnnnnnnnnnnnnnnnnnnnnnnnnnnnnnnnnnnnnnnnnnnnnnnnnnnnnnnnnnnnnnnnnnnnnnnnnnnnnnnnnnnnnnnnnnnnnnnnnnnnnnnnnnnnnnnnnnnnnnnnnnnnnnnnnnnnnnnnnnnnnnnnnnnnnnnnnnnnngcgccgcccgggcaccatggcggggaaggcggccgccccgggcaccgcggtgctgctggtcacggccaacgtgggctcgctcttcgacgacgtaagtcccccgtgccggcggcaggccccaagcccggaacccccgaccctgaccccggggtcccgaactgcaagccttggaccctggaccgtgaacctccagacccagaggccccagactctgatccctgtacccgggaccccagactcctgtcctgattcccaagtctgggagcccagacccctgtcttgatccccaagcccgagacctgaagacctgggccctgaatccccgaaccccatcctccagactccagcagctgaccgttgaccctgggaccctgcctctgaactcctgtctgcaaatcctgacctcgaaactccaatattaaaaccctgtcagaacccctgttaacagttcctggaacccaaaccccagaaaccgggtctgtgcgcaccaaacccagccccagccctgatttccgaatcctcagaaccctggccctggaatgcccatccccaaccctggccctgaaccccaggtccatggtcactggaaccacaaatcctgactgcagaactctggttacagaacctgctctcaaacgtctgtctctggtccctgagccctggaccccaaaccctgaaacataaccacaaaccctaacccaggaacttctgacacagggctgtggccccaacctcctgtccctgttccccaatcactgaattctagccctagaatcccagccttcatactgtggccctttgcctctaaagccaatctagcctgactctgaaccctgaatttcaacctcaggccccagcttatggccctgaacacttgtccttgacccctgaacctggaaccctggttccagaatcaggccccaaacccaattctggaccctgcccctaactctggttcctagatcccatccttggccccttcctccaacaagctcctgcccctgaatcctgaatcctgaatcctggtcttaaagcmtgggccttgagcctgcagaattcccaaaccctaacccttgactcccacccctggcccctgtcctctgagcctaggccctccactctggctgtcagccccagctcctggatgcctgggtgccggcctcactgtctgtctgtccctgcagggccagagggtagggtgcccccatttaaccctgccacttagtatctctttagttcgtaaataagggaagtctgtaaagcactgtaggactttatatttcttgtttattgaagaaaaagatgctgagaagctcttcagggccagaaaggggatgctgactgcctatggcctttaccttctagggcccctcccacccaagcctcattcccacccaggatcccagggtgcccccatctctggagagaccagggagctgaggcccagggcgcactgggagctccccagaggcaggccggtctgacctagtttggcgtttcagccacggtgccaccctgctgttggtactcctgctgccaacccaaataaagcagagtgaggctccaagtggcccagatggaggccgtggagccacggacgctccctccctccctccctccctccctaggtgaacagtggggcaccgcaccagctttatgacggatgtgtgccactgatgcacgcgtggtttccatttcaggaggaggtcttgtgtctttgctggcagcaagcatgggtgaagtgtttgatgaagctcagttcatgcacaggctaggtttggtttttattaacaaaaggcgctgtttttctgtttttcttattttaacttccaggtgcccatgtattatactgacctgctggggaggaactggttttcctcacactttattattaacaacttcatctaggtttatgtttgatcattttctacaaaagtgcctggcatgggtgtgtgtctgtatatttggcgttctattctaggctttccagtaacatgtcactatagcatggttttgttcagatgattcagatccgttagctgcggcttcaaagcctcagaaatgtcaggagcattaagcttgctggggcattttagtctcaaagggaaacgagttttactgtgcagacattctttccagtaatctttgattctgagttctagcatttttgttgtgtttcaattgtatacacgtatttatctctgttgatattaaattgggtaacttaattcacttttgtttagcaacctattctctctgaattttcatttttcttaaaggctatgtggaattttgcattatgtttatgtttagaaggaacatttgtttaggtcaacagtacataggttaattctgaaaggtgcattgtgatttcagggctgagtggaaacttatctgtccgtgtctgaagatttcttaatgtgtgcagctcagtccccgggggccagacccagtctccttcagtggaaaccagccaggcactcacattcccaggcccccttccttggttgaggtttggggtgtggtacttgtgggccagaagcctggccggtggaaggaaattcatgagtgaaggaagttttggtttcttggtttgtcctggatttcaggggacctgctttgagattctgtttgcctttgtgcagcccgtcccgtgctgacgaacgcaccctgcaggcagtgctcaggctgtgaaggaatctttctcgcccagtctcaccgtgttggaagccaagctcgtctgtgaccagtgctggagmcggtcacagttccgaggaggaagrtgtttgaatctgaagcagatatcccggactgtggcggactctgttttccttttgtgcacaagtgataggtggtttgcttttgcttttgcagttttgaaagtctcccctcttaaggcccctcctcctccccctcttgtttttgttttagacagggtctcattctgtcgcccaggctagagtgctgtagtggtgcggtcacaactcactgcagcctcgaccgccctgactcaggtgaacctcagcatcctaagtagctgggaccacaggcacaygccaccatgcctagctaatttttgtagagaccaggtttcgccgtgttgtccgggctggtctggaactcctgggcccaagcaatccacctgcctcggcttcccaaagtgctgggattacaggtgtgagccactgtccctggtccagaggtcacccctctcaaaacgctgcgtgcatccacttcagctgtggtttgtagcatcctgggatccacacggaatctcactcagcagcccctgtttgctcatcactactccatctttgtgaccccagattggccatgctgcgggctgcggggctgtccccactggggttgtgtctgaccctgtgcagacagtgttgcggtaaatgccttacagtgtaccggtccccaagcccttatccctcactttcctagaaattatggaggacccgaaagagttcttgtttatgttggttataactaccaatatttctcatattgggagctgagactgcatgagaatacatagctcactgcactagctggcagagcgattacatcatcccacatcacaggcaccccctcaggtgttggccgttcttccctaggagacagtgagaatggaaagaggagtcattttgtagtattatggaaatagtgttgacctagtcaacctgtgaaaaggcctcctcagcccagtcctccctccccatactgtcatgggcacccctgtctctggccaggtggctggggtgcctgggactttcccaggcttatgcagactgccagatcaccctcggtgagccctgcagctggtctttaattcctggattggactcctgctgtcactactggtttgcttggaaagaggtgaccaggggtccatatttaattgttttgctttgatgtggctggttttttgacaagtgaggtttctggcttttggttccttccatttttatgagaagggaattgaggaggtgaattcttgccagctgtggcgtcccacccttgcatggtcaggctgctgtttggtcctgagaacacagcccgctggcgggtatctgcctggtggcccttcctgctgcttgttcgcagctaagtcagttctgagccagtttgcctttttgcttagtcagctcccgggcagccctgtccctctgcccagacccgggtttgcagaacggctgtgagagtgggctcggcaagtgctcgctggcagggacctgagcaccttgcagtcagcaggtgttgaagagccctggaagagcgtggaggtggcggagctgctgtgggtatggagtcggtgatggtcagtggtgcaggctggcgtctctctctggtagcatcagcattgccttctttgccatgtggttcctggcaacaccaaaggtactgccctctctcccaccttgaaaactctgaactccatgtttcctccagccactgcggggcatcctgactctctaccgtggcagccctcgagtggggtgggggggtctcccctccatgtccttctccaggcctctgccccagcactcctgcacagcagggcccagggctgggtgcgggttgtacccagctggcagtgactagccagaatttttgctccctctgtggatcctccttcttcttcagggacgtttcacttggtaatggctgtgctgggacagaattcgcacaccatgcccctcacccatttctttttccttttcttttttgttttcacacagggtctcattctgtcacccaggctggagtgcggtggctcactgtagccttgaactcctgggctgaagtgagctgaagccatcctcctgcctcagccttctaagtagctgggaccacaggtgcacgctaccacacccagctgatttttttatttttattttttgtagagatggggtcttgctgtgttgcccagactgggctcaaactcctgggctcaagcagtgctctcatctctgtctcccggagtgttggaatcacaggtgtgggccctcacacccagccctttctcccatatgaggtgtacaattcactggttttcagtatgttcacagggtgtgcagctgtcaccacaggcaattgtagaacatttttatcacctcaaaaagaagctgcattagcacccaagccccacgtcccccagcctccccaccccctgcagtcagttttcctctctgtggatttgcctgtcccgggcgtttcacatacatgggatcagacggtctgccctttgacctgactgctttcactgagcgtatgtaaaagtgtccatgctgcagcgtgcgtcagtcctgcatttcttcctttctttcttttttcttttaaattacagagacggggtcttgctgttcacccagactggaatgcaatggtgtgatcgcagctcactgtagccttgacctcctggcttcaagtgatcctcctgccttagcctcctgaataacggggactacaggcatgcaccactatgcccagctaattctttttactttttgagaagatgaggtctcactatgctgcctaggctagtctcaaagtcctggcttcaagtgatcccctggccttggcctcccaaagtgctgggcttacaggcatgagccacagtgccaagtctctttattcctgtttatggctgaataatattccattgtgtggatacaccaagttttgtttctgtgttcatcagctggtggatgtttggcctgttccctccttccggttctggtgaacagtggatgtttggcctattcccacctttaagttcgggtgaacagtggatgtttgggctgttcccgccttccggttctggtgaacagtgctgctgtgtgcatctttgcaggcgtccctaggcggacatgcgttctcagtgctgttgggtgtgcatagtcttggcattgctgggtgacgtggtgagttcgtatttaacccttgagggcctgtcaggcagtccatggtggctgccccatgtcacatccctcccagggttctggtttctgcacctctcagtgttggcgcccctgggctcaggctggccacccttctcccttcctgggacctcatctagacgcacagccataagtgccatctctgtgtgggtgcccactcccagcgagaagcgcacaaccaggatgctagcctgcagtaggtggggccctgctctgccgctccggccagagcagagtgccagctctcaaggaggttggggcgtcctcatttcggaggcagctgtcttcctacctgtgtgccgggcacagaggatgggggcggcctgtggtctgcaggtgccctccctgccccggtgcggcaatgggcgtggctggaggtgtctcagcagtctttttttttgggttgctgtctctgacccaagatctcggtgcactttccctgggagaattatgacctgtttgccagggctcataagcggcaggatcgtctgtctgccgggcagggagggttaaatatgactgtggtcccggccctggctgcagggtacgggagctgcttctgccacctcaggaaaccacgtctaaatcttgaacacctccttaccttagacagcatcatttcgggtcggtccttgatttttagacttttggaataagcctggcagttctccgtttgccagctctgcatgcccctctccctccggccctggcatttgggacgcagcaggctgtgctctttggattgttactgattcagcctttgagaacggccggcggtgttctctctgctcacaaactttcatyccccgtttacttcctgtttttttatcagtctctagagttgctgaggagagagtttagatcacccgggttaggggtgggggtggtgggacttctttggtttgaaatattaacgattcctcatgttttgaagtaagcacccagatcgacctgtcgggcagtgttgggagaatgtctgcacgtaggcgtggtcacgtccgtccctgttgcctgcgctgctccgagaagccccactctgaccagcaccactgaggagtgtctgtccgtgtggagttgtggggcaggtggagcagggcagagggccccgcacggctctgggatggctgtgctcggtgggggtctgattttgggggaagaggctggtactggggtgtttccgtggacttgttgggtctgattcagaagttacagaaatccagacccaggcctgccccaccgtgaagcatcaaatttagagcccctctgtccaggggctagaggggcattcggaagactttgaccagatcggggcggctgagggggctgcctacggcaggagacggcaggtctctctgagctgtggggctcacggagggacagcctccaggaaggtggcctccatccgggaatggggtccaggcggaggagggtgggcatctctccacatgccactctgtgccccactgcccctgccggggtgttcccgctgtctcctgggcgggtccttctgatgtgagtgcactccagtgaaatacctgtgggggccttaggggaagagggtgcggaacaggcaggctgttcccatgcggacctgaaagtgctgtcaagttcccccttcctttgctcggtttcattaattgggatacttgggaatctcagagcccggtgggaaccaggaactgagctcagaggctctggagccccaagtcgcaccccaccaggtctggttggtgctgccatgggctcagatctggcgttttccaagctccccctgctttgtggagctctgagcgctggctccaggccggctttcaggaaggccgactgcctcaatcgtggttgctgcctccgctcggcctgaggtgatgagagtgtggatggcacctgcactgtgtccactctttaggctctaatgttcatggtgtgtttggagacgtggaagtggctctggaggagcgtccaccaggtcctgcttgtgtacgggggccggcagcaccgttgtgttgggatgagtggccgaggcgtctggggacgtcctggagcctgcagcccttggccgtgtcacgccatgtgctcatgtgaccgaggacgcttccgaggatgtggaagccaccagtcgtcctgggtgggttggggctggacaccacttctggggcaggtctagggtgatggcgctcccagcccgcgggggtcttggcgttggcgcagaagtggtttcccagcggcgtgccctgagtgttgggaaaaggccctctgctgccgctccaggttcagaagatgccgcttctggtttttccccgttgtgagtgagaacagccccacctccaggagcatggcctccggatcagcctgttacttgaaccctgagcccctggtgggtctcggtgaccttgagccggttgtcttcttgatccttctctccgacaggagtgtgagactcctcttcaggggttgctggggaccagctggttgctgtgtcggggggccgtgctcccccttctctcttggaaggtgtaagggcttagtagggctgcctcggctgctggggcagctttccccggccccttccccgcctccttcccactctggattgtcctgggcgtctctgtgtggggtctcctggctcctgcagatctgtgtagcctgcactgaactgcccctcttcctgggtgcactgcataccccgggccccctgggctctggcctgtccccttgtccccacctgaccgcccagccactgttctccctggcccttccctctcgtttctgcctgggcctgcctggctggtcttgcctggccctgcttttggtcctgtaggcaccaggactgcactctggcaggggcagactctgtttcctgctcagcagagcccaggcctggccctggttagcaggctgtgtcatctgccgcagacagccttcctttctgcgtcctcccctctcggggtcccgcatgactggtcctcattccaggaaccagaggagattgaagaacccgagacttggctttggcccaagtccctgtggagaggaaatcccgccttcagtgccaggtgccaggccacagtccaggttcacgtggatgcggggcaggccccacctctcctcgcatgtgcggccttgggctgtgtttcacctgtcagcctgtctgtgcccagggagtaggaatcccaccttgcatggtggctcagggtggtcagggagggcgtggctgtcacatggtttctggactgtcagcctttgggctgagtgaggcgttactgccatcaggggtccctggaggggctctctccatcctcttcctggcgtcaggtgttctcggcggcctctcggtaacagcctggcctttgcttctgtccggggcrcgtggcccaggctgagcagtgcactcggctgcctaggtggtgtgaggttctgtgagcccgggcccagstgccgtggtgaatataaccgggagggagtgcccgcctctgcccacctgcctggcatctggggttcccgggaggccgggcacctgcaccctcgccgtcgccctgggctgacctcccatctcctccttctctacccaagcgcccgtggcctgaacaggacttggtttttcaggccttcatgcctcagcttgaggggctcttttttcaaagggttcctccgggacgcctcgcctaggcaagcagggttttcctccttcacgggacagcccgcgtgcccccagccctgtgacgcgctcttggtgactcaccaagtgagtcccaagctcccttcctgtcatactgtgctttaccgtgactgtggcgtcacactcaggtgtgctggcctttggcagcagcgtctggggtggggaccatggtgtcttttttaatttttttttttttaagatggacactccatcacccaggctggagtacaatggcgtgatctcacctcactgcgacctccgcctcccaggttcaagcagttctcctgcctcagcccccttagtagctgggattacaggcgtgcaccaccacacccggctaaattttttttgtatttttagtagagacagggtttcaccgtattggccaggctggtcttgaactcctgaccttgtgatctgcccgcattataggtgtgagccatcgtgcccggccatggtgtctttattcgggttctgctcaaatgggtggaggggtggggtggggccaatgcagctggaagggagttggaggagctgtggatccggtagtccccggaccgtggtggtgtttgcggccacatatgccatgctcaggaggtcagtggggccaggggaaggggtgttgaagtcaccaaaggccaggccaggcctctgctgcccgttgccggtggcccgggagtcgactctgcttctgcctcgcacccggcctgggggtgttccgagatctggttggcttttgtgtttgcgcgtttaacagtgttatttacccgggatttgaatagcatgcagttcacccaatgtgagtgtatggttcactgactttgagaaaatatttatggtgtgtaaccatcaccgcaccccagttttgagacacttccctcctcagtccctgctcccggccctgggccacaactgctttctgtcccgccagtttcgcctgcgccgagggcactgtatcgtgaaccacaggctgtgttgttttcatgcgtctggtttctttgacttagcataacgcagcgtttcaaggtttgtattgatatgctttgcatatcagcagtttatctggctttttttttttttttttttttttgagatagggtctcacttccacctaggctggagtgcggtggcgcagtcaccactcaccgaagcctcaaactcctggactcaagcattcttcctgcttcagcctcctgagtagctggggccacaggcgcggccaccatgccaggcttttacaattttttgtaggtatggggtctcgctatgttgcccaggctggtctcgaattcctggcctcaagtgatcctcccaccttggcctcccaargtgctgggatgacaggtgtgagccactgcgcctgggcttgtcttccctgtttcatggctgagcagtgtcccctgagtggaggcatacctcgtttctccagtcgcccacagatggacgtcggggctatcgtggctagtgtactgtttgtgaatatgcacgtgcctgtgtggacgagggtgtcactgctctagggctggccgagtggtcactctgtggctgtctttccgggagctgctcaattcttcccatagttgctgccccattcgtgccccgtcgagtggtgtggaaggactctagctcttctgcatcatgccagcacttggtggcatttgtctttttaattatggctgtgtggtggcatcttgcggtttaacttgcatttctggtcctacttccaaataataattccccacaaggatggttatcttgccgtgttggtaatggctttgacagctggatgacagacggtgttggcgggctgccctctgcccacccctccaggagggcctgtgggatgcgaggcctctgctacgaggctcccgcttgcctggcaggtggcaggtgtgatgagcatggggagtgcaggtgaagcaggagcagacaggtgcgtgtcctggagctctgcagctgcagggcgggagccggggcttccgtgaggctctgtgacacaggtcggggccacccagcccagcctgggttcctgcagcccccactctctgcccctggtctgaatggtggggttggtgtgtctctgttacaggattggtgtgacgtctgagtcactgtgccttagagtacggagtcagcctcaaattattaaccaggcattaggggatggggtcagcctcgagttactaaccgggcattaggggatggggtcagcctcgagttactaaccgggcattaggggatggggtcagcctcgagttactaaccgggcattaggggatggggtcagcctcgagttactaaccgggcattaggggatggggtcagcctcgagttactaaccgggcattaggggatggggtcagcctcgagttactaaccgggcattaggggatggggtcaggctcgagttactaaccaggcagtagaagatggggtcagtcttgagttattagtatttatcggggagagcagagagagcttaggagaccacattgccactgtttagggtcagagtggtcccgcaggttaattcacttcacccagcctctcagggatgtaatgaggctgctcggggggctgtctcaggcctctggccagtagtccctgtcctctccagcgaccgctctctcctgggtgtcagtggtttttgggagtccaggtgcaggtctcagcagcaactctgaggttctgcatagctagtgccacctgtgacactgctgtcactccaaggtgcacctcaccacacctggagcagcgcccgtgagaggagggaagcgacacccttgggctgagcttttccgtgaaccggcagctgtgtcccttgacgtgctgagagggcctggctgtgagccgcatggtacgaaccttctgaatgcaagtggccaagccggcattctggctgggctcgctggccacaggacgtccactgtaggacagctgggagtgggggtgtctggctatttcactattaaaacaagtggaaacactagtttggtcccgcctgacctcatggaagacggtggaggtggcagccgccagagtgtgaggggccatggtcgctgacctcgcctcctgttgtcttagatccttggcactgcaggggcggttctgccagacatagctgttgtctctttggccaccaactggcccctatggcgtttggccttcagggtggtcattgggtgcgtggctctctagggtggacctggccatccttgggtgacagtgggccatgtggtggggactctgcaggccacctggaaaggggtccacctgaaaggggctgcactgtggtccatttgggccagtggcttcagtagccacacgctgcttggtccaggttcctgcctgagcccactgagcagatgatggggatgaggcccagagtgcgagcctggtgggcagctgtggagccttatccctgagcaccctcccttgcctacctttcaggcttctgagcggctgtcagttgccacctgctggcactgtgaatgttagactgcagagctgagtggggagccccttcctgtggtccctggcactctgaccacatggatgagcctgcgagtgtgaagctgagaactgggttgactgcctgctgctttgtttcttgcaaagagtgccttagttaggggacaggccagcccaccgtcatctgcctgcagcgtccctccaggtggtcgggggacaccgggcttctgggtcagcaagtgtttgccatacgcctgggtgcaaagtggaccagccactgtgggtcatgtggggggatttgggtgggactctcagaggagctggttctcttgagaaagacatctgtccaagtagcacacagacttgtggggacatatgacttgctttaattttctccatcaccgttacggtttttcagagctgttgcaacttcctgtttgctgtaacggctgtgcctccctcgctgctgcagtgggcagtgtgtgcgtcgtacacaggtggaaggtggaggcctgggcccaggctggagggacgtggggtgggaatgggcctgaccagctagggaacagaggcaggacccagggggacagaggcaggactgaccaagactgtcagaagagccagccggggtcttctctgaatagtcggctgcacgattaaactgggttctgctcggggagtccctggggtttggagctctgcctgccttgcggcccaacctggcagtaccccccacacaggggtccaggtgtcctctgattctgctgtgctgagtctgttggtggagcaggaggcccaaggaccaggagagcttctgtgtgaggctgtgtcctcctgcatccttgtctcccattcactcgggagcatttatgggcgcattctcagagccttggtgaagttggagtgggatagggagggaggattggtggcgccttctcagagccttggtggcatattgagtgggatagggagggaggattggtgaatgccttctcagagccttggtggcatattgagtgggatagggagggaggattggtgaatgccttctcagagccttggtggcatattgagtgggatagggagggaggattggtgaacgccttctcagagccttggtggcatattgagtgggatagggagggaggactggtgaacacctcctcagagccttggtggcatattgagtgggatagggagggaggattggtgaacgccttctcagagccttggtggcatattgagtaggatagggagggaggattggtgaatgccttctcagagccttggtggcatattgagtgggatagggagggaggattggtgaacgccttctcagagccttggtggaatattgagtaggatagggagggaggattggtgaatgccttctcagagccttggtggcatattgagtgggataggaagggaggattggtgaacaccttctcagagccttggtggaatattgagtaggatagggagggaggattggtgaacgccttctcagagccttggtggcatattgggtaggatagggagggaggattggtgaacgccttctcagagccttgggggaatattgggtaggatagggagggaggactggtgaacgccttctcagagccttggtggcatattgagtaggacagggagggaggactggtgaacgccttctcagagccttggtggcatattgggtaggatagggagggaggattggtgaacgccttctcagagccttggtggaatattgggtaggatagggagggaggattggtgaacgccttctcagagccttggtgtggaatattgggtaggatagggagggaggattggtgaacgccttctcagagccttggtggaatattgagtaggacagggagggaggactggtgaacgccttctcagagccttggtggaatattgggtaggatagggagggaggattggtgaacgccttctcagagccttggtggcatattgggtaggatagggagggaggattggtgaacgccttctcagagccttggtggaatattgggtaggatagggagggaggattggtgaacgccttctcagagccttggtggaatattgggtaggatagggagggaggattggtgaacgccttctcagagccttggtggcatattgagtgggatagggagggaggactggtgaacgccttctcagagccttggtggaatattgagtaggawagggagggaggactggtgaacgccttctcagagccttggtggaatattgagtaggatagggagggaggactggtgaacaccttctcagagccttggtgtggaatattgagtgggatagggagggaggattggtgaacgccttctcagagccttgatgtggaatattgagtgggatagggagggaggattggtgaatgccttctcagagccttggtgtggaatattgagtaggatagggagggaggattggtgaatgccttctcagagccttggtgtggaatattgagtgggatagggagggaggattggtgaacgccttctcagagccttggtgtggaatattgagtaggatagggagggaggattggtgaacgccttctcagagccttggtggaatattgggtaggatagggagggaggattggtgaatgccttctcagagccttggtggcatattgggtaggatagggagggaggattggtgaacgccttctcagagccttggtggaatattgggtaggatagggagggaggattggtgaacaccttctcagagccttggtggaatattgagtgggatagggagagaggattggtgaacgccttctcagagccttggtggcatattgagtaggacagggagggaggactggtgaacaccttctcagagccttggtggaatattgagtgggatagggagggaggattcgagggcgcctcctcagagccttggttaaatatttattcagataggaagtatttggaatatctgttgtcactttcagggcctcactagcctgttgtgctcacagggcaaaggggtagtgtactgtgctgcctggctccacggctgtggtcaccggcttccctggcttctgagctccagcaggagatgagggatttgtccagtggctggagggtggcttagggcacgcagagtccacagtgcaggtggacaccgcagagggtctcctgggcaagtggcggggctgggttctgagggcttcagaggatcagagccaactggagaataaggaaggggcagctgttcaggctactgagaggcgggaaataggtgctgagcctgcctgggaagctgcgtggttggtgcggttgatgtgggtggcatgggtgttgtgggttgtggttggcgtggttggtgtgggtggcatgggtagcatggtccatgtgggtggcatgattagcactgatgtgggtagcgtggttggtccatgtgggtagtataggtggcgtggtattgtgtgtggcatgattgctgtggttggtgtgatcaatgtgggtggcgtggtattgtgtgtggcatgattggtgtgggtggcgtcgttggcactgatgtgggtagcgtggttggtccctgtgggtagtatgggtggcgtggtattgtgtgtggcatgatcggtgtgggtggtgtgatcaatgtgggtggtgtggttggcattgatgtgggtagcatgggtggtatgggtggcatggtgtgggtggcatggttggtgtgggtggcatgggtagcatggtccatgtgggtggcatgattggcactgatgtgggtagcgtggttggtccctgtgggtagtatgggtggcatggtattgtgtgtggcatgattggtatgggtggcgtggttggcattgatgtgggtagcatgggcagtgtgggtggcatggctgctgtgggtgacataggtggtgtggctggcgtggttagtgggtggcatagatggcatggtggggtgggggggtgtggatggcaagcggcaggaccaggtgctgcaggctgggtggtgatatgtgatggtgctcaggcccctgttccttcaccgtgctggggaagggcgctcctgatccctctgtgagaccagtgagaagatgtcgtaggagaggctgttgtcccctgagtacgttcaccccattttacaggcgctggcccagtggagctgctggggcctatctgtttttttgaacttctgataagttgcctggccggaaggggaagaaggggggcttgggctggggcgtggccacgctgggaggatgaggagcttgaagtgactcaggggacctggcgccgttggtgtgtgctcacaaagtgcacggggtgaccaggagcctctggacagtggggccgtcctgactcgcctcctgagagccgtgggtcacaaactcaaatgcacacacttggggcttctatcctatcagggagagagttcaagtgtatcctagcgtcttggagaaaaatggtctatgaactttgataaccttgacaattttagtttagttttcgtgcagagtgacccagacaggcacaacactgacacaccttgtcacactctgcagggtgttttgttgccctcagcacgtgtggtctgcacagacagaccagggggtgacttcagcgttttatggcagctgctgcattaggaatctgcgtcacagatgaaaaacacgcgtttccccttttcgtaagaggatgaacagcctctcacctgctggaattcaccttggctcagcgcttggtgcttttgatggagaaaattcagttccagacttgggtggaacctgagttggggtctgccgtgccctggtgtctcggggggctgcccggcccctgaagtggaggagccgccttcacccaggcatctgtcccagcctgtgggctcccttccttgtgcagatgcctggcccagcccccgtgctgaagttgccagatgtataggtcctccttgatggcacgctccgggggctgtcactatgccacctgtgtcctcctgtggctttgtcctgcaggcattgtgaggtcatgcagcattttaactgctgtgaaatttgctccaccgagtgaacacaccagaatgcatccacagacccacagtggacactgaggctgtttcctgttcggctgtcacatgggctgatgcggcgagccctctccgtgcacctccacggggaccagggccagaatatctgggcacctgttggggctggtggaagctgctctccagtgtgccaagtttctgtacacacatgcacatcacacacttgcacaccacaggcacacacatgcatgtacaagcatgcactacacaggtgcatatgtacacaccatacacatgcacaacatacatatacatacatgcataccacataggcacacacatgtgcatcacacacatgctcatcacacactcccaccaggccgtcggagagtccctgatattccacatccttgacaacttttgttgtggtcaggctttaaaatgtgacctattagatgtgtaaaatggcatctgttataatttaatttgcattgccttggttacttgtattatcattttggggattttttttttttggttttctatgattttgattttagaactttggagcccttgcagatcttgtatttaggttgctgataagttatttgatgaggcagtgactgtagggtttgtggaatagacacttctgtcattgtgctccctgatgctgagtgacttaggcttgtgacttctcaggacggtgtttactgatgggtgtagagaggtcactttctgtggcactcttggctgaaagttttcttcctgagtctcattgtacgcacatgttgtggcctttgtgtgtgtgtttcttttgtatgctgtgacaccggtttggtaggtctgagtggagatttggtcagttccgcctaaaggccgacgggcccggctttctggggagaaggttttcccttgcagaggggtatcctttggtgtctgttgccgctgtgaccgactgtctcacatgagggatggagtccaggctgaggcaccctcgcccggggccactgtgactcccatggagcctgggatttgttccggttaggccacgggtcacagtgctcagtgccgggcagatgtgggctcctgcagcagtgccctcctgcagcacgcgggcacctggcctgtgccacacctgcgcagtgtcaccgtgctgcagaggagcccccatgcagagtcacgaggggggtttccccaactgcttaatgccaacaagagacctgcgtagaaatcagaagaaaatggccgctctcagctgctggttcagctgctcatttttgtgtagggccgagtcaattttttcttcttgcctcttttctgagttgatgttgatgccagcaagtgcagagggtcattgagtgctggtttgaacctggtgcctatggaattgatgtctgtcagacttagggtgtaaccacaggttgtgaggtcattttgaggggtcagaccatatttgggttaaaaggggcccgagtgtctcgggctgcagggaggtgagtcctggaggtacttaccatagttttctgttgaatgcctctgggcctgggcrgggagggccatagcctaaagtgtgcatcttaccctgggtctctgttcagagtgtggcagccacggcttatggcgggagtgacgccaggctggacagagccaggtgaggccctgtgctccctcagtctgtcccgcgtgcccgcctcctgctgcgagaattctagtccctgtcttcccagtggacctgggggctggactgtggtcattttcactgttgaaagtgagaagattctcacccatgaaaaattaaattgctgtagaacctaaacatggccaccgtgtcttcttaactggtagtaaaagccacctggctgtccaggtggaggctccgcagggcaggtcagagtacctggaggtgtcagcagggaaggggcgctctgtgtcctgatagccttcccgccagctgcgcatgtgatggggtgtgccaagggccacgcagagccgcgacttccccaagctgctccgggtgtccccggcccacgcgctgagcacgctctggggctctcccccccggcccacgctctcctgagaggccactcgctccggggctaatcatggttaatcccacatgatcctcgcctgacatccagtccccctcctcaggccctgacagctgcatggtgtgttggtatttctgcctcctgaagccacgtccacgtcggctcctgtgcagtagagaccggagtctccatcaggctccctctgggggcgggtggtccatatgcatggggtccacttgtccctcatgtccagtctcctgtggctggaagagctccaggtgtggagagaggccagctgcagctgccgatgaggagcgctgttggaggagcccttcctccttctccctggagctgggggacgctccaggtagggaggcggtagccttggcagcattgggctcagtgctagcctagcctcgctgccatcgcatgcagttgaccagcttcttgacatcctttgcctaaactcctcagggtcagcgtgggaccaggatattccatgtggcttttgaagccggcagtcgccttgcagtggtgattcccaggtggaaccctcaggcagctgtgcgctgcagcctccggggccatgggtgtgtggctctgggagctgccgttccctccacaccccttagggaagtcctctgctcacggtgcccaccctggtcgagcccagccagctggagccttcctcccagacccatcggcctcctcgggacagtccagccccgtcctctggcccatgccctctctgtccccgcctcctgcccagccagcttcctgagggtccctgagcttgcccggctggccactcactgcctcatggtccttgatcacacacagacgtggtggtgtgctcgcctctggaggaaggctgcccgccgctcggggccgtcggtggcttcggagctgtggcagctctcttagggccagctccatcccctctccccggccctgctgagtgaagcgcacacgtggtaaatctgccccatcagtggggggttagtcctgtcatttggggaagcctgtgttggctgcatttattgttgtcgatattacttttaattaggacaaaattcaggcaccataaaacctacagttcagtgttttagcgtgttcacaaggtcgtgtgaccttcgcccctgatttcagaatgtttttatcacctctgaaagaaacccagtacccatttgatgacaccctcctttccccccttccgccaaccacgaagccacttctgtctctgtggattgacctggatgtttcatgcaaatggaatcaaacagcgtgtggccttcgcatcgtacttcacgtgctcagcacgtgtgttccagggacctcacttactcagcacgtgtgttccagggacctcagttactcagcacgtgtgttccagggacctcagttactcagcacgtgtgttccagggactccatttactcagcacgtgtgttccagggacctcagttacttagcatgtgtgttccagggactccacttactcagcacgtgtgttctgggctcacctgtgcttcttccttatgactgaatgctgtttattgtgcggagatcacatttcatgtatctgttcatcagtggatggacatgagtgtccatgtgcaagttgctgtgtgaacctgtgtctccagctctctcgggtgtagacctgcttgtggggttgctgtgtgaacatgtgtctccagctctcttgggtgtagacctgcttgtggagttgctgtgtgaacatgtgtctccagctctttcgggtgtagacctgcttgtggaattgctgggtcacgatgtgtcttcagctctcttgggtgtagacctgcttgtggagttgctgtgtgaacatgtgtctccagctctcttgggtgtagacctgcttgtggagttgctgtgtgaacctgtgtctgcagctgtctcgggtgtagacctgcttgtggaattgctgggtcacgatgtgtcttcagctctcttgggtgtagacctgcttgtggagttgctgggtcacgtgataattctgactttttaaggaactgccagactctttccacagcagctgcagcatttttcgttcttgtgagcagtgtctgagggctgcagacttccaacatcacagaacagtactcgtgattgtccatcttttttactgtaaccgtcctggtgggtgtgcagtggtatctcctggtggctttgaattgcatttccctgatgagtaatcatgttgagtgtctttcgtgtgcttactgggtatttgtagatctgctttgaagcaacgcttattcaaatccatggcacattttaatttttttttttaagagacagattctcgctctgttgctcaggccggagggcagtggtgygatgatagctcactgcagcctcctcttgggctcaaggtatcctcccacctcccaagcagcagtgtctcacgtagctgggactacaggtgtgtgtcagcatgcttggctaattttaaaaagttttagtttgtaaatacagggtcttgctatgctgtagtctggtatcaaactgtaggcctcaagcagtcctcctgccttggcctcccaaaatgctgggattataggtgtgaaccaccatgcccaggctttttttttttttaattgttgagtttaaagagatctttacatattctggatgctagacccttattagatagatatgtaatttacaaatgttttctcttgttctgtgtgttgtcttcgcttttttgatagtgtcgtttgaagcactttttttttttttttttttgagacagggtcttcccctgttgcccaggctggagttcatggagttcagtggtgtgatcgtggttcattgcaacctcgacctcctgggctccagtgatcctcccaccccagcctctggaatagcagggactacagacttgtatcaccacacctggctagttttttttaagttttgtgcttcagctatcataaccagaagccatttcctaatcaaggtcacaaaaatttacccttattttttctttttagatttttatagttttagctcttacatgtaggtctttgaaatattttgagttaatttttgtatctggtgtgaggtaggggtcttcattcttttgcatatccatatctggttgtctcggtaccatttttgaaaagactattcttcctcattgaattgtcttggcatccttgttggaagttaattgaccatgaatatatagatttatttttggactcttgattctgtttcattatctatgtgtctgtccttatgccagtaccacagacctgatcattgtagcattgaggtaggttttgaaatcagaaagtgagagttccaactttgttgtcttttattcaagattgttttgactattctggtgtccttccatttctgttttgattttaggattagtttgtcaatttccacacacacacacacacacacacacacacacacacacacacaaccctgctggaatttacacacaccaccctgctggaatctacacacacacaaccctggtggaattttgggggttgcgttggatctgtagatgcagttcttacttaataggggttggtcctggggaggggagcagatggcttggccctgtcctcaggggcatgtgatgtggctgggagatcccggcaagatgattttaaagcctcccttgtgggtttgtcagcttcagggttctagttatgatgggcaaactcatgtctgcagtttaagtaggaaaggaagtttaaaaacacaaaacatcaggtggtgcccaggaagggccgaagagccaggcttggcggcctcctgtgaagaggggtgcattcacctgcactgtgcaccgtgaggctcacctgcggcttctggggcctggcgtcctcctcctgctgcaccgccctcgcccagttggtgccaggcatgacctctgcacatcacaggtgtccagggcttgatacggctgggccaggcctggcacccagggaacctgggaggcaccttctgcgtggcccgctcgccacctctggcctgtctgctgcctgtctgcagcccttctggaagtgggcacagacctggcagtgttgtcaggaggtgggaggacacgtaggtgaacctgggcctgggggtggctccccccatgaggtgcgtagagttcctgtgaggagtgtgcacccagcagctcgtcgggtcacagcgaggtgcagcctcggctccctgcacacccgtcacacctctgcatgacaggcagagactgcgttctggatgtggctgccgcctgcggctcccagcacgtgaaacatggtgcgtgttgcacacacggcacgagtgtggccagtatgaactggagctggttttcttgaggtggagaaagccctgctggcttctctttccctcagagcccacggcactgtgaggagcggcatgcttccacggctcatctcgagggtgaattaaagtcaccccacgcccaggaccagaccttggctctgcaggcctgtggggatggatggcagctgcagaggcccctcgagagggacagagccttgagcttggagctctgtgaagtcgcaggctcggggcggtggtgccctccttcccctgctctggtatctcaggtcctgtctgctccctggtgcccccttccctgtatgctcttccctggccatgccggctgctctgcagagggcttcagggagggttgtggggagggcgcggggaggaggtgccctcatgggccagaactggcaggaggtgaggaggtgccatgcccccgcccaggcagagggactgcgaggtgctggaggagaccagatggggaggggctgggagagactgacattctgttcagattccaggctgtggagctgggccctggagcagccacacttggcggctgtgagttggcctcagggtcctgctgagtgccaggtccctgcacaccctcacagtccctgggggctggctgtggcattggcattgctgagggtcttggccaatctgttagggaagtggggtctccggggccgagctctgctctggggtgtggatagcacagcgtctgccgggtgctgcgggagccttttctgtggggatgtgggtcctgcaaatgtgagcaccagctgtgattaaatcaaggacagtgaacagcagcgccgtcatcttcatgagttcacaaaaacctattgctttatgtcttattaggtgaatttagaatgtatacagggtaggaaaagcagcagaaaatagcaggtgtgtttgggaagatcatcattactgcctgttacactgaataacttcaaaatcaaaagggttcctctctcaggactgctgctgaaaaacgaagtgcgagtgggtgtcctacagaaaaattaaaggaaagagagaaaggaaaggaaaggagagaaaggaaaggaaaggaaagaaaggaaagcacaccataagttcaccccgacaagcaaattggttgttggttttccttgcgcttgctggtgagacagccccgggggatttataactcgccttctcactgctttggtggtttgccgcctgtagtgggggccggttgccagggaggcgtattcacttccatggtggctcatgtccactctactctgagccctgagccctggcggctgagtcagggcagagcgggagcaaagtcgtcctggttcatacctgaaccgagaggcccggccgcggctgtggtctgcaaactcaccaagccatttcggcatcttttaaccacaaaggataggtgtgaggatgccttctcagttaggacagtttcagcagctggttcaggagcctgctgctgctcccctgggcttctcacctcacgattttttgtcctgctcgttgctgtcattgtctcggcttgtttggggaaatgtggcgtgcgcgttgtgggtatggccaccgccatcagtggggagaccatgattggtccctggggtgacacatgatcctggggagggaaggcgagggtcccaggggacctcttacggatcttatggaggagttggacttctccctccaccccgattcagggactgcgcttcttgaagagggttgtgagcacgtctctggtgggcttggaggccctgacctgctcaatgggtgagtgacaaatggtttttcatggtagccagggtctcccagagcccctggctgcctccctgggctgtgcggcccctcctcctcctcagagtcaccggcccagggctcagctcactgtgagtcggtggccgtgaaaatagcactggcaatggagggtcgtttccaacagttcagtgttattggagtagaagtttatataacaagagtgtattttaactggatgaaaatttactattaaaaataaacagaccttgccaaatggcagtgagtgcagggcagacgggagtgtgcagtgtgacttttgggtgcccaggccctgccagtggccgctgggcccagctcttgtttggagctcctggtggcagatgggctcttctatgaggtctgggagttctggtcagtgggatggcgtcacctggggctccttattcatgcagcacgtgtctgttgcatgcccccgtatgcctgggcctgtgctggccgtgagaattccacccatgggctctgggctgtgcttgggtcacctggtatgagcctctgccaccccgctccccacagcagcagtaccaacaccaacaagccattcacagcgctgctttacgacgtttgtgctgaatagagagtttggaatgtccctgcgtattttatagagtgagatggtacatatctaaagatttattttaattcttaaaaaaattttgttttgttttgttttcgagtcaaggtctcagctctgttgtccaggctggtgtgcatggcatggtcacggcttactgcagccttgaccttctgggcacaagggatcctcctgcctcagtctccctgagtgctgggattacaggcatgcaccaccacacctggccagttttaagtctgaccctaaacaactcaaggaataagccaaaggcttctctgaagcactttcatccagtcacttttaaccccatagtttgtggcaacacactccctgatgtgcacagtttgtaaggtatttggagtttatgggcccacctcaacacaaccttcccagatagctttggatttgtgtgtttagacagtggaacagatccaggccgaggcattaccttttggcccagatgtctaaaacaggcaagacaaaagccttcctgtgtgtgtgtatatatgtatgtgtgcgtatgtctgtatgcatgtgcatttgtgcatgtatgtcactgtgtgtgcatgtgtgtatgtgtgtatatgtatgtatatgtgtatgtgtgtatgtgggtctatgtgtgggtgtgtttgtgtgagtgcatgtgtatgtgaatgtgtgcctgagtttgtgtgtgtgtgtgtgtgtgtgcgccgttgtgtgtgggtctccgtgcatgtgtgtatgtgaatgcgtgtgagtatgtgtgtgtgggtctctgtgtatgcatgtatgtgtgcatgtgtgtatgtgaatgtgtgtgtgtgtttgtgtgtgccatttcctcctagttttgagtctctttgaattggaggcttgtgtgtggaggtaccttcagtggagtcttgcaggagtgaagaccactttgctcaatttcgtagcctggagcagtcgtagacaagagagccctgtggtcggtctcggggaggcgttgtagcctcaggagtgttctctgggtgtgactcacacctggccacatgtgtggtcgtccttggttctccaaggaaacctgtcaaacttaaaacagttttaagacattaatttgctcaacgatgttcaaatacttttgaaaaaattggtatgtatgcaaggtatgcatgatgaaactgactccagaagagagggagacactaaattgaccagttattaggaaaaaaattaaaaagattgatcgacttgtcaaagttgctgtcccaaaaaagctccagatgtaggtgtttccagagtggattctaccaaactgttgaggaacatccggccccagttccctttcaaccagccagcttatcagacagaaggaaaatgcagggatacggaggcccgacagaaggtggcaccgtgaaaacagctgtgcagttgtcttgctgttgcttgtgagtgaaaccatctcggcttaggacccaatagcaaataaactcgatccaatgtgttcatactagaaacgtaaggataagttcatgttccaaaaggttgagggatgtaattccctgttttcataagttaatagttcatcagtagaagaaaccttgttaggttatctcgatagatgctgaaaatgtatttgttaatattaaatgcctacttttgattgaaaaatgattattcttaataaaattaaaacatgtatttccataatataattttaaaacacagaatcaggcatttccactagtgtcagggacaagacaccccatgtaaccacagttgtgtaatatactttcagaagctctagctagtgaaattaacaatttaacaagagaaagaataatgtaaatattgaatactagaatggagagacgttacttgcaaatatgattgtgcatctggaaaacacaagagaatctattgaaaacctgtaatagtggtttatggagaaatagtaactgttgctaatcttgagctctgatctctcaggaggcacagggtattagtccggctcctgtaggctgcagtaacagaacccctcatggacggtggtgtcatttgccctggaatgtctggaggagggaggctcccgggtgggcaagcagctcagtgatgtcaccaggaaccagttcttcccctgtctccatccggccaccctcctgtgcaggtgacaccgtccttctcagatgccactgtcagattctcatcccacattctgcagaagcaggaaggaagcacgcaaaaatacccaaacaaccaaaacaaaataactctcttttacttgggcaacttttatttcatttattaattttttgagatgggggctcactatgttccccaagatggtcttgaactcctaggctcaagcacttctcccttctcggcctcccagaatgctgggattacaggtgtgagctgctgggcgcagccccttgggcaacttttaaaaacctttgtatggtgaataattttaggtttggttcctatgtttcccctgataggaacatcgtaaataaccatgcttcgtttgtcagagccaggatggtaacacgggacactactgttgaccaaactacaggctttatttgggttttaccagtttttccacccacctcccttttccgctccatgtaaacgtgtctgtggtgaagatgcggggctcggtctgatttccaaagctgcttttgcccctgtggcctgaagtccaacgattccagctttttattccaatatctggttatttaaaacatatttaatgttctctacatataaagcttattcagaaaagatttaatgtgaattatactgaattatatgctttcctttttgaatgatcatataacttagtgcttaattaccacatctggcaaaaaattaaaaaaaaatattggctgaggccgggcgcggtggctcacgcctgtaaccccagcactttaggaggccgaggcgggcggatcatgaggtcaagagatcaagaccatcctggccaacatagtgaaaccccgtctctactgaaaatacaaaaattagctgggtgtggtggtgcgtgcctgtagtcccagctactcaggaggctgaggcaggagaattgcttgaacctaggaggtggaggttacggtgagctgagatygagccactgctctccagcctggtgacagagcaagactccgtctcaaaaaaaaaaaaaaaaaaaaaaaattggctgaaacaccagacatttttcctggtgttcacctggtaccacctgtggaggacccggctaagggttcctatgtgtttctctggaagccatttccatgtgtatcgatagcgaagtttgttttaatatttcaaaagttgcccttaatggctccatgagataacagaattattaagctgccttcaattaaagcctcaagttttccatttgtaaattaagaatttttgtggcctgggcacagtggctcacgcctgtaatcccagctactgggattactgggaggctggtaattgggaggctgaggtgggtggatcacctgaggtcaggagcttgagaccagcctggccaatgtggtaaaaccccatctctactaaaaatacaaaaaaaaaaaaattagccatccgtggtgttgggcacccgtaatatcagccactcaggagactgagggwggagaatggcttgaacccaggaggtggaggttccagtgagccgagattgcactattgcattccagcctgggcgacaagagtgaaactctgtctcaaacaaaacaaaacaaaacacaaaaaagaatttttttgagacaattgaagcttagtgaataagtacagaaattgtattgtcaaaactatgtaagtttactacatatatttgcaaagagcaaggcaacatagatcacaatatgttcttaccggcattttttttttttttttttttttgagacggaatctcgctcggtcacccaggctggagtgcgatggcacgatctcggctcaccacaacctccgcctcttggattcgagcgattctcctgcctcagcctctcgagtagctgggattacaggcatgttccaccatgcctgtctaatttttgtatttttagtagagacagggtttctccatgttggtcttactggtattctttttttgaaattattttaaacattgagcatctgattaattctcaccatacagcagagagtgttaagttcttatactttctacatgtttttcttttggattgtcaattctttttggttaaaaataataaaaattttatctcacatggtttcttctgttaatatgaagctgacatggtcttgtaaatgtttctgcattttgcttgtttttttgttagtttgtttttggtttctttgagacagggtctcgccctgttgcataggctggagtgcagtggtgggatcaatgctcactgcagcctccacctccctcccaggctcaagggatcctcccaactcagccccctgagtagctgggtttacaggaatgtgccaccatgaccgcctaattttrtttattttttgtagagacggggtctcagtatgttgcccaggctggtctcgaactcctgagtgcaagcgattctctgcctcagcctcccaaagtgctgggattacaggcgtgagccacctcgctgggtccccactgttttttttaattaaatttttagtagagatggggtttcgccatattggccaggctggtctcgaactcctgacctcaggtgatccactcgcctcagcctcccaaagtgctgtgattacaggtgtgagccaccgcactgggcccccactgtttttttttaattgaatttttagtagagatggggtttcaccatattggccaggctggtctcaaactcctgacctcaggtgatccactcacctcggcctcccaaagtgctgggattacaggtgtgagccaccgcactgggcccccactgttttttttaaattgcatttttagtagagatggggtttcaccatattggccaggctggtctcgaactcctgacctcaggtgatccactcacctcagtctcccaaagtgctgagattacaggcgtgagccaccgcgctgggcccccactgttttttttaattgaatttttagtagagacggggtttcgccttattggccaggctggtctcaaactcctgacctcaggtgatccactcgcctcagcctcccaaagtgctgggattacaggtgtgagcctgcgctctgctgatattttcttgttggtgactgcacgtttgccttgagctgtgagctctcatagaaccagatgaccatttgggctcactgttaactgtagcccttctgtggatgccccgtgggcaccttcgtatccatcagtttcatctctggccctgggaagcgggaggagttcgggtggagctggagggttttccttccgacgaggtatgtggagtccctctgcgatcctgtctggggaggggagaaaggggtggcaaggcttctctagctgtcactgggtccttgaacccccgctggcctggtgctgctgctggtgctgaccacacacagactcatgggagaactgggcaacttggccactgaatcttcattgtgggtgtttgctttgaatatttcgttttcagctcttgtgtttctaagtaccaaaacacttttttttttttgtaagaattccagtgcaccaacaataaaaccaagggaccaactgagccatttggaagtggtggctggggacacccatacggtggtgacacttctgggtgactggctggtgctgggtgtttctgggctgccaggacagcaggaggtgggggtgttctgtgccagtgagcttcgtgctgcgatgtggatagagggccgtccttccggccgctgctgctctcaggtcgcctctcatcggcacagcggcgcatcacacggcagcagcctgcctggctctcctggtgggtgggggctgagggatgaaaacgaggcactccctccccaccacagcctactcccgtgggttcggggcgttggaacattctccaaacccctcctgctgcctggccaggtccagctgggcacagtgcacgcccacctgctgggccctcctcaccgtgggctccgccctgggccctttggacaccttccctggccctgacagcagctacctgggaatgcagcatgaggcaggtgccttttgctgaatgaggtgaacagcaagagggagaaaaggagagatcgcctagcaaagcagcgaggccagaggctcctgccgagcagaggaggagggccattggcgcaaggacacacccatccctcatcacactgctgggacctgcctaccctctctgctggcacgccgggctctgccacatgggcctgtctgggccttgtcctccccagctgcggggaagggcttctttcagttccctttgggtgaacacagaggcccagctcctgccgctgtgtgtggttctgggtcactcaggaccactgataatcaaaaccaccaactttggactacacagagctattaaggagcttagctaaatttaaaaaaagtgcagctgatatttatgtcctttatgtgccagatagtgctgtaaggatgtggtgtgtctctaggtatgtcagccctgacgtttgtgccgtaaggacccggagtgtctgcaggcagacctgtcatccccgcagccctgacgtgcgtgctgtaaggacctcgagtgtctgaagggagacctatcatctccacagccctgatgcctgtgctgtgttgctccattgcacagatggaaagacaggggctagcgagtgagcagccagtgtgaggccctgmggtagcaggtggagggggcagggtgtgaactgagctggggctggctctggcatctgagcttgttaacgaccgactgggctagaggcagagtgggccgcaccctgaccaccacctctgtcccccactgctgtgcccctctgtctcactgtttcctgtggtccctcctgactagaagagactcaggcctgctgagtagcatgcagcacaggacgagcctgcagagccctcttgggacttacacactggggatttgacagctcatgtctggcaccgmagatagtctaggaaaaggtgactcatccaagagcctggccggaaacccacagggtattggcccaggtgtgccgagaggctggccggagggaccattgtgatactcagaggaaaacgcctgtggcccatgggggggccttcagaagaatgtcggagtttctcagctggcaagatgcccctggtggcaagatgcccctggtggcaagatgcccctggtgtggggcccctcacctggaccagaggccttccctgagcttctgttttgcagggaggtgcctgagctgcacagcttgcctgggaggagtcgtggtttctgggggtggggcctttcgtagggctgtgctggtgctgtcctgggggagggggatgctgagcacgcccgcccggggctgctttccctgggagggatgctgaggctgcccagggctgctttccctgtgaagcagcgtgacccagggctcttggtggggatgtgccgtttgctctttttcatgtgtctagcccttgggaagtgtttttggtactgctggttctcatgctctagtcctggtaatgggctagtgtgcttgttctggctttactcggtagcgtttataacaggacaggattcagaggacactgttgctgagggaaagtttgtgccacttaacctggtgttgcttctggccctgcctctgctgggcgtctgtctgcagcgtgccttggagtgtttcccttgctctgctgattgctgaaatgcaagacctgggcctctggaatcccattgaaagaacttgtttaaagaaacatcagctcggtttatttcatacacagctactttttgtagatactgaggttttgttgagatgttggggtgtacgtgccgtgtgaggttttgttgagatgttggggtgtgcgtgccgtgtgaggttttgttgcgatgttggggtgtacgtgccgtgtgaggttttgttgagatgttggggtgtgtgtgctgtgtgaggttttgttgatgttgaggtgtgtgtgccgtgtgaggttttgttgagatgttggggtgtacgtgccgtgtgaggttttgttgagatgttggggtgtgcgtgccgtgtgaggttttgttgcgatgttggggtgtacgtgccgtgtgaggttttgttgagatgttggggtgtgtgtgctgtgtgaggttttgttgatgttgaggtgtgygtgccgtgtgaggttttgttgagatgttggggtgtgtgtgccgtgtgaggttttgttgcgatgttggggtgtrcgtgccgtgtgaggttttgttgagatgttggggtgtrcgtgccgtgggaggttttgttgagatgttggggtgtgcgtgccgtgggaggttttgttgagatgttggggtgtgcgtgccgtgggaggttttgttgagatgttggggtgtgcgtgccgtgggaggttttgttgagatgttggggtgtgcgtgccgtgggaggttttgttgagatgttggggtgtgcgtgccgtgggaggttttgttgagattttgggttgtacgtgccgtgggaggttttgttgagatgttgggatgtgcgtgccgtgtgaggttttgttgagatgttggggtgtgtgtcctgtgtgaggttttgttgagatgttggggtgtgtgtgccgtgtgaggttttgttgcgatgttgggtgtgtgtcctgtgtgaggttttgttgagatgttggggtgtacctgctgtgtgagggccggccttgtttctgtttactgatgcctcctgggcctcacacagggaggggtgaacagaggtcttagggagggtgtttttctcttttttttcttttttttttaattttgtattttattttattttattttattttattttattttattttattttttgtagagatggggtctcagtattttttttttttgagacagagtctcgctctgttgcccaggctggagtgcagtcgtgggatcttggctcactgcaacctctgcctcctgggttcaagccattttcctgcctcagcctctggagtagctggggggtgtttttcgttttaaaaggcctggaatgtggtttctgtgagagccttccggaagctctggggaggtgcttgtccttgttgctgggccttggggcgtgaggcagctggtaggcacggacttctggtggtaaggagctgtctagcctggaagcctgcagcccacctgacgatagaaacgcaaagcacacctcagcatatggtctgcggagtcctcccgggggctccggattcggggtgtccgtggaaaacacatgatgccaggtccacagggtgacaggtgacaggtgacccagccttcaggctccctgtccagccgctgggactctgttgaatgctgcattcttcctccgcaggctggcgtttgcaccggcctggacacatcgcaaccctgacctgtgtgctgaagggcggccgcctgatgtctgcctgcttttggcatttggacgacacctggtttctgcctgagggagggattggtcctcttacctgatgtgtagctcccagaaaggcttgtgcagaactgacatgtggctagcctgctcccagccccccgcagctcacagggtcaggatgggaggggagtacaggctgaggcaccaggcaccacaggggcctgcacgtcactgtcagtctggttaaacatcataaaattagtaaccaaaccgatctaaccacattcacaatcatttggaaactggtgaaaaggggaaagcaatgagcactatcctacttccctaacccaaccacaagcagcggagccagttatttcttggcttctctgtggaagtgcgtttatttgaaatccgtaaacagtgtttatcttggcgaggaggaatcctgcaccagcttagacaaggaactcctgacgcctcagcgcctggccctcaggacagcctttccccggttccctgtgtccctctggccgtgggctcccgcgtggtgtgtgcggcccagggccctggcagtggggagtgtgtggtcccctagtgacaccgcctgctctgtggctgttttctttctttatgattgtttgcttctcacactccctgccraaggacctgcttgatgccactgacatcgcggctcttgtggactgtggagctggtggctcccctctcctcctgaaccacgagtactttctggggaaatgatttcacccactgccccctgcccacatccctccaccacagatgccacctgacctgcagctacccactgggctgctgtagctccttggtgaccagactctgcccttccctgccagtgtgtgtgctgagcctctgagatcacggcccagccctgggccctccctgtgcaggtcaggctccaggttgaggccaggtgagggagccgtggtccggggctgtggctctgctcctctccagccctcttgccagaggtgggaggtgctggtgtgcccctcctgcccccaggacagcacttctctgtctgcttcctgaggctcacagcacagctcctgtctgcagggagaggagagtatggagaggttcagaatgcgggcttggacaggtgctgggtggcaccccgagcgggttttcctttcaggtgtggggctgcaggttctagtgggttctccacacagtcctggccctggatggaaagagggagagaatctagccttgggctctgggctgtggtggctccctgaggccttgcagctgggaggggtcctctgctcctgtccccagtgtgcgtcccccactgcatccaccctctctggggcctaaactgcacatgatatcattcattaccttttttcccaaccagctaacaggatgcaaacgagagtgttctaaatgatcttggaatacaaacttgcatatgttactttcaagcattaaatgtttaccttcttaaataaatggttgtcacctcattttaccttctgaattaagcagatctctgatgcacccagcgtcttgcctgtgctgaccggccacagaccctgggagagtccccagctgggatggggagccgagggtcgcacccagactcacaccccagaacccgggttttagagtgagactgacgagggccaccaggatgtgctctgccggtgtctgccctgttcccagaatgctggtcacacccgctgaattgctgtgagcccagtggtgggctgagtgccacggtttgaacgcacctgtggtgcctctgacccatggggagagggcttgtgctgggctccagaaaactctgagggacctctgaaaggtggcaggactgtggggaaggggttttggctgaggctcagcagaatgaaggggccaggagtggagggggcagagggacccccaggcagggccgctgcacctggagagaagctggaaggcaaagactgggtcgtggtgccctgagtgcaggtgggttgctcccccccsgcacgccgcccgtggtgcatcacgttctgttgcagtgtctgctcctgagcatttcaggacgggactctgatcatcctccaagccggcctgcatatcctagttggtatctgagttaagtttacacaggagatatggggtcaaaaggtggtggggtacctggcatcctacaggtggcattcctgtatctgtgatttttgttcacacgtttatctcgggctgcgcatgcccggccccgggccagggaacgggacatggccatgaaaacagtgggcccctgctgtcttgaggcccatcttttggtggcccctgttttggtggccatcagggaggggcctgagccccccatggggtcaggtggaaagtggcagctcttrgaggtgacatagggacccttggaggtgacaywgrgacccttggaggtgacactgagacccaaaggaaggacaggagggcccctgaggagatggatgaggtgggaaagtgcagccagcatgcctgtctcagggaggcattgggtgttgtgggcagcggtggttcgtggcctcctagtgacctctcctggtcactggacagcagcctctctcgcccatgggcgctgctctcggttccagcctcgttggttactcggcagccgtcagactcctggtttgagaagggagtgtgggctccctgtcctcgaggggttcagctgtgccatttgggggtgctccatgaagctggcagctggacagccgtgacactggtatttcttgggttattttagttgtaggcatgtttgctaaatgtcagcaatttggcctcactcaaaatttgttttgagattaggctcagtattgaactgcattgaatgaagtaaaccaggattctaaaattaacgtgtgaggggaagttatttcaccattgggagattattatgctctctacagaaagtgttgcagaactttgatttgacagcaataaaaatgaaccctctccttttttgtgtctggttttagctcagtgccatataaatctgggcattgaaggttcaagggtccaggcgctccacctctgcccctgtggctgtgtggtgctctgtctatggggatctttgtagcacaagcccgagccttatcaaagaccctggttctctccactgggtgcatgtggagcacctcggccggcattcagtgcccactctgcatgccgcccccgtgccagtccccggcaggtgaaggtgagcaagaccttgcactggagcagctctgtcaggagagtgtgcgggggctggaggggctctgtcaggagagtgtgcggggagtctcatccaggagagtgtgcggggactggaggggctctgtcaggagagtgtgcggggagtctcatccaggagagtgtgcgggggctggaggggctctgtcaggagagtgtgcggggagtctcatccaggagagtgtgcggggactggaggggctctgtcaggagagtgtgcgggggctggaggggctctgtcaggagagtgtgtggggcgtctcacccaggagagtgtgcgggggctgggtctgggcttcaggggaggagagtatgtgggggctgggtccgagctccaggacacccagaagagtatgtggaggctgggtccaggctccaggacaccaggagagtgtgcaggggctgggtctgggctccaggagaggagaggagactctcgacggtgggcagccccagggaatggcatggtggctggagggggtgccagcagaggggctgcggccgtagtcttagggagggtggcaggcactgcagaggtgctcagtccgcctgccttctgtggtgcagggtagaggtcgggcctcacaggctctgggtttaagtgctggagctgcctctcattggccctagggaagctgctcgtcctcttgtgcctcggtttccacacctgtatggttgaacttgttgcggtgatgtaggaaggggcctgatgcccctttgtgtggctcaaggctggtgcgtgccgggcagctgtgaaatgagctgggcttctgagtggcagggaggcagagccgcgccggttgcgggctccaagctgggctagctggaggcgggggaaggagagtgtggggggaggtggagcctgtgggccggtgacggaggggaccgcggggcggggtggcgagtggggctcctggtgtctggggctgcagctgtgggtggctgtcgtgcccctgagtgaggcgtacctgttgggaagtgagggcatgaactccgttttcctccttttgagtccccccgccccagtactgtggtgaaagcagctgcaccggtggctctggtgggagcagtaggggtgtgggattgtgcagggcagggaaggggcagagagggggccggagccaaggagtggactctgggcatcccaatggtctgtgtgaggatgaactgggctgatgcttgctgtgggccagggacactagaagggtgagctccattctccagaagctctgtgcttctgcggctggctccagccttgccctgcggtggtggggcctgcttccccggccatcctgccctgtccctttgctgtaggtggggcctcagtgaggctgggagatgatactctggtgctgcccagggctggcctcccatagcgattgatggggtgaaggagaggagaagcccggaagattgagcaggtttttaattcacagggccctattttcgtctgacccctgcttcgtcatcyacctgcctctccgtggcgcctggttcttggtgctccccttttgcaaacctgaagctcagccaccatgccttgcctgtttaaaagttttttttttttttgtagagatggagtcttgctatcttgcctaggctggtccactcccgatactggagtggagtctgcccccgggttgtggcccaccttcctcccactgctggcaggggctttgctggcagctcccagggctgagttttcattgaataatctgcccagaaggttccaggggctgcatctgggtggcttgagagtagaattatttggcaacttgcagtgggttctgtttaagaaggaaaagaaagcctgctgggtccctgatatggtttggctctgtgtccccacccaaatctcacgtcaaattgtaaccccagtgttgggggagggacctggtgggaggtgattggatcctgggggccgatttctcgtgatagtgagtgagttcttgtgagatctggttgtttaaaagtgtgtggcacttcccctttcacactctatctcctgctccaccatggtaaggcgtgctttcttcttcttcaccttccgccatgattgtaagttttctgaggcctcccagccatgtttcctgtacagactgtggaactgtgagtcagtgcaacctctattctccatgaattaccagtctcaggtaagtcttcatggcagtgtgagaacggactaatactgtcctggaattggccatgcttaggggaaagagtcacaggaagggccctagagatcatcaacttcagcccttttatttttgattcttaaagacacatgtgagattgttttataaaaattttgacttacaaggctgaaagaattttatagctaacacttgtttatctgccacttagattctatcattaatgttttactctacttgttttagcacattttcctctgtccatcagtcattgttgattttgatgcatttccaggtaaattgctgacatcagcatacttcccccaaatgcttctgtgtgaatatcactagctagagctcagtatttaatgtttttcttttgacataaaaattatacacagcaaaatatacagatcctaagtacacatttgctgagttttgacgtgtctgtttaaccaaaattgttatcaaaacaaacacaaagcttgaccatcacccaagacccctcccccatacctttccctggccctcccagggaggtggctcttgtgggttttccctcacgtagcttcgcctgtcggaggacgccacattcacagatgccctctctccatatggcttcagtctcttgccagacatttttgagatgggtccatattcttctccgaaccagaggtttgttccttttcatggctgaatagtagtcctttgtgggagtgtatgactatgccatagcacatttagctgttctcctgtcgacaggagtttcctgtccggcctcaggaaacttacaatgatagcatgttttaattatgatgagcaaagactctatgaacattcttgtacacattttttgtgaacatctatttttattttcttaggcaattctacctaggagtgaagtggcaatgtcctggagtagatgtgcatttagttttatcagaggctctggaactttcccaggccaattctgctggtctcttcctctgacagtgcgtggaggccttgactgctcctcacccttcccccatttggtgttcttgttttttcagttttagctcttctggcgggtgtgcagtgggacctcactgtaggttttattggcatctctttgaggattaaggaggtgagcatcttttcagctgcttattgaccattcatgtatttcttttgcaaagtgtctgttcatatcttttgcccattttttttgagttgtttgttttcgttagggagttgcagggggcctttatgtactctggataccagtcctttgtcagatgtatattttgtgatactttcccccagtctgtggcttgcctgttcattttcttttttttttgagacagagtcttgctcagttgcccaggctggagtgcagtggcgcgatctcggctcactgcaagctctgcctcctgggttcaygccattctcctgcctcagcttcccgagtagctgggactacaggtgcctgtcaccatgcccagctaatttttttgtatttttagtagagacrggggtttcaccatgttggccaggatggtttcgatctcctgacctcatgatctgcccgtctcggcctcccaaagtgatgagattacaggtatgagccactgcgcccggcctcattttcttaatggcagtttccatgagcagcagtttttagttatgattcttctatggttctcgctttctgaggcagaatatatctgtgttcactgccaggccatgaagaccttcttcctttttgccttctttagaagctatatgcttttactgtctacatytgggtttttgacttatcacaagttaatttttgtgtatgatgtgagatagtggttgaagtttattattattttttccatatggaattcagctgttccaccactgtttgttgataacttttttttttttttttttttaaagagacagggtcttgctctgtcacccaggctgaagtacagtggcaacacggctcactgcatccttgacctcccgggctcaagcgatcctcccaccttaggctcctgagtagctgggactaaaggcatgcgccaccatgcccagctacttttaaaaataatttttgtagagatggggtctcactatcttgcccaggctggtctcaaactcttgggctcaagcagccctcctgcatcgaactcccaaagtgctgggtttacaggcacgatactttgtttttctccattggattgctttggtatttttgttgaaaatccaggtataagtgtgctttatttctggattcgctattctgctccatcagtccattgaattttattccaggtccacmtgcctcagttgtgttggcattagagtaagtcttacagtcagtgcacatccctaacttgattcttgcagaggctgctttggatattccaggcctgttgcattccgacatagatgttagagcatcttgtcaatttctgcagagtgcctgctgagcttctggctggtattgcttggaatcgtagatcagtgtgcgggggagtgatgtcttcacaatgctgagtcttctgattatgaagatggttgtcacctcatttactgagggtgtctttaatttttctcagcagcattttgtgattttcagtgtagtggttttgtgtcttttgtaaatgaattgttacgtagtttatgttttttatgtcattataaatggtatttttaaacgtgtgattttccagttgtttactattagtgaatggagatgcagatgcatggttgtgtactaatctcgtgtcctatggcccctctgaaccgtagcttctgtggagccgtgggtgacagttgtaaacagttggcatttgcagatagagccatgtgagcacctttttctccaggcttgaggccgttcctttcttttcctgcctcgttgggcwggtcaggacctttggcatcgggtgagtcggcgtggggagctgggcctttctgccatgctcttcctttcggggaaagtattgagtggttcaccagtaaggatgtgagtatctggagtgtttttgtcattgttcctttaaaaaaaaaaatgtcctttatcaaagggaggaggtttccttgtatttcatactctgctgagcgttttcrccgtcgaggaatgtcgaatgtgctcagatggtttttctgtatgtgctaacgtgaccccacactttctcctttatttggctaacttggtaaattacatcgctgtttagttaaacgaaactagtgtttctgggctaacccctacttggtcacattatattcctttaaaaaatctattttgggccaggcacagtggtttattgctgtaatcccagcacttttggaggccaaggggggcggatagcttgagcccaggagttcaagactagcctgggcaacgtggtaaaaccccatttctacaaaaaattaaaaaaatyagccagttgcagtggtgtgtgcttgtagtctcagctactccrgaggctgaggtaggaggattscttgggcacaggaggtagaggctgcagtgaactgtgactgcgccacgacactccagcctgggctatagagcaagactgcgtctccagaacaaacaaacaaacaaacaaacatttctgcccttgctttgtgtacacrtcagtgagagctgttgacctgtaatgttgtttctttgccttgcctctgtgatgcctttgccggttttggtgttggggttatgctggcttcagagattaaccaccaaccatttggaaaacactaaccatttggaaagtgtcatccctcctctgtgtttgaaaagagccatctgtgattgatgctgtttcttctttaggtgtttaatggaatttaccagtgaaaccatctgtgcctttttttgtgggaaggtttttgatatgamtcaaatttctttaatagataaaagttttctattcattatgtgccaagttttgttttttaaggaataaatatattttaaatttattttctgaggaaaacataaacttaaaaattatttaaatgatcagtctacttcatgtaaattatcaatttgttgatacaatgttcacatattctcatattattcttttaatgtctatagtgataacccctctttgattcctgatagtggtaatttgtgtcttttattcttgatcattctacctactggcttattagttttgctaatctatttaagaactaaaaaaaattgttaatttttaaaattgtctgtttttgtgttaatttacttatttttgagacagggtctccctctgtcacccaggctagagtgcagtggcccactcacagttccctgcctcaacctcctaggctcaagcagtcatcctgcctcagcctcccaagtagatgggactataggcacaagcctggttaagcttttaatttttttgtagagatgggggtttcactgtgttgtctagactggtctttcctggcctcaggcctcccaaagtgctgggatttytctgttttctgttttcttggtgacatggaacagytatttccaaggaacttgtttaatcagaccttcaggggcttctagaaggtcgcagttttaacaggactgcagttgattccaggttttgattaaaagtgtgctttggggaagcaattttaaaattcattgactacatatacaataaaatgaaattagaagtcatgtaactgagccaaaagtttttttatacaaagttattaacaggtacctaaataaaatatgttcttaaaaatgaaataaaatgaaatcatttgtatacaagtacagtagtcctccctcatccatggtttcaggtaccttatgtcattgcggtcagaaactaggtaagatattttgagagagcgagagaaagcgcgagtgcgagcacattcatgtaacttcttttgccgtatattgtcctagttgttctattttattatcagttattatttatctcttactgtacctaatgttaaactttatcatggatatgtatgtatgtataggaaaaaccatggtgtatatggggtttggtactagctgccgttacaggcgtccactgggggggtcttggaatgtgtcccctcagctacgggggatgcctgtgtgctggactggaagctccacartggtgagaagcattaccagggcaaagccaggagcaatgatgacaaccctggattcccaggtctcacggagcctcagataccaccatctctttcttcatccttttcttgcacttcattctttttccacatcctctgcttctggggtggcccctgtcttatttcattttctgtgtgacgctccccacagatgtgtgtcgtcagcggctgccctgcaggtggagtgtcctttcgggtgtccactgctggttcctgctagcaggagcagatgacactgcagcctctgtccaagcgtggatcccaccctgagggtgctgtgtgtgtctgggcttccctctgggtcattgtgaagcagcctcacctccttggaactggaggcctccctggacctcgccgcttgtccctgagacctggccagcgcttctgtccgggggccagtggtcaggtgatcttagggacacgtctgccctttgggaaatgggtgtgcctctggagacccgggcagagactggcctcgtgcagctggggctggacgcgccctgtgcttctggggtgctgaccctcctgggccatcagaggtggctctctgtcaggagaagcagacttcgggccttctccacgtctcccccacctccgactctgttacygcagctgggttttgtcagcagcagaacagaagccagcaccctccaggacggggacttggcacacgtttggttttttgtgaggagagcagggggctctctggaccatgggcggggctgcctccctaggggctcacagctccgtggcgacctcgtcacccttccccacagagtgccgcatggctggcagggtgggcacgacacgccgttccccagaaacccagttgacttcctctgtgggaagtggtcagccgagtgtctggtgctgcggaacatctggaggcgtcacttggcatgggggactggaggtcaccatgggtggcctggaagggtggccggtgacgacgggctcctgtgaagtcactggaatctggagtgaaatggctggttacggatacgtgcgccagagcctcgtggtgatggcgctgctggtgattttaactcttctgtgcttccctcccgctgaatttccccaaatttctgaaacaagtatgattgacttttgaaaagcaatttccatttaagttgaacagagaaagaaacatgcatgcatgtcaggaggcggcgcagcgcggcgaggccacggttctctcctgcgcgtcagaaggcggcgcagcgcggcgaggctgtggttctctgcttgtgcccactttgtgtttgtaaatagcgagtcggagtcggagctggagctagtttttcatcatctgtcggcttctgcagaccaatgtcatcattccccgtcccctgggtggcccctcccccgccatcgttacrctgtcatcagcaagatcaytgtcactaggactgcgtgtattccagtcacagctgagccatgtagtgtgctatgacttgattttttcagttttaaaaaataatacaaacacatttaaaaaacaagagagccagtgtgaaaacagtaggcaatgaacagtgtccacagaactcagagggcggacaggagatggacccagggcagcttgggcccgttcctcacctgttacctgctggcagcaggagtgagggccgtgtctgggcaggaggggctggtacatcctcacaggggtggcagggggtccgattgaggagcagttgggtggcccagcctgcttctgctgctgccagcacagcccatggtgtgctctgtggggctggcagggatcctggcatggcctgtgtgattcgaggtcagaaatcatgacggggaaaggatgcggccataccagacggaacctttgtccacagggtccctgtaaccagagctgttgggacgcggggagcaggcgaaatttctgggccaatgtttaaacctgcctgaactccagcctctccctctttgttgtttgtatgccgtgctcagaagctagccagaggattccgttcagaaacggggcctgtagataattgcgttttgtgtatgccatgatttcaaagttatacttgtgttgtttcttagaatttggccgggcatggtggctcatgcctgtaatcccccagcactttgggaggccgaggcgaggcgggcagattatctgaggccaggaattcgtgactagcctgaccaacatggtgaaatcccgtctctactaaaaagacaaaaaattagccgggcatggtggtgcacgcctgtaatcccagctacttaggaggctgacacaggagaatcacttgaatccgggaggcggaggttgcagtgagccaagatggcgccattgccctccagcctgggcaacaagagtaaaactccatctcaaaaaaaaaaaaaaaaaaaaaggatttgatcctctctaatgataagttgtcattttaaatagattctagggtatgcagcccttttcccagtggattcagtttgctagcagacatcttttggagaaatttgccatcatgtgtagacttaagctgattttgtctctgtatttgatgaaagaggaggatatttctgaattatctctcatcagaaggtatctgttcctctgtgtccccgttttcttttatagttctcttgctctgtgaggttcagctaacaggaataatattctgagagaaaactgaatttcgagacagctctctgtcctactcgggagacgcagcttgcagactgggtcctttctcacgggccttcctcctgcaccgcctggacacagtttgtgcttctcatttggtggaaggcccagtcgttacttccttttacaaaactatttttagctgcaatgtatttatggctgcacagacaagaggacttttctcatgaaaggaaatgcttttccacagggataagcgagtcgtgcggggcaggatttcctgaggaatcagcagcacggccctgggttcccaccccccagcacagcgcccaccctgtgtccccaggaggccttagcctgtgctgcgtctacagggttaaggcacccacagtgctttttttttaaatgacttgtatttgaaagttttaaggaagtctttggaaggaaatgagttgacgttctggtgtgtgtcaccatcggtggttgccgtttcttggagtgtgggttgtggtcccgctttctggtgtatgtcgccatcagtggtcactgtttcttggagtgtggggtgtggtccygcgttctgtgtgtgttgtcatggtggtcactgtttcttggagtgtgagatgtggtcccacgttctggtgtgtgtcgccatcgctggtcactgtttcttggagtgtgggttgtggtcccacgttctggtgtgtgtcgccatcggtggtcactgtttcttggagtgtggtgtgtggtcccacgttctggtgtgtgtcgccatcagtggtcactgtttcttggagtgtggggtgtggtccagggtgtgggggctgctgcccaggcctcccggcttttgtggattggaatccacatctgcgccacgtgcagggttcctgcccagtctctgaagcccactagtccttctgaccaggcgttcactstgcctgcctgctgagggagcgctggggtcgtttgayaggcggcacccacaccctgcagggccacgtgcgcatgcgggctcgaggaagctgtgggagtgccttcccactaggcttgctgtgcgggttcttgaggcaaagggaaggtggagtttgcagaaggtcctggatggtgggtcagaatgtgggcacctggttccaaaccctgagggtccctttgccagggcctccggtaggggccgcggtccaagccgaggcactcgcccctcctgtccttcctcaggccccactggccacagcctccactgcttccagcattttcttcctgttgggacggagtcctgccttgggaagccttctgcctgtagaggtttcttgccggtgtgcactgcacagcttgtgggtcttgtgtgtcccagaaccccgagtgctccctgccagccagggcccaggcagtgcttggtgagtgggagagggatggccctgctgccctgtcctcccaaacggtgttgtctcatggccttcagagagcagacagaccagaggtggcctcggactccaagagacgctcctggctttccactctcgccctgtgcagaccagcagtgcgaggggtgttgtggggttagggggtgacgcaggttatcccatgccagggagcccacagcctccacccagggccacgcctggcgccagcacagggaggtcacagaggaggctggagcagggcgtggtgggagggcaccgatgtgcaatgccatgccaggcctcggggagcccctcgacgagacccatggctcctgcacggatggtttcacattgtcaacacggctggaaaaggayacggtctacaagtggaggctcgaaggtggctgagagttatggcacctgggctttccagaagttggcttgaaataattggtcaaggtatgtggctggcgagggacgccagggatgsggcctcctgcagtggtcagatgccgtcctgtgggatggggcctcctgcagtggtcagatgccgtcctgtggggagggacagtgtggccttcatccgtggtgacgccgtcctgtgtggggactgacagtatcgtctccgtctgtgatgatgcygttctgtgtggggagggacagtgcggcctccatgatgtcccccacactgtccgcgctaggagtgcaggtggtttccagcagctgtctgccggcagggaggctgggaagtcaggctggctgtgtccaacacctcctggggcacagaggagtgtgggggagacactgttggaacacaggtgtggacattgcgacacgtgtaaagatgtcagtggggcctgcgttcgaggatgttccgaccaccatgctggtcgcaccctccagcgatgggtcctcggtgcagtgatctcaagcgtcgcgtctagaatcaccgcaccccgttgcttccagacagcctcggtagcgttgagtcccctcttcctcttcctggatgtacacrggggccacgtgccgtctttggaggtcgtgagtgtttgagtcttttcatctcggcccctgctttgctctttctggcattgccatctgaaagagtctagcccacttgtctttagggcagcctgccgtgtgggtcactgtggtcattgctcgctccgtggttagctgtgtcctgtccgtggttagttaggtagttggttgctccatggttttcacttagagattttgggcaggaacattaccaaggtgagcttgggcgcttcttgtgccatcagctctgggggcccaggctgctgtcacagggaaggtggcatcgccccactcccagcttggcgggaggaggctcctcatgtatgacgccatttgggkatcttctgtgactcctctatgggtcctttgcccgtttttccatcagttttgttttgttttgtattttcccttgacttttaagagttctttcaattgcaagaagattaattatctgtgatatatattgcaaatattttcaaccagtttgacatttgtcttttgattttgccatgccaaagtttaaaaaaagttagagttgactcactctttttaaggattgtgtttggattttgagtcatagtttatttttccatatgaactttagaatcaccttgtctggtttgggctgggcggggcgggccgctggcaggctgtgggacaggccagggctatttctgcgctcgcttggagaggactgacagctctatggcgccgagtcatggtccctggaaacaagagaggtcttttcatggactcaaagcttttgttcgtttccttcaggaatgtcttaaagtttttctcttacacartgttcacatatgcaaaaggtcgtttgtgaggttacctttttccttgttgcattggaagcgggccttctcttccagcaggccttccgcctggttgttgttggtgtctgtgatggctgttgttttgtctgttaatttcrggacctcctgctttcctggattctcctgttgtctgtcctttttctgcctgcttctctgcccctccaggtgtgctgtgacgccatctgcaggtgcagggagctcagatctcctttcccggagctgcgcctctgcatgtgttccctttcgggtctcattccctcccccgatatgtcaggtgaaatggcactgggcgtaacgggcgcccttgctgtgtttccttgtccgagggaatgactgggtttgcccaggaggaaagagccggctctgggatgaggtgtcagcgtgtgtggggtgggatgtttcgaatccacgtctcatgtggtattcagcgtggtattcagcgttgttgctattaaacaagaaataataacagtgaaaagacaaagcgtttcacttataaggctagagtatagaactgtgccataaatgagggaattacggaaggattatataaatccaaaaattattgaataaaatacagaaaaaaaccccagaaagacagcaaattaaggaaatggcaacagtttgaaaacataaatgaagcacacatttggtaaagctacctgagagagggaggggcaggttgactgcatagtagtgtgaggaacaggaggattcatacagtttaacaatccattgtaagatagtttgttaactattcggggaaaggtttaaattggggtcttactatagacattataccaaaacaaaatctaagtggggcaaaaatgtttgtttgtttgtttgtttgtttgtttgaaatggagtcttgctctgtggcccaggctggagtgcagtggcacgacctcagctcactgcagcctccgcctcccgggttcaagtgattctcctgcctcagcctcccaagtagctgggactacaggcgggcrccaccacacccagctatttttagtagagatggggtttygtgatgttggccaggctggtcacaaactcctgatctcaggtgatccrcccgccttggcttcccaaagtgctcggatcacaggcgtgagccaccgtgtccggccaaaaatgtttaaaataatattaattttattttctgatacaggcatgtatagtcctaatctgaggcacacgcaggactttctgtgctgtgtaacaggtggccacggatgtcgtggcttaaaataacaccagtttgttgtttcatgcttctgtagggtggagtcagggctcagcctgctgggtcctttgctcrggtctcacgcggctgcagtcaggttgcctgttctcagtgggctgtgttctcatctggaggcccaactaggcagggcctgctctcagactgcctcaggtgcttggcagatatcatttccctgtggttgtaggactcacagcttcttgtgccagagcctatcggggagagactgccctctgcttacagcctcagacctttagactcactctgaagtggctcttcgataagatgagacccacccaggattayctcccttttgattaacctaagatcagctggagatggagcttcattatgtctgcctgacmctttcacctttgcctcagcctatgcatgggcgcgccgtcttccccggttcataggtcccacctgcactgaggacggggattacactggatgtgaatgccggggcgtggggagccctgcgggcctgctggratcctgcattacaattttatgacaaatggttgttgactttaattgaagaacttttcagtaaacttaaaaaaaattaaccttcatttattacttctccatcattcttcctttcctatgtacatccggaattttgagttgtgtcatattctcctycctgaagaactttttcaacatgacttacagggcatgtctacttttttgtgtgagaaagtttatttttctttcactttcgaaggatgattttgctgtacacatgactggggtcggggggtagtccctccagtctcttcttgctggtgtggtttctgttgacaagttcactctaattcttgtccttgttcctctatagctaagatgtatttttttcttgcttctttcaagattttctttatttgtgwttttctacaattgggatatgatctgcctaggtatagattttttggtatttattctgcttgatgttctctgggcttcgtggatctgtggtttggtgtctggcactaattttggaaattttcaaagctcttatatgttgcaactgtaactggaattctttaagtttgccaggaactataaagataatcattagacttttttagatctgttggtgtgatcagttgtattagcagttttcctaacagtgaatcatccatgtctgtatgtatagaatagtcactcgcttgcttactatgtgtgaagtttttaacgtgctgctggatctttggggtgtgtgtcgtggcacacacatgagtgcacacatgaggctggtttgaaggtttcccttttgcacatacgctgtcttcatcctgtttatatgccaatgttatgtttgtctcataataggaacttagaactttccttcttgtgctgtgatctagagctgtgctgtgtagtaatgtagcctctaaccrcgtgtgattattaaaatttaagtgaactaaaattacatgcaataaaaaaactgttcagtcaccagtagcctcatttaaaggacagacgtggctagtgcaggtctagaacgtgtccatcacygcggaacgtactgagacttcctgcgtcggtggaaacattccgtcatctacaccggccagtcctgtagcaacggcctaggtggtttttgaacgtgtgtgtgtaggtgtgcccacackcataggcatgtggtgagtgtgtggggtgcgtttgcatgcctgtgcacgggtggtgtgtggtgcatgcgtgtgtaggtgtgcccacatgcacatgcataggtgtgtggtatgtgagtgtgtggggtgcgtttgtgtgcctgtgcatgggtggtgtgtggtgcatgcatgtgtgtggggtgcatatgtgtggcgtggtgggtgtgtgtgtgcctgcacgtgtgtggcatgtgtgtttgggtggttgtctttgctggcccagttgtagcagctcttcctgaggtggggacctctgccccacagctgcctgcctggagctctctggtaggcggtccccctgccagccctgcaggctgtatgaggttctccatggttctccccgtctgccatttgccctttgttattgctcttagtgacaggcagttatttaasattctggccaaagtggctttcgttgttttcttcttcctaaagcctttaaaattaagagttaaaaaataggaaagtaatgcgtgatgattataggcatgttaaaaataaagaagagaaaaagaaatrcctctgcctcaaatacccactccaacctttgggcgtttttttctgtctttttcccttttcctattgagaataccattgggagtgctgacagcgctcggcatgaggggctcctgtgacgtgctggcaccctttctggagtccccgcggaccctcaggggccagctgtgcctttgcattggccacagcgaggaagggggccagggcatgcagtttctgcagggccacgtctgcaggtggccatgtgggctgctcgcgcyggtgggggcttgtgtgaggtgtgatttattttgtgttcaatccatttttttagagtataagtgtcttccatgtctatgtgctcattgtaaatctttactttgataacatatacctaatacttgttattttaaccactggtaactgtgtagttcactgccgtcctcacctacattgtggtgtttgttggtgagtgtgtagctcactgcctttcttacccacattgcggtgtttgttggtgagtgtctggctcactgcctttcttacctacattccagtgtttgttggtgagtgtgtagttcagtgccttccttacctacattggggtgtttgtcactggcaccctgtctatctccacgtcatgttttatccaataaatttgtttttgattcctccctcttctttccttccgtggacgccctgtgtaactttctttattgaggtgccttctgtaatatttttctgcagtattctaattgtaattctcttataaatgatgctattatgaacttctttgttgacagagcatttttgctctttagaattacttttttaaggactgactcccagaaatagagttccacatttgaaagtaatgagttttttttttaacatttcccatattttcatagtttttgtattgttctttgagaccaagagaagaatttttgggtgtttaagagaaaaagaaggcatgtgctttctttcatatggtggctgaacacacgcagagctgcttggcctgtgggctgaaatttgagcatttctttaagacctagtttgtttattttttactctcacttcagtggttttaaaaataactacattaaccaaaygtggctgtacctccgaggacttcttgccagagctgctcctgggaaagggttcagtctytctagtttgtgcccatcacccagtgggacagctacatggacgtggcatggcggcgtggcggcatggcccagtaaagaccagtttgggcaggatgaatggccctcaattaaagggtgtcrtggtaggcagggtctaattttataaaagcttctggcacatgtacattcaaaatttcttttttgtctttgatcttggcagaagaggacrcccaagtgtgtgtgcgtgtgtgtgcatgttttgttttgttttttttttttgagatggagtctcgcactgtcacccagctggagtgcagtggcaccatctcagctcactgcaacctccacctcccaggttcaagcgattcccctgcctcagcctcctgagtagctgggattacaggcacccaccaccatgcccggctaatttttttgtatttttagtagagacagggtttcactatgttggccaggctgttcttgagaattcctgacctcgtgatccaccctccttggcctcccaaagtgctgggattacaggcgtgagccaccacgccyggcccatgtgtgtgtgcatgtttgtgtacgtgtgtatgcatgcaygtgtgtttgtgtgcaggctcctgtacatgtgcgcgtttgtgtgtgtccatgtgtttgcttgtgtgcgtgtgtgcatgcgtgtgtgtgcatgtgtgtgcatgtgtgtgcatgcacgtgtgtttggaggctcctgtgcatgtgtgcatgtgtgcgcgcatgtgcgcrtgtgtgracacatgtgtgcgtgtgtgcatgcgtgtgtgcatgcacgtgtgtttgtgtgcacgctcctgtacgtgtgtgcatgtgtgcatgtgtatgcatgcatgtgtgtgtgcaggctcctgtacgtgtgtgcgtgtgtgtatgtgtgcatgtgtttgcatrtgtgtgcatgggtatgtgcacgtgtgcatgtgtgcatgcatgtgtgtgagtgtgtgtgcgcatgtgtgcgtatgcacatgcacttgtgttttcatggccgagggtttattttctagtaatttgaagccctaagtgacagaaccttttctgttcttctcagtgtttgtgctactgtcctctccctcttctctcagtctcagaagatgtgtcagggtgtctggatgtggtctgtcagctcatccacaaggactcgggccatctcccctgttcctgcaggtggtgggaagtttctatatccacattttcttcattgaggatattgtggtttgttgtgaaagtgcttacattcagtgggataaaatttgagtcacatattaggatattatattgttatttcagttgtgaattttaagaaattatataatttcttacacatcttcaggaatgcattaggcaagttaaacaatagtgttacatgttggggatatgtttatatgcagagcggttgtaaaaactgtattaacatctgtgtgcattgcacgtgtctgcttgttcctctgtttccagtgttttgtcctttagtgtgtgctgcagcgctgtgctacgtgtagtgaccctgggcctgtggtgcgtcctgcggggctgtgctacgtgtagtgaccctgggcctgtggtgcgtgttccggggctgtgctacgcgtagtgaccctgggcctgtggtgcgtgttccggggctgtgctatgcgcagtgactctgggyctgtggtgcgtgttccggggctgtgctatgcgtagtgactctgggcctgtggtgcgtcctgcggggctgtgctacgcgtagtgaccctgggcctgtggtgcgtgttccygggctgtgctacacatagtgactctgggccttttgggcaggtctcagatttactgtctgttttaatttcaattgcagtttttgtttgatttcgcttgggcgtctgggacctacccttcctactgctagggtcagaactttctctttttttcattttatatgaggtgagtaaagtgcagctctcagacgtgtggagactcagtgtgtggctcggctgcttgagtggcgctgtggcgatggagattacctccacctttttaatgcggtaaaatgggtataaaattttccatcttaaccatgtttaagggtgcaattcagtggcatgaaatgcattcataatgttgcataaccatcactgtcatccatctccagatctcttttaatcttrtaaaactgcagctctgtcctcgttaaacactgagtccctgtctgcccccagttcctttgtcaccaacattttactttctgtctccatgaatctgatgaytccagatatctcacatgagtgcgatcatacrttctttgtctttttgtgtttggcttattttccttagcataatgttctcaaggttgttgcatagtcagaatacccttcctttttaaggctgagttatgtggatagaccacaattgtatccatttgtccgtggatggacacttgggtttcttccagcttctggctgattgtgggtgtaccgatatctgtttaagttcctgctttcagttcttttgggaattgtattagttcattttcatgctgctgataaagacrtacctgagactgggaagaaaaagaggcttaattggacttayagttccgcatggctggagaggcctcagaatcatggcaggaggtgaaagacacttcttaaatggctgcagcaagagaaaatgagagagaagtaaaagcggaaacctctgataagcccatcagatctcttgagacttattcagtatcatgggaatagcacagcaaagaccaacccccatgattcaattacctccccctgggttcttcccataacaggtgggaattctgggagatacaattcaagtgagatttgggtggggacacagccaaaccgtatcattccatccctggcccctccaaacctcatgtcctcacatttcaaaaccagttatgccttcccaacagtctcccaaagtcttaactcattgcagcattaacccaaaagtccacagtccagtcttatctgagacaaggcaagtccctttcatgtatgagcctgtaaaatcaaaagcaagctagttacttcctggatacaatggaggtacaggtattgggtaaatacagccgttccaaatgggagaaattggccaaaacaaaggggttacagggccgatgcaagtccgaaatccagcggggcagtcaaattttaaagctccaaaatgatctcctttgactcctggtctcacatctaggtcacactgttgcaagaggtgtgctcccacgatcttgggcagctccgcccctgcggttctgcatggtacagcctccctctcggctgctttcatgggctggcattgagtgtctgcggcttttccaggcacacagtgcaagctgttggtgaatctgccattctgaggwctggaggatggtggccctcttctcacagctacactaggcattgccccaatagagactctgtgtgggggctctgaccccacattacccttctgcactgccctagcagagattctccatgagggccccacccctgcagcaaacttttgcctggacatcgaggcattttcatacatcttctgaaatctgggtggaggttcccaaacctcagttcttgtcttctgtgcacctgaaggctcaacaccactggcagctgccaagtcttggggcttccaccctctgaagccacagcccgagctgtatgttggccccttttagccacggctggagtggctgggatgcaggtcaccaagaccctaggctgcacacatcatggggaccctgggcctggcccatgaaaccagtttttcttcctgggcctctgggcctgtggtgggaggtgttgccatgaaggtctctgatgtggcctggagacattttccacatggtcttggggattaacaacaggctccttgctacttacccagatttctgcagctgacttgagtttctccccagaaaataggttttgcttytctatcacatattcaggcttcaaattttccaagcttttatgctctgcttcccttagaaaactgaatgcctttaacagtactgaagtcacttcttgaatgttttgctgtttagaaattccttccaccagataccctaaatcatctctcaagttcaaagttccacacatctctagggcacgggcaaaatgctgccagtctctttgctaaaacataacaagggtcaccttcgctccagttcccaacaagttcctcatctctatctgagaccacctcagcctggattttactgtctgtattgctgtyggcattttgggcaaagccattcagcaagtctccaggaagttccaaactttcccacattttcctgtcgtcttctcatcccttcaaactgttccaacctctgcctgttatgcagttccaaagtctcttccacatattcgggtatcttttcagcaataccccactcctggtaccaatttaccgtattagttcattttcacactgccagtaaagacatacctgagactgggaagaaaaagaggtttaattggacttacagttccacatcactggggaggccccagaatcatgacaggagacaaaaggcacttcttacatggcagtggcaagagaaaatgagaaggaagcaaaagcagaaacccctgataaacccatcagatctcatgagacttattcactatcacgagaatagcatgggaaagactggcccccataattcaattacctccccctgggtccctcccacaacacatgggaattctgggagatacaattcaagttgagatttgggtggggacacagccaaaccacatcaggaatatagccagcagtggaattgcttcactgtatagtaattctgtttaatttttggaggagctgccatttttcttcatagygatggcaccatgttacattcccaccagcagtgcacaagggtcccatttctccatctcatcccaacacttattattttctcttttcaattttaatgttttgtataatatccrtcgtatccatcctaatgggtgtgaaatggcatttcattatggttttcatttgcatttccttaatgattagtgataatgaacatcctttcatgtgcacgttgaccatttcatatgtcttctttagaaaactgtttaagtcctcttccyatttttaatggggttgtatgtccttttgttgttgagttgtagaaggttaaaaatatattctgaatattaacccgttagcagacacatgacttgcagatattctcttccatcctgtggcttgtctttcatcctattgatagtggcttttgatgcacaaaagttgttaagtttgatgtccygcttgtctgtttttccttttgttgcctgtgctttggatattgcatttaagaagtcattgtcaaatccagtgtcacaaagtttctcccctatgttttcttctaagaatttttatagttttagatttttgatccattttgagttaatttttgtctgtggtgtaaggtaagaaaccagyttcattcttttgcatgcggttatccagttttcccagcctcatttgttgaaaggactgttcttttccccagtgaatggtcttggcaccactgtcaaaaatcatttgaccatattacaaggctctttattccattccattggtccacatgtctgtcttgtgccaggaccacactgttttgactgctttaggttgtagtaagttccacataaggaattgtgaggtttccaatttgttcttcttttttaaggctatttttggctattcagggtcccttgagattccatatgaattttagcrtggacttttctgtttctgcaaaagaaagtcattgggattttgatataaatggaattgaatctgcaggtttctttgggtagcatcagcatcttaataacgttaactccagtttgtgaacatggaatggatatctgaatttctttcagcaacattatgtagctttcagtgttcaagtcttgcctccttggttaagtttatttctaagttttttattcttttcgatgctgttataaatgggattttaaaacattttcttttcacattgttcattgttagtgttgtttgtgtgttgatcttatatcctgccacgttgctgaattgctgaatttttgtgacggagtctcgttctgtcacctaggctgaagtgcagtgacacagtctcggctcactgcaacctctgcctcyggattcgggtgattctcctgcctcagctccckagtagctgggaccacaggcaygcaccaccatgcctggctaattttttgtatttttagtagagacagggttttgtcatgttggccaggctggtcttgaactcctaacctcaggtgatccacctgcctctgcytcccaaagtgctgggattgcaggtatgagccactgcgcccggccttatttctatcaattttttggtggaatttctagggttttgtatacataagagcatatagtctgtgaacagagataattttacttcttccgttcccattcgggtaccttttctttcattttcttgcctaattgcccaggctgggcctaccagtgcagtgttgaatggtagtgatgagcgcgggcatcctggtgttcctgctcttagagggaaagctttctgtcatccactattgagtgcattcactgtgggtggtaatctacaggcacgttctctctcagaggtcctttctttccttttgtgtctagaaaggctgtttttctaccacgatgacagcaatttgcttattttctctcctgattcctttgtggtttcaagtcttatgttcatatcttctgaatctatctggagtttagtttctttgtggaataaagaaaggatctaatatagcattttaaaagtaaatatttaactagtcctagtattgcttgtcaattaatgcctcttccctcaacagtgtgaaatgcctcaatctctcctgctgacgtctctgccttccraagctacaaaggggaagagttgggccttctgggcggctgtgggccaggctgcctctggcatcttggtctctcatgtgggtattctctattaggggctgtatagcaaacacgctaaagatcatctcagttttttagtacttctcactaaaatggaatcattttataaggtctgtttctcccttcccttcagaatatgcactatagaaaattacagatcactccagctcccactacccagaaagaacgcttgtccacgtggaataaacgtcatcccagtctgcagagctccagcaaggaggacaggctgtgcttcaccagttaaatttaatcctgctcaaattgtcaggagaaacagacactgaagtgaaactcaaggaacttctgaatttgagataaatatttattggtgcaagagataaagctctacaattcctctaaggataagaaaacttttctaaacttgaagaatgtagcgtttaagaatacattttaattttagagcacgtttatgaatgctctggtttggaaggtatcatgattcttaggcagcctctcagctcctgggccccacttgctgatttaatagattctattacttgtgttttgttagtttgtaacagagacactctgttccacctttccctgcctccgttttcagcccttggttctgtactgtgtggacatggtgtgggtcactgtggtctttcctttctgacttctgggctctgctgcatcacctgagttctgccctgcgccgtcagggtcccctctccgtccagccctgcgccgtcaaggtcccctctccgtcccgccctgcgccgtcagggtcccctctccgtcccgccctgtgccgtcagggtcccctctctgtcccgccctgtgccgtcagggtcccctctctgtcccgccctgtgccgtcagggtcccctctctgtcccgccctgtgctgtcagggtcccctctccggcgcaccctgtgctcctgtgctgtcagggtcccctctccatcctgccctgcaccgtcagggtcccctctctggcgtaccctgtgctgtcagggtcccctctccatcctgccctatgctgtcacggtcccctctccatcctgccctgtgccgtcagggtcccctctccatcctgccctgtgctgtcagggtcccctctctggcgcgccctgtgccatcagggtcccctctccatcctgccctgtgctgtcagggtcccctctctgacgcttgccctgcaaacatcctcctttcccgtgactgctacgctcaggagcgaggatgcagtcagaccctgttttgttgcctctggagcatccttctcttcctcttccccccgtttgttatttggtgaggtttggggggaaaggggtgtcttaatcttccttatggtgtgtttgcccagagctcaatagtagttgaaaaggttttcttgtcatatcaattcctcaagctatgctacttgcacactgtggtctgtggggctgcatagtgaaatgtccttttcctggatggagggaagacagagaaggaacatgatgcagcctcactgctcaggatggaaaaacgctgggattaggggtcacctattggtctggggaagctcagtgacccagggaaaattgaactgatggagaagacagtatttgatcagacctgtgagcagtgaaggcatgggggctgttgccagtctgcaaagagagagtgcaaaggccctggggccagaggaccaaatgtctgagactcagagcaaagcaggtggagcggagggcagggaggccacgggctcagggcctggtggctgtgcagacctggaaggcctttgctgtttatcctgagagagcaggagggccctggagggtggatccacttgtgttttctgagaatcaccctggctgcctgtggagtgtagactggaagcaggtaaggacagagcagggagatccctgaggagggagtgggaagggactggggatggggaagaagtggatcccccaggagggagtggggaaggggctggggatggggaagaagtggatcccccaggagggagtgggggaggggctggggatggggaagaagtggatcccccaggagggagtgggggaggggctggggatggggagtgggtggatcccccaggagtgagggggaagcagctggggatggggaggggatggggagggcattgatcccccaggagtgagggggaagcggctgggggatggggaagggacagggagggagtggatccccaggagggatgggaaaggggctggggatggggaggggatggggagggtgtggatcccttggagggatggggaaggggctggggatggggaggggacagggagggcgtggatcccctgggggatgtcctggaagtgacacagtggcactgaggccaagggaggctggtgggatggtgggatggtgggatggggcccaggaggccctgggagcttccaagctggggtcagccaggcagacgcagcagcgccaygcgggccagaaagtggcccctgggcagggccccatggtcaccgtggccgtcacagtggccccgactagtgttggggtgtgtgccaaaggcaagaactgaaggccttgagggccttgtctttttttcacgtttcttctcttccttctttggagtgtttttgctctcatctttcatttagacttttggtctaattatttcacagcctttgagtgcctcctcataaacagtcagcaaacacggatgtctttgtttagagcaccgtgttaggactgtctgggcttattaaccttagtggatccacagtcaatgttgggggaagtcatatccacggtttaaatgaggtcatgacccatgaattgggctggagcgcgtgttactggggcgaggtgcacacagtgaacggtgtgtccaggtgtccgctgtcacatttgtgcgtttggtgtttagggtggctcctgggcagggctgctgggcacgcagctgcagctggatgtggggctgggaccctcgatggggacttgctggtaggagctggggccaagggaggctgtccacgtgggctgagggtcctcagtggcgggacagcggcgtgggtcagtcgcctcccctcctgccgggtcctcagtggcgggacagcggcgtgggtcagtcgcctcccctcctgccgggtcctcagtggcgggacagtggcgtgggctgatggcctcccctcctgctggggcggttgcgtgcgtcccacgaggaggtccctggacccagagggcagggcatgggggtgctcagagccgcagtgggcgattctctcccttcgcgtgtgtgtgtgctggggttgtgtgtccttgaagcctggagccagggtgttctcggctcggtcctgtgatctgtgaagctcttgtttcttgtcaggttttttatttttcattaatttatctaaaattcagtcttcctgctttttagggttcttagacccgtcagcaagtgaacggaggagcgcgcctggtgtgtggccagccttgcgatgctgttgtgtttgcgtgggcgcggagtctgggcccagctgcactggcggcctgcacgccttggccccatgcccacggccacggaggctgagaccagggcaggggctttagtcccgatgggagcgggggcagggccttgtttattgtttttaatcgcggcaaaaacccacaacattaaatttaccaccttaaccgtttccgagtgtgcagttccttagtgctaagtacattcacgttgttgcacggatctctagaacttgttctctcgcaaaatggaaactctacccttttagatgctgactctgtcccctcacggtgggcgatgttggagctggggtgcttcctgagcgtgggcggcttgtgctgagtgctcgcgctcagcctcgtccgcggtgacctccctcctcttgggtttgaatggctgtgctgcccttggccggagctggcacagagcccaggagcagccaggtggcctggggctcagcggagcggtcagggtggagagcgactgggccgtcccttctcctgaagcagtggcattttcaggcttgcgcttagctcctccgattctgtccaggagcttcctggggcctgggtctctggcggggctggagtttccttgcgtgtgtgcacgtgtgtgcacgcctgtggcatgtggtaggttttctgttgatggctctagcaagtgctttctgaagattctgacagttgtgacggactctataaaagccccttgctcttcaccccaaacacacagaaatgccatatgcgaccatgatgttttgtactccacaaagctcagctttgtctagtgcctgtgaaggggctttggctcaggcaggggcgggtgtggaaaggtgccaccgtcttgcttgttgaagctgggttactggctgagccgtctcttccctgggaggctggaggctggagcaacacagagccttcccctcctcgccacccgtgtgggggctgcgcgacgctgcccgagctttcctgagacagagtgcatcgtgcaccatgtccctgggacagcacagagcggagcccccacacagagcggggtccccgcgtgggcctggggtttccccgtgcgggtggagctcctccatgcggggtgggcccgggctgcgcctctgctcctgccccacgttgtcttcacaggagcttgtcctggctctgtttagggctgtgccattggtctgactggcttttctttttcttcttaatttacagccagaaaacctgcagaagaactggcttcgggaattttaccaggtaagaaccactgaaacgtgttcttttggattcattacttagccaataaggtgcctttttgctttggcattcctccatggagtctggtgtgtctatggggagcgcaggcctgggctgtggctgggtctctcggctccgctgcctgtgctgggcaacatgtttctgtgtcacagtcggtccactgcccgcctgccggtgagcctggccagatcctcctcgggctcactgttcacattccggctccctccccgctccccgcggggttcagagaatcagagaacctgggggctccctccagggctgggtgagcatccccagtggggccgtggagagctggcagcgaggctgggtgtgctcctcaccaggtccggtccgtgcagcgcactctgtgcagagagtgggtgctgggctgggggaggcgaccggttggagggtttcgggctggcactgccaggccgaggcacggacccccctgtctaatatggggccggtgtttatggagcccggtactgtgctgtgctctggtgtggacgctgcagatgccactgtgaagagacaggctggtgccctcgcaggtcttcatggaaggagccacctggggcctgtggccgagcatgtgtgcctgtggggtggcgccagaggcctctctgaggactgggtgcatgggggaggccaggcaggcgaggagggcaacgtggccatgggcatgacggtggccaggctyggctccaggggctggtggtgaggtcagcttcaggatggggtggcctggacggtggagctgctcacatgctcagacccacgcaagggctgagcccgggactgaaatcctgtttcaggtgtgtttggctgctgattggagatgggctggggaggccagagtggaggcccaggggccctctgtgagggcatgggggtgtgggacctggggggtggcccgacctgggcctgaggtgctgggccagaggtggagctgggacagccaggagggctggggacctctgtgccctcgggcctgtgtcctgcctgccagtgctcccatgtggtgaggctcccagcatgcaatggtgctctgtagccggcatccaagtccccccatagggacaacggcgtgtgtgtgcacgtgtgtgcgcatgtgtgtgcttagcacctatgtggtgaggaagccattgttctacagggacctgataaatctctctccgtagagtctttggtcagatgtgcaaatgagagacatctttcccttttgaaaacatatatttacaaatcgaaataatagatatgatgaatttagctgtaatgtgtgacatcatctgctcagcgctcacttggagaaagaggacactccaggagttgaagctgccgtgccacccccatccacggtgctctcatcatctctgtcctttatgtcaaccgcacgtcgggggccagtggcgggggcgggtttgccttgtgaggtggggtcttgctgcgtgtgcctgtcggggagacccacatccttgcagaaccttcgtcctctcctggtgtgtctcccctccagggatccacaggttttccctcactgaatgtttaggtgtgtgtgaccggcaaggagcagaacctgccgcctacacagctgaaatcagaatctgcccctgtgttttggtgtttttcctttttgaaaactgtctgctgcttttgttgttgttgttgttgtttttgtttttgagacggagtctcactctgtcacccagactggagtgcagtgttgcgatctcggctcactgcaagctccacctcccgggttcacgccattctcctgcctcagcctcccaaatagctgggattacaggcacccgccaccatgcccggctaatttttgtatttttagtagagacggggtttcaccacgttgaccaggctggtcttgaactgacctcagctgatctgcctgccttggcctcccaaagtgctgggattataggcatgagccaccgcacctggcctgtctgccgcttttttcttggtttattttattttaattatatttaaattttgtcccaatcaagccagcggcagccccgcaggagcagagttttaggagacgtttacagtggctgggcctgacccgcagttcctgatggtacagtgcagccatggcggacaccgaggtcccggcaacagctcccaacaaaccctgggcttcctcacaccaggcagtggccaggctctacctggggctccaaaggcctcttctgcctcatggaggggcacgtgagccccacctgtgagggaccggaaaggtcgatgtggaggaagcccctgtccccacgctccagcccctggcaattgtttccctgtgtgcgtggccccccgaatcctgggtcccctctgcccctgcagctctgtggagcccagtgatgggggtggggggtggggggcggttcgtgaacaggaagtaggggttgccccgggcctagctccgggcctgcacacctggtgggctctcttcaggctggaccatgtgctggacttcccaagcgaggtgctggccctgggacatgtgacctgagcacagagagctgcaaaaaacccagagggcctgccagtggacgttggcgtgtggccccagccagctcgctgcagggcgcaggtgtggtgsggagacctggggctgctccagggtctgcagcctatgctggccagcgtggggaccacccagtgctgggtcggctgggcccagccatccacatcccactgatgctcaggcacccacaggctgggccgtggcagcttctctgctctgctcctcaccatccagacagctgcatctgctgcagggtttggakctggtgtctttgctcactaactgaagaagctcttgttctccagggtttatggttgggtttgggatgaggatgtaggcagatcgcttggagaacagctgaggcctgaacaggaaaaaacatctggaaaggggtcttttgagattgggacaaggagaggtcagcatcaggaggatctcaggagatgaggagtgcaggggagagaggccctgtcagaggaggggagggaggtgacgtgggcagaggagaggccctgtcagaggaggatgagggaggtgagttgggcagggcagaggccctgtcagaggaggatgtggggtgggaggtgaggtgggcaggggagaggccctgtctgaggatggtgagggaggttaggagttcatgggagaggccctgtcaggggagagtgagggaggtgaggagttcatgggagaggcctgtcagaggaggatgagggaggtgaggtgggcaggggagaggccctgtcagaggaggatgagggaggtgaggtgggcaggggagaggccctgtcagaggagaatgagggaggtgaggtgggcagggcagaggccctatcagaggagggtgagggaggtgaggtgggcagaggagaggcctgtcagaggagggtgtgggaggtgaggagttcatgggagaggccctgtctgaggagggtggaggaagtgaggtgggcatgggagaggccctgtccggggagggtgacggaggtgaggtgggaaggggcgaggccctgtcaggggagggtgagggaggtgaggtgggaaggggagaggccctgtcaggggagggtgagggaggtgaggtaggcaggggagaggccctgtcaggggagggtgagggaggtgaggtgggcaggggagaggccctgtcaggggagggtgagggaggtgaggtgggcaggggagaggccctgtccagggagggtgagggaggtgaggagttcatgggagaggccctgtcagaggagggtgagggaggtcaggtgggcaggggaaaggctccatcagaggagggtgcrggaggtgaggagggcaggggagaggccccgtcagaggagggtgtgggaggtgaagtgggcaggggagaggccccatcagaggagggtgtgggaggtgaggggggcaggggagaggccctgtcagaggagggtgtgggaggtgaggagggcaggggagaggccctgtcagaggaaggtgtgggaggtgaggagggtaggggagaggccctgtcaagaggagggtgtgggaggtgaggtgggcaggggagaggccctgtcagagaggggagagggaagtgaggtgggcaggggagaggccccatcagaggagggtgagggaggttatgagttcgtgggagaggccctgtcagagaggggagaggcgctgtctgaagagggtggaggaagtgaggtgggcaggggagaggccctgtcgggagggtgtgggaggtgaggtgggcaggggagaggccttgtcagaggagggtgagggaggtgaggagttcatgggacagctcctgtcagacaagacctgtggtagagaaatggtgtcttatcacatggtgagcctctctttcccattttctgtcctgttgagttagaattgtgatgttgtgttttgtggggtttggggaggctgtgaaggtgccctgttttgggggttcggggaggctgtgcaggtgccctgttttgggggttcggggaggctgtgcagggggcctgttttgggagtttggggaggctgtgcagggggcctggcactcctagggctgctccaagctggctgatggtggtttgggctgaggcccggttcccctgctggttttgctgatctgggacagtggcgctggctggaggggcccttgccccttgcctggccgtgtgcgtggccctckgctgtgaggggctgggctgtggctggagcccatgtccgctctctaggcttcctggtttgtgttacattttggcagcaacagctgtgtgttaagctcaagcttttgtttgttttcttttaagatggaggccttggggcagtggggtgggggttggaattctttttgggttttgggcgcatccaggaggggccggcagtggggatgggtcctggctgctctgtcccatggagcagggacagttcccgcgcattcgggtctctgcagcctgttcagtgtgggaccgtctgcaccagaggccatgggggagggcagtcttggggagcaggcggcaagaccccaacttgacagacctcagatccaaggctcaggccgcccagaatccccacrtacatgtcccatttctttcatttctttcccttttacctttttttcttttacttatggcttaaacagttactgtgagcgttgatagtagagttcgccagtggtgctggaagtgagttctgagcgaggtggttcctcctgtgacctgcagcccctggaacgccacggcccacaggaccccctccttcccgagtccccccgcagggccccctccttcccgagtccccccgcagggccccctccttcccgagtcccccactgaacagaggccctgctgggcggtttgtgggacctgacagaaaggtgggcagggctcttggaggtggacagcagcacctggcgtcctttctggagactcagcctttatgaaagacagtagagtcatttgtaaagaaaaataatgaatgatggtttgctctgtgcagtgtgtcatttttcctggttgcaaaaccaaattttcttggttttcttggaaaaamctcttcagaaggaagaaatttcagtgacacttagaacagagaattctcaaaagtgagatttcagcgccaatccccactctcgatttcaatgccaatccccactctcatgcttgttttagcctgactttgtttcttaggctatcagccagttcagcggctgcactgaggggcctcgggctggtgggtttctggcagtgagtgggcctcgccagggctggatcagacacctggtggtctccatgaccagagcccactgtgccagcagctcaagggcaaggggtggatgagatgcctcgacactgggcctctgactgtttcgggtgtttttaaatcctagagtttccattatacaattatttttcaaaatagccttgaagaagtggcttttatatagggaagaactaaatatgatcttcatggtcttttagaaaccctttctgtaaaacttgatccctgtagagagtgcaggagacagcgcagaaaagcctgtgtgtgcctccatcgccagtcgtgagcaccctcgacgcctttgggacccacggctttcgaagattaggtccagaactcagcctggcactggagagcttggcacgccttcccaagtcttgagtccccaggcagaccctggacggcacgatggctcatgcctgcaatcccagcactttgggaggccgaagcgggtggatcacttgagctcaggagttcgagaccagcctggccaacatgatgaaaccccgtctttactacaaatacaaaaaattagccaggcatggtggtgggcgcctgtaatctcagctacttgggaggctgaggcaggagaatcgcttgaacccaggggtcagaggttgcagtgagccgagattgcaccactgtactccagcctgggtgatggagtgagaccctgtctcaaaaaaataaatagataaacaaagctgcagagcctgggctcaccctgtgctggcctcctcagctgtcctgtccacccgtccaggttccgtcctctctcctgagaatcagactcacagactcatcaccaggggttccagaatcttctctatgtcaggaggggctcaggccccaaacacaggagccagcccccgctgctgtcttcagaatgcttatggcccctcccacattcctgtgttaacatcctgcccmcaaggtggtggcctcaggaggcctggctctgggggccgatgagatcgcaaggagaggactccatccccatgaatgcaatcagtgccctgaaagaagaggcctgagtgctgcctcaccccttctatcctacaaggacacggcaagaaggtgccgtctgtgaagagtggaccctcctcgtggaatgggctggcctcgctcttatcctcccagcttcaggtgccctgtggagcacacgtctgtggcgtaggccccgcaggctgcggtgttttgttgccgcagcctgagtgaagagaacgccttcccgtgacgcgtccagcgttgggtcagtgtggaggacccgataagaacgcttgctgggggatgccaggctgcactcagatggagggatggtgcgtggggcaagagggagccccgagtctgggcctggagctgctgccctctgtccccacagtggcccgatccacgtctcgagttgctctgaattcccagcactgtctcgtggcggcccgcagcccgtgggccacaatggagggcttcatctcagaagcttcccatactccttgcctgtcttccaagtgtggcgtccggaaccagctcaggatgcaactgctggttttagcctttaaaaaatgtgcaccctggaagcacatgggatgctgtatgaggaagacttctgtgtggctttcacacgtgacttttctggcccaccgagtttccttctaaacccccaggcatctggggtgaaggcccgtggccgctgctcagtggagttggaggaagtggctgctgggtgcggggaggctcctgaactctcggaacctggaagttcactgcgcttggtttgaccgaaggggtgggacccagcctgcattcgacacacagctttgcggctgcatttctgcccctggtgaagcagctgggcaggcccctttgcttgagggccccgtctttggggtaggaactggccctgctggagagtgggcagctgggactgaggtgggcacccttgcttgaagctaagaagacccaggagaaggggcgggctttgaggacagagtgggccctgggtcagtggagtgtaggcactgggttggtggaggagctggttggagactgaggggctgggaggccccaggctggggcaagrgggtgtctgccgctctgggcggctgggataaacaaagctgtgcagctgagcctctcagctgagaggctgcgaccttcatggcctggtgggcctggcacctgaggccctgggcctggggaacaggggcctcccctcttagtggtgatgggcttcaccctctgtagctgccggttccgggtcctgtggggagcggtgagggatggtcgtgtgcgtcgttttaggagcatgtgtgtgagcgtgaggatgcccatggccagtggacatgccttcctcctgtccttgcagccactggaggggaagcttcttgtccttaagtcagaccgggaggcagacgggccctgaaagaaccacagggtggcgtgggaggcagctgcagtgggaggtgcctgtgctttgttggttgtgaacaagcatccaagggaggaccacagtggcagatgtgcagtgtggggcatgtggcgtgcagggacgccgtgggcgtggtgtggggcacgtggcgtgcggggacgccgtgggcgtggtgtgaggtatgtggcgtgcggggacgccgtgggcgtggtgtgggatatgtggtattgggaacatggtggtgacgcaggatgtggtggtggtgtagaatgtggtgctgatggatgtggtgtgtgtgggatgctgtggtcacatgggacatggtgtatgggacgtggtggtgacatagtgtgtgttggtgataggggatggggtggtgacatgggatgtggttttggggttgcagtggtgacatgggacatggtagtgacatgggacatggtgacagggtagggtgtggtggtgatggaggtggtgtggtaatgtggcgtggaggatgcagtgtgggggacatggtgacatggcgatgtgtcatgtggtgatgggggacgtggcgtgggggatatggggtcctggatctcctgtagctctggccagtggcgagtggcaccatgcagcagggaggaaggccagcttcacgctgcaggagctcctgggcagtctgttctgggagtgaggatgtttgggggttgtggagccatcgtgctggccagttgctttgctgcgctggtggggagaggccgcctgaggtccttcgaagcagcctgggtctgtctgctccctggggtcagatgcaggccgcttctgcagcttcggcatcatgtcccagcccagccccgcagccttcacctgtaggaagattctgcaggctctctctccctccatcatctggtgactcctcaaacaccgcgccctggttggtggctgtattgattcttggtctcccagtgacgagctgaggtggggagccacgaagccacaggctgaggcagagccaggacagaccctgcttggccctgggctctggctctttgcaggcagctcagcagacagtccccgcccttcagagctcctgtgcagtgtggcttggggcaaagccaccctgtggctctctcagggcccttctgcctcctggtctgatctaaggacaagaagctttccctccggtgactgcagggacgagaggaagggatgtccaccggccgtgggcatgctcacactcacacacgctcactgcctgggtgagaggcggtggaggacccctttcccagagggaaggtctcctgtgagccacacctgaagggtgtggaggagcggctgttacctgctcgtgtggccagtgcagatcttgaatcctcagactgcaggtgaggtagccaggacatccattgtgaccttcttcctgttgacaaagacagtacatggagtggaagcttctggctatctgtgcattgcttcaccgagcacctgactgcgtctggcacgtggcgtgtgtggagcaactgcctgccacacagaagtctgaggatactgatcaaagcagaaaaggataaacattctttccttccccagttttgcctccagcatgatgcacaccccatcatatgtgtttgcctgcgtggctgtgggcaggtgtgcagtccacaagtgggtcatccacaagtgggcagcagacacatgtgcgtacagcttactctctctgccttttttgtaagctgggaaatctttctatgtgaattaatatatgctgtctatcttaatagcttcagaatattttatgatatagttaggccttaattttttaaagttgtttttctgttggaccttgaggtagtttaaagtttgcttgtgggaatgaggataaattttaaaacaggatataatgttgtctgtcatgcaaatataaaatgaataggtacttattcactttaaatacctattttaaaaatagagttttaaattgagataataaatgttgtttatttatcagggagagacccagtaagatgtagaactggttcagggaagaatccagaatgtaggcaaatagcttctcccatcagcagtactgacatgagtgtgcttcacggatgcaaggctggcactgtccacagggtcatgatccatcacatctgctggacattgtgcatttctgtggtcaagaatcatttccatcatcatcagcttttaaactcacagagttgcaacatagctcagagacaactaaaggtagagataacccaaataggtgagctaaatggaggcactctcattattgctcattttaaagtctttcacagtttttcctgatggtaattttaagaatgatgtgataggcagtgtctgtttccagctaacatggaagaagagtgtattaggccattcttgctttgctgtaaagaaatacccgagactgggtaatttatgagggaaagaggtttaattcgctcacggttcgcaggatgtgcaggaagcttagtgctggcacctgctcagcccttggaggcctcatggaattttcagtcaggcagaaggcaaagggggagtagccatgccacacagtgaaagccagagcaagagagagcgagtggggatgaagtgcacacaccttcaaatgaccagacctcatgtgaactcaagagtaagaactcacttatcaccaaggggatggcccagtccattcaggaggcatctgcccccatgatccaaacacctcccaccaggttcctcctctaacactggggacacatttcaacatgagatttggccggggacaaatatacaaactgtatcattctgccccagcccctcccagatctcatgttcttctcacatttcaaaatacaatcatcccttctcaatagtccccccaaagtcttgactcacctcagaagtcccatgtctgatgacttctctgagacaaggcatgtcctttccacctatgaacctgcaaaatcaaaaacaagttattttctcccaagatacaatggggatataggtattgggtaaacatttctgcttcaaaagggagaaataagccaaaagaaatgggctatagcccccaggcgagtttgaaacccagtagggcggctattaaatcttaaagctccaaaatcatctcctcagagtctatgtcccacactcagggcacacaggctcaaggggtgggcttctatggccttgaccagctctgcccctgtggctttgcagggttcagcccccaggactgctctcatgggttggagttgaatgcctgtggcttttccaggcacagggtacaagctgccagtggatataccattttgggatctggaggatggtggccccctgctcacagatccactatgcagtgcactgctggggactctctgtgggagctttaaccccacattttcccttgacactgcccctatagaggttctgtgagggctgcacccctgcagcaggcttttgcctgggcacctgggttttcttatacatcctgttacccaggctggagtgcaatggcatgatctcagctcactgcaacttcagtctcccaggttcaaatgattctcctgcctcagcctcctgagtagctgggattacagtcatgtaccaccacacctggctaatttttgtatttttagtagagacagggtttcaccatattggccaggcttgtcttgaactcctgacctcaagtgattcacccacctcaggtgctgggattacaggtgtgagccactgcactttgccagcattcttcactcttgcattctgtgcacctacaggcttaacacctgcatttttcaaaatggcagcctgggctgtgtctggggccctttgagctgaggctggagctggaacaacctagatgtggggagcactgacctgaagctgcacaggacagcagggtcctgggcctgacccatgaaaccattctttcctcctaggcctcaggacctgtgacaggaggagctgctgcaaaggtctctgaaatgccttcaaggcctttttgtcattgtctcgtctgttggcactcgactcctttttagttatgcaaatatctctagcaagtggttgctttacagcctttttgattttctttcctgagaaagctttttctttctttgctacgtggccaggctgcaaagttttcaaacttttgtgctctgcttcccttttaaatgtaagttccaactgtaagtcatttctttgctcccacatctgagtgtaggctgttagaagcagccaggccacatctttcttgagcactttgctgcttagaaatttcttccatcagataccctaaatcatcactctttgcttcaaatttccattgatctctagagcataaacagaatgcagccaagttctttgctaaagcatatcatgggttatgggaatattaatataatttatgccaataaacttgaaattttatatgaaagaaacttttttttttgaaaaacaaaagtatcaagaagaaataatgaactcaatagtcctatatctattcaattaaaaatttgcccattacctttccacaaaaaccctcccagcccagatggcttccctggtgaattctatatttaaacaagaaacaacagaaattctacagagcctttagaagaagactgagtcacagatgatactttttgaattattctttgatatgaacattagaaaaattcaaaccaacattccccatgaaaataaaggcaaaaattattttcaatgttgtaaatcaagggatgcaagcctggtttaacattcaagaatcaatcaacagaatttaccatgtcaactgattraggaagaaaagccatatgatcatctcagtagatgcagaaaacgcatttgacacaattctgtaaccatttctgataaaaactcttagcaaactaggaatagaaaagagcattctcagcctgtaaagggcatctatctacagagccccacagctcatgccacacttaaactgtgatagaggaagtgcttatttacctgaagactgggaacagggcaaggctgcctgatcttacttctcccatgcagtatggtactaaaagacttagccagcacaatagggcaagaaagtgtgaacacaccatattggagacaggtctcaaccaatttagaaattttattttgccaaggttaagaatactcctgtggcacagcctcaggaggttctgatgatgttgcctaaggcgattggggcacagcttgattttatctattttagggagacatgaggcctcagtgtgtgttcatgtacattggtttgttctggaaaggtggtaccgcttgaagcaggggagggggctttcaggtcacaggtagataagagacaaagggtcatattcttttgagtctctgattagccttttactgaatacacagtttacatgtgagggggtagaggaataatcacttatgccttagtctggctcagtgaagtggtagggcagaggaagccatcagtcatgcgtttgtcccagaggagcctcagagggatgactttgagttctgtctgtcctttgtccataaggaattaccttgtgggaaaatcgtgaggggggtatgtcttttttttttttttttaaatctgtgtagctgtcttatttaggaataaaataggaggcaggtttgcctcacgcaattcctagcttaacttttcccactggcttagtgattctgtgttcccaaggtttattttcctttcacaaaaggaaacaaaagtcatacagatttgaaaggaagaaatagaactttattggtagaagacatggtggactatttagaaaaactgaaggaatccataaaactttactattactattaagtggatttatttagttttcaacatacaaggtcagtatgaaaacatcttgtttacattagctatcaataattggagacttaaaaaatatttacaatagcagtaaaatgaaatagttgggtataaattggtaaaatatgtcaatatctctgtactgaaaagtttgaaacactgatgaaagaatcagagaagatataaagaacttgagaaatataccatgttcatggattggaagactcagttacactgacatgttagaacttgagaaatataccgcgttcgtggattggaagactcagttacgctgacgtgttagaacttgagaaatataccgcgttcgtggattggaagactcagttacgctgacgtgttagaacttgagaaatataccgcgttcgtggattggaagactcagttacgctgacgtgttagaacttgagaaatataccgcgttcgtggattggaagactcagttacgctgacgtgttagaacttgagaaatataccgcgttcgtggattggaagactcagttacgctgacgtgttagaacttgagaaatataccgcgttcgtggattggaagactcagttacgctgacgtgttagaacttgagaaatataccgtcbttcgtggattggaagactcagttacgctgacgtgttagaacttgagaaatataccgtccgtgttcgtggattggaagactcagttacggtgacgtgttagaacttgagaaatataccgtccgtgttcgtggattggaagactcagttacgctgacatgttaattccccactaaccaatctactgagttagtgcagttgcaaccaaaatctcagcaggattttttttttgtagaactctataagattattctaaaatatacacaggaaagcaaaagaactagaatagccagaacagttaaaaagtaaaaacatactaatgtttgggggcttatattcagatttcaagacataccataaagctgaagcaatcacaacagtgtgctctttgtaaaagcacagaaatacagatcagtggaacagaaaagagattaagaactagactcacacatacagttaggattgaccagggggtaaaggcaatttgttaaagaaaggaacagttttttttttttttcaacaaattgtgcaggaacaataggacatccatatgcaaaaagttgagaattttaatactttataccatacacaaaaattaactcaaaatggatcttagagctaaatataaatcttaaaaagtacaaaagttctagaaggaaacttaagagaaaatctttttgaccttggattaggcaaagatttcttagatgcaacagcaaaagcacaattaataaaagaaaagaattggcaaattcaaatatatcataattaggaacttctgctctttgttaagacactgtgaaaagaatgaaaagacatatcacagattggaggaaaatatttgcaaattacatatttgatgaaggacttgtatctagaatatacaaagaactctgaaaagccaataataagaaagcaaagaacccaattttaaaataactgaaaaattttactagatacttcactgaagaagagaatacaaatggcaagtaagtgcctgagatggtgctcagcttcagtagtctttcgggaaatgcagattacagcaacataatcagtacgtgcctattagactggctaaaattcaattggctgtaaaaacagtacagaaaccctgacaatactcagtgttgatgaagacgcagggccaccggaagtcctatgcctgctgctggccctgcagatccctatggccatcagggaatctgtcatttcttataaagttggacgtgtggccaccccctgacccacgcacgttgctcctgctcaccggctgacatgatggcgcctgtttgcacagaagcctgaagcaaatgttcacagctgcttcacctgtgatccccgcctctgctgcgtggttccatttctgggtcacatggaagcgggggagctgtgggcacagagatgagcggttcttacagaggcctggggtctttgaaggagtttgaagtgtgagctcgctgttttggctgtggtgccacttgcacaccggcatgcccgtgcttcacaccggcgcgccctcaccagcacacctgcacctcacaccggcacgtgcacttcccaccagcgtgtctgcacttcccaccggcgtgtctgcacttcccaccggcgtgtctgcacttccaccggcgtgtctgcacttcccactggcgtgtctgcacttggggaatgtgcatttccctttggcagctcctgtcttctgtgcggttcctcccattcccacctgtttggtgcctggcatgtaggccgtggtctctgcccgttcagcacctccatacatgctcaggactccccacctttctgttcaaacccaaacccctcctttccttccagactcttggttccagctgcctggatgccctgtggcctgccggacttagaatgtccagaggggcttctccgtcctctgctccacaccccacccccgccctggcctgccccacagtgtcaccctcctggctgacacagctccatgccgccggtgccagggcccacaccgtggcatctgcctcttctcccatgtggcatcgcacctgtcagcaggtgctgccccgccaccctcagaggctccctggcatctggcattggtcactgtccctgctgccaccctgcccacgccacagtccactctccttggttggttgcagggcctcctgctcctgcctcagttttctcacaggctgagccttggaggccccgccccttccctctctccctcccccctccccctccctccttccttccttccctccctccagctggccttgctctgccatctcaggacctcgcacaggccaccgctccctctgacggcacctctgctccctgcctgtccctgtccttccccctcacgtggctcaacccaaggctttccctactccgctcctgtcatcccaccccacacccctttctcagcaggatctttttctgtggccctgtgtctttctgaattactgtatgatttcccagcttctgagtcaatgcctgggctagggagggaggcagtcaataaatattcatgtcttggtttgaggtctcccaaaacacaccccargcaggattccagtgaaagcagttgagctgggaggtgcaggaaaaaccagctggggagtgggtagatgagactaggaggggaggctttgggagccccttgaggcacaggggtctcagactggccggcagctggctgaggggcactgaagggcaggcccggggacatgggagcctctgctgcaggggcaaggggtgacccctggccagtcctgaggcttcctgaccaaggtcgggccctgtgactctcagttcctttctttggctgaggtcaggggcgtgccttggccctgggcattgcacggagcagggggttctggagggggaggtgccatcctgcctggcccaacttcccactcacctgaggctgcttctctgcaagggctggcaggacttctgtgtgtgtgtgtgtgtgtgtgtgtgtgtgtgtgtgtttgtgtgtgtgtgtgtacagtgtttgtaaacttgaggtagtttatacacagtaaaatatattgatctttggtgcatgtttcttcgattttgacaaatgcgcacacctgtatagtgcccgccccaacataatggggaatttccatcttcctcttccctgctgccccgcccctcgggtaccacagatccgtttttcccattccagaacgtcacacgctgagacccagggaacgtggcggcacccgcctgctttccctgtgctagtgtgttgagccagttccgtgttgtcacacactgtggctcagtgctgtcatcacgagcactggtcctggatcctgctgtgtggggcccactctgcgctccccactctccccttggtgacacctgggctatatccaggttcgcctggttaaacaaagctgccgtgcatgtggacacgcaggtttcccgggacacacgccttcattctgcctgggtccattcctcagggagactgttggctatagggtgggtgtgtgttgaaggcttcaaggagctgcccaggtgaggtgcctggtcacgcctgcagccagtaggtgggagtcctggtcactccatgtgtctctcacagttggtgctgtcctttgcctttcggctccctgacaccgctaagtgcctcgtagcaatatacagttgtgggagctggygtgttcaagatcgcagactgtgcaattctttctctctgttctgaagtgagattttgtgggtgtgcacaagagccctctgtcagtatccacaaggtggattctggtgttcgttttagccagcacttagattctttacagacagattgtcaaggcttgctgtggaatgcacacgttagcagtctgctgtgccctgtggacagcccgagctcacagcagtgcaggggttcctgtggcgactgtgggaggccccttgttggctccgtgtgaggccctcccagctcatgccccactgccctcgaagggtcgtgtgttctgctagagtctgtttggctgtagtttggtcctgtgcttggcactggggcggggtgggtgtcatagaccaaattgtgtccccccaagttcataggttgtgctctgaccccagtgtaatggtattgaggggggtgggccctttgggaggtgatggggtgagatgaggttatgcggtgggccccccggatgggatgggtgcccttacaagaagggacacgggatcaggctctctccacagggcgcagaggcagctctgtgagccaggaaggaccctcaccaggaaccaaaccggccggcttcttggcctcagactgacagctccagaactgggagaaatacgtgtctcgtttaggctctctggtctgtggcattttgtgatggagcctctgccgaccgagggaggggctgagggtggacaggctgggaatacctcaccttgggtgctcccaggaggcttcacggggagaccggggccgggagctgctgctggctccacacctgtcctgagagggtctgtcctggccgctgagcaggtgggtctggagggcggtggggctggcggtgctgggcgcggctcccaagatgcgtgcagctgtccgcggtggctgcctcgtccagcagcgtccctgccagaagtgggtgctttgagggccagtgcctggtctgtcccgactccctctgtgtccccagctgccagcaacgtgcagcggatgacaagtgaaatgaacgagggagtgagagccgaaaaagacaccttccaggaatcgtggtgaaagcagcgagcacagtgtggtccggggctgggggtgtgagatggctgggattatagtgagaggcgagacaggggatgcagacgggtagatgccacagggcctcctcttccccgtgaaaagcttcagactttcttcatcctcagggtaacggcagccacggacagatttgtgaggacctttggttggagtattggaaaccgggaggggtgaggccgtggagagagccgtgtgggggaggtgcccaggctggagtggcggcgtcgggtgtggagagaaactggagataagggacgcgaatctgactcggtgactttgttgttgatgttgatgtcttcactggttgccattgcccaggagggtgtttacagcacagcgctctgatcagcagctgcggatctactcttggtgaagagcaaccrttagattaggctcaagtgtggaaattaaccgcaaaccagattctaaaagcagacctcctgccagtggtctggtctcctttggaagacagtgtgatccttgtctgcctgacgcagctcaggcccattcctaccagctcagtaagggccggcatggctgagagcccatcgtggaccctgggaggagactgatgggaggctcccctttctgggctgtgtaacctcaccgtgccccgcttcctcgtgagcatgcacccatggctggcaatgactgtgaggagtgacagagtgaattccaccgggccggcagcaccattcaggaagcactaactgctgtgagggcctggagccctgtgccctatggtggccgccccctctccctccagatgtgctctggtggcgggggggggggggggcgtggcgtgggggacacgtagaaggaaacatggctgtttatttcctttccggatggggaaggcttttctaaactccacatagttgaaggaatttgtagaggcaaagactgatggattcgagtaaataaaactggcaggacttttcttaggctcttagagtttaaatgtgattaaaaggcagactgggaatatatttttaaaaacaacaataggctggtttaacaatttttataaagaactcttataaatgaaagagaacatgtaaaattccaatagaaagatggtcaaaagcttctcttagaatctagcccagccccatccaatagaaatggtgtgtaaagtgcatatgtcatttcaaagtttgaagagtcacattttaaaaagcaaaaagaaataggtgaaattattttaataatatattttatttcacccagtgtatctagaatgttatcatttcaacatataatcagtatacagttattaatgagacatgttatctgtttttgtgtggccttcagaaccgggtgtgtttgaccctgagccgtggccgcacagatggcaggagcgaggggaggtggctgccaggtagtgccccttccttgcttacagctgaagcagcacctggcattcccattcttggcctctgggtgccgagggtgggtccatttggctgcctgacgtgtgtccccagcactgcagatgggtggttcctctttaagctacctggtggtatacagcagtggcctcaaacttgctcttgccctctgaccccagccctcccctcctaagagctccagaaacacagactccacgtgagggaaccccagctctgttgtagggcagtgcgctgcccgcctgctcaacttcaggtgacgaatggccccatcctctcgagccagggccctgcagctgttcagtgtcttcatgaactttcagtgactcaggaaagtggctgaagataaaaatctcatcgtacatctttgaagggagttgtgttacatttgcatgcatagcggaagattggctgtggggcgacgggagacctgaacrgaaggttcttctgtgtcccctctttttctggaagtctccagtgtggctccagggttggtgctagtggctgtggaatgagtgttcacttgctgctgcgtggtttggcccttccctctgcattgtgcggacagccctgtgctgcggcagttctccacatgcattccacacgtgagcatccatgaggggtgggtatccacaagggaatggcatccacgatggccaggtggcctccggggaagctgtcctccagggwaggcatccatgagggagggtccatgagtggagggtatccatgagggaggggtgtccacaagggcagggtgtcctccaggggaagctgccctccagggaaagacaatcataaggggaaagtgtccataaggggaaggcatccaagaagggtgggcgtccttgaggggagagtgttcttgagggcaaagcgttcttgagggaacgtcatcctcgagggaaaagcatcctccaggggaaggtggcatccatgagggaaaggtgttcatggaggagggcgtcctcgaggatagggtaccctctagggaaagacatccttcagaaaggcatctatgaggggatgatgtcctccaggaaaaggcgtctatgagggaaagccrtccatgaagaaaaggcgtccatgagggtaaggtgtccatgaggggaaggcgtccatgagggaaagctgtccatgaggggaagacgtccatgaggggaaggcgtccatgaggggaaggcatccttgaggggaaggcatcctccagggatatgtgtctgtgaggggagggtgtcctctagggaaaggcctccatgagggaaagacgtccttgaggggaggtgtccttgaggaaaagatgtctatgaggagatggtgtccataagggaaaggtgcccatgaggggagggtgtccttgaggggaaggcaagctctagggaaaggcatacatgaagagaggccatccttgaggaaaaggcatccatgagggaaaggctttcatgagggaaagatgtccatgaggggaagacatccatgagaggaagacgtccatgaggggaagacgtccatgaggggaagacgtccatgaggggaagacatccatgaggggaagacatccatgaggggaagacatccatgaggggaagacatccatgaggggaaggcatcagtgaagtgaaagtgtccatgagggtggggggcgggtggggcctcggtcgcacctgccatgaccctggacttaaccttgccctgccctgtgcggtggtgggggccgggaggcggcgggggcggcgggggacgtgcttcttaaactagagctgatttgtgggagcttcgatggcccaagcccggactttgttcgggttagagccctgcgtttccacctctgcccgtggcgtctccggcagcagcttctggctccatctgcagatttgcttaagtcacttgccctatctctggggggaaggctgctgcatgtggtcagtgtggtagaacccacagtctccccaaaaaacctctaggctgtgcttgggtggggcctgctgggtcccacacccctccccatggtggcccagccccacgcagggccaaggaaaggcagctccagatcacacaggctggccaggctgcctgcggtgaggtcatggaaactcatggtgtcctgtgtgcagggcggagagaagaacaggcccctgcccacacagctgctccgtgtgccctggccggtcccatcggctgcgccttgaggaggctgtctgaccaggggcctgtgggaacctgggtctggttggtcacaaacaggcctctttctggggtcccagcacccgttgcagcccagcccagccccgaagggacctggagaggagagcccccacccagggcaagggtgggcagcggggattttaaacagggtgttttccaggcgtcgttggcaagtaactgtggcctttttctatcaagaaattcccgtgtccctctgcgcgccttatcttggcatggggcttccactggggtgctgtgcaggatgtaattcctttttaggtcactccgatactcctctttggagaacgcctgacagggcctggctgttgctatttttaacaccgagtcttggccgtgccgatggacgtggcctgggcaggcctgtgctgcctgtttcctgggaaccaggggcccttcgtgctgggccccgctccgcggcagaagcagggtgctgcttgtttggctggtgaacgtgctttttcttgccatgcctttccaagatatttttcctgggccttcctatgaagcatccagttcaaggacactataataaaacaacccatgtggttttattgactgcccttttttcctttaaggtaggagcacctgctttttcactgtagaattttggtgaagaaaatgcacagctttgggccgtgacttccccgatagttccaaggtcacgcatgccagtgtcattgtcactcagggcgtgaagtgctgagcagaagctcagactcgtgggtggagatgtgcacccccatgggggttgtgtctcttcacagccctgcctggtaacctggggacactcggtcacatctgtgctttgcagcagtgtgtttccagccaggcctgacccaagcgtgctgtccgacactgtggcgtggcctttcctgtccatcctctgcggtccagcaatatgttttgttgaagggatctttgtccaggatcgtgcaggctgcagaggctcccaggccagccctggggagctgcttggctttctgcagctgcctagagctctgtgtgtgtccctgtcctcccggatgccagggcgcctgtgtcccctgtggctgtatctctctggcacgggccaacgcctgtggtgtgagtagctgtgtctggctggtgtcacctcactctgtccagcctgtgctgagcctggatgccagcattgttgacacctcacagcgaccgtctcaggaaggcatgtgccgaagtggatcctctgagaggcaggaaccaggccccagaattcccgccaggaaggggtccagcaggagcccgtgcccggtgtgcttcctggaaagcccacacttccacccaccaccactgcaccccgcccagattgtcatgggcactgactgaattgatcaggaacttgggagccaggtgtgaaatgcagccattattaaaaatcaaattatataaacctgtaataaagtaaatatattaaaaccaaaggcaataaatgccccacactcatcccttcctaattattgtactgttacgtatgatcttgactatttagctctgtgtctgggtgagggaaatactcacacagtatttgatgtgtgaatgatggtgccttgccgagcacctctcctaccccaggttcagtgatgccacatcggtggcttagcgttggccatggcggggcattcacacctcggaagggcagtcccagggcctcgcctggagagctagtattgagagctttcgagcacaccactgcctggggagttggggggctggttctgtctcccttccccatggaggaggcctctgtccccagggcaggggctcctgggtgctggcttacttggtcaggtaaagacattgcaacaaaggtgccctgtccctggctgccttttgtggtggtgctagccacccatcagcttcagtagtgagctcccggacctcagcccctgcctggctccctttagtgggcgaggtgcttgaatcctggctgttgggagtcattgctcatcagtgaagcatttacatttacccggtacattctgcagcttcactcacttgcagaggaaatatttttttttctgttagccaaaaatgtccaatagtaggtcacgaaaacccatcctcttcaaatgagctattttgagtttctcgccttgtgcagtgactaaatctgttttaaaacgaagtctctgatgtgcgtgtctgtcggctctggtgaggccactgcaggtgcccaagcgtggagtgggttcgtactgtctgagcctgggcaccgcacctcctccagagctggcaaacagaagtgttttcaagctgaatccccaagcaggacgttggtaagaaacagagattccctcttttctccctggccttgccattatgagaccaggaaagatcacagacctcagagaaggtcatgatttttccattgttcagaggcactcactcgaaggccctgggggtggctttgcgcagctccagggctcctgccttgggtgttgctggctggagggaatgtgttttttgggtttctggttttgttcctacagagttagttaaacagtgagcacgttcagcaaacttattgtgacgatttcaagcccatataaacatggagagaatcctttccgtgcccagcacccacgctcagctgtgaagctcgtggccagttctgcttcagacccctccacctgctcttcccacccctgagcatttgaagcaaaaaccagacagtgcatcacttcattcgtgactatttcagtaggtatttcaaagaatacagaccctacacagtagctttatatctaaaaagatgatcagtaattccaacctattcaatatccagttaggatttagatgttctcagttgtctcataattgttttttacagttcatgtgttacaattaattgatgttttgatggaaattgttttgtagctttcgtgaagttaggagtgccatctcccttggcgggtgtgccccggagaggcgtgtcatctcccttggcaggtgtgccccggagaggcgtatcatctcccttggtgggtgtgccccggagaggcgtatcatctcccttggtgggtgtgccccggagaggcgtatcatctcccttggtgggtgtgccccagagaggcatgtcatctcccttgggtgtgccccggagaggcgtgtcatctcccttggtgagtgtgccacggagaggagtatgcattctgtgttctgcaggtgtcagatgtggttttctgtcgtgccaagtggaccacggagcttgactgtgtcctgcatcttgactgcttgtgtgtgttggtctagatccattgagtgccaagggagggcgctaaagtctcctacagtggttgtgggattgtctgtttctcctttgttctgtcaacctctgcccagtgtgttttttgttattagccatatacacatttgtggttgtgctgtcttcctgagagttgtctcggtcatcacgaatgttcttcttcgtctcctggagccttggtccaatgaatgttgccgccactgcggctcacggtggccctcccaggctctcggccggcagccctgcctggctcaccgcagccctcccaggctcatggctggtgtggtgtgtgctttcctgtttgctctctgtctgtttgtgtctttatcctgaaagtgtgtctcttacaggcagtgtgtccttcagtcttgttttttatccaccctgtagctcccagccttgcaattggaaagtccagaacagcctcagctgacggaacttcctgatgagagttccagtctgtggcattcacaatggcagccactggccacctgtggcttttgatggcgcatatttgaaatgtgattcgtgctgtcaaagaactcagtttttaaacatttatttcgttttcttttaaatagccacatttgacttgtgacagctagataacacagtgccagtctagaccactaaccctgttataactgttgatgtggttgaattggggtctgccattttttatttttctgtttgtacactggtttttgtacccttttcccctcattcctgctgtcttttgaattatttaattttttttggcattccatttttatttctttattggctgtttgcctttttaaagatttttttttttttttttttttttttttgagacggagtctcgctctgttgcccaggctggagtgcagtggcgcgatcttggctcactgcaaactccgcctcccgggttcatgccattctcctgcctcagcctcctgagtagctgggactacaggtgcccgccaccatgcccggctaattttttgtatttttagtagagatggggtttcactgtgttagccaggatggtctcgatctcctgacctcgtgacccgccctcctcagcctcccaaagtgctgggattacacgcatgagccattgcgcccggccctttttaaagatatttttaaagctacttgggagggtgaggtgggagggttgcttgaggccaggagtttgagaccagcctgagcaacatagcaagatccctgtctctcgaagatttaaaaaaaaaaaaaattagctgggtttggtggtgcacacctgttgtcccagcatcaggaggctggaggctaagccagaaggataactgaagcctgggaggtggagactgcagtgagctgtgatcacaccacagcacttcagcctgggtgacagagcgaaatcctatctcaaagacaaaaaaaaaaaaaaaaaaggcatattcaagtggttgctagttaatattgtactacttcatgtgcaatgttgaaatcttgaaatcacataggtttctatatggcatgtattccatctgtgtacgttgaaaatcccagttggaaatattatttcaaaaaaatgctttattggataaacaaaatgtgtgtgtgtgtgtgtgtgtgtgtgtgtgtgtgtattttctataccacacacatatatgcaatgtaatattcggccataaaaagaatgaaatcgtcttttgcagcaacgtggatagaacttgctttacttcttccgtgaaacagctcagaaagtcagtccacatgttctcccttctaaatgggagtgagggatgagagtcacctaagggtacagtgtgcacacgattcgagtggtggttacactgaaagccctggctttagccctgtgcaaaacagccacgtcacaaaactgcactgtaccccttacatgtatacaaatttaaaaaatgaactcagcatcagcaaactgcactccctccaccctggtttgcagcccaagccagcctgctgcacgcctttggaaatcgaggttgtggacgcacagccacccccagtcgctcctgtcccttggggctgcccttgcgctgctgagcagggaccacagagctcccatgtccatttggttatttatggaagagaaccagccctgccttcctggattcctcagaaagggctgatgggggcaaaatttcccaaatttttgtacgttgaaaactgttttgtatagttttggaatttgaaggatgctttgctggataaatcgcccttggttcaggcctcatttcactgagatgtttaggaaaggtcattctgttgtcgtcttagtgcgtatgttgggtttgaagagactggtgctggtccgattctttacattttatttttatttttatttttttctctttgagatggagcctcgctctgtcgccaggctggagtgcagtggcacaatctcagctcactgtaacttccgcctcccgggttcaagcgattctcctgcctcagcctcccaagtaggtaggactacaagcrtgcgccaccaggcccagctaatttttgcatttttagtagagacggggtttgaccatgttggccaggatggtcttgatctcctgaccttgtggttgatccgcccgctgcctcggcctcccaaagtggtgggattacaggcgtgagccacctgttgtttaattgatcttttttacctggaggccatgaggatcttatctttatctttgaaatcttggagttgattactttgggttaattttctgaagtattcagtgagcctttcagtgtataagtgcgggtctttttctgttttgaagttttcctgggttatagttttaaatgttaggtgtttcaggtgagtgtgtaagtgcgggtctttttctgttttgaagttttcctgggttatagttttaaatgttaggtgtttcgggtgtcctttgggtccctgatcctccaaatgttcctccttctctgcctgtctcccacggtcacttctttctctcacgctgttttctctgtgcgattttgctttctcagtggatttttctggttttgatgcccatgttggggtttccttccagtgactctcctggcgcctgctgtggctgtcctcctctgtcatgactgttctgtgctttgcctttgccgcccccgaggttgatgggcgctctccgtctctttctcccagtggtccattctgtgttttagtttcgcatctctgatgtgaggtggtttttcatattctcgactgcttgagtagatttgattttatctgcaatgtgggctcccgtcctgttctgcctcacggtcgttttcctcaggtcgggcacgttttcctcagtttgtgtgtgtacaattttttgtcttttttttacagccgttttgtagggacttccttttgctcatctttagtgggagtatggggtttgcaagattcctaatttaatagcaccctcttgtgttggtattgcaaagtccaagtgcattcgctggctttggaagttgggcagtgattggggtctgggagttgttcgttctctgatttgctggcgctctttctctttcaagtccctcttttcctgccttttcttcctttctcctttgccacctggtgactcagggctgctacttctctctctttttagaaatatttttctcttcttcgttggtagtgtctcagtagtgcccttgaagcatggctgtcctgctaggctgggcctcccactttccatcacagcagcctccaagtctcgccttgtgttccaacccacgctcggatgtgctgggatgctcttccagaatcttcagcctccggacttgctggctgtgtgtttgactctctgtgtgtctcttccctggtgtctcccttccctctcttgtggtgtttcttgctgtgcctttgtgcttcacaaagcctcacaccccagcgggggcagtcccggagcccgagagatcaccttctggagtctggatttttcctcattttattcactgctatttgtagctcccaattttattttatttatttatttgtttattttttgagacagaatgtcgctctgtcacccaggctggagtgcagtggcacaatctcggagcactgcagcctctgcctcttgggcttatgtgattctcctgccttagcctcccaagtagctgggatcacaggtgtatgcaaccatgcctggctaatttttgtatttttagtagagacggggtttcaccatgttggccaggctggtctcgaacttctgacctcaggtgatccacccgcctcggcctcccaaattgctgggattagaggtgtgagccattgagcctggcagcttccactttttcttcaagccacgctgaggctgcaatttgggtttttctctctatataagttacatatatatatgacatagtttatatgttacattcattatatatcacatcccctgcctacatagaaaattggggagcaaatttttgggactaggctgtcttcagctaccctggaggctcattctatgtattttaaagaacccaagaagaaaaaatataatcttttatatttacccagatgcttcccatttttcctgcctttccttattcttggagatccaagctgcccccagatcattcccctccagccctgcccagccatcagtttccagcagacctgctggtggaacatttgcttagttttcttttgtgtgaaaatgtttccctttgccttcattcctgagggatattttcaatagatactgacttctgggttgactttttttttttttttccttaagcactttaaaggccttgttccactgtcttttggcctccaggtttcctgataagaaatccgtggtaatttgaattgttgactccttcctgtatgtgtgttctgttacttctgtccagttggtttcagaagttttttctattaatacatctttgtttttcctcaatttgattatgataaaatgtggcacagatatgcctagataggaatttctttgaatttatcttgttatttgtttgaatttatcttgttatgcactcactgaggttctagaatctgtaaatgtatgtctttcactaaatttggggacattttggccgttgttttttccaagtgtttttctcatgcaccatctgtttctcctctccttctgttgctccgactacgcgtagagtagatgtgatgccattttctggaggctctgctggcttttgctgaacctttgtgctttctgttctttgatttcagtaatttctactgacttattttcagatttgccagctgttctctgtcatcttcattttaccattgagttcttctggtcatttattttagatgttgtataaatgtttttagtttttgaaatttccatttgtttctyctttatagtttctgttgaaattttctgtcttttcatttatttcaagagtatttactttgacctcatggagcatgttgtagttgttgcttgaaaaccttcctctgctgtgtccggcattggtgttgtcttagtggtggcatctgtctgtcattctttctattaaatgtgggccatgttttcagattccgataactcagggttgtgtcctggtcattgtggatgctgcgttgtatagacactggcttttcttacggttctcagcatgcacgcattcaccctgatgaggtacagaccataagctcagtctcatgctgggtgctggtcagagcccacctcactgctcagagcctctgctcgctcacgtgggttgtcacacatgtgtgtgtttggggttattggagactcaagcggcttcatacacagacttagggttccctcttcctagctcttccctccagggttgccccacaccgtccggctagcctgggyttctttctgttgctcttctggccagagagagggtggggtttcctctggatttgtagggtccacattctgctgctcccgtaagtgtggcccaggcttgggcaaagcccgaagagggaaagaataagaggctcgccctgtgtatcacttctccaggctctgactcccggcgctgcctgtctgcctctctttacctctcagcctcctcgggcacatgttttgtttgtagtgtgtggttgtcctcggcgggaacagtggcctccgagggccacatgctcccatggcaaaaccggagcccctgctgatatgcccttgtagtgccttttagttgatgcgtgtctctgtataccttcttttctctcggccgtttcctgttcttctttgcccctctttgccagcacttatctgtggaaggcatccagtgtcccccacacagtgtccgtggtcctgtggctggaggtgtcctgtggctgtgctcagcgtgctgtctcccatttcctggaatcggcctccgtcgagatccgacgtgggttcagtttttccgccgggatgctctgccatggcgttacagctttcatcgggaggcatgtactctgytcacccctctgtctgtgtctctttgtggtattagcagctgctggtgttcactgcctcgattcactgcgtcattaagaattgtaaaatggctgtattctaattctaccatttctttttcactttttggtaggagtgtttctgtaaagagggactgtgtcccctgtgcttttccagagacactgtttgtccaagaaaggcaggataacacgttgctccattccccttatttgccagttttccaaacaatgtcgggatttaaaataacaccctgatttcaagatgaccaatgcctggagactctcaggctcattatgtactcatggatataaactttcttgttgtgccgatccattctagaccataattctgtctcctagatggagtttataatatgtgaagttatatttctccatacagctaactagtccagctatccggatagatctaaccaggatgtcttccttctccttcatgaattcctcagacagtttgcctgtgcctttgtggagtgagacgaccccgtgccagagggcgattttctgagcccagtctttcagcagaagctccagggactgggtgttaactcacctgcagtctgttccagcacagcttcgcaagggccccgtgttgtaaactgtgcgtggaggtagtttgatttgtgggtgtggaggaacaatagcatcatctgctgccattcagtgccctgctcttttctatagtcgttcattgcttttcttctgaaacttctcatggtaaagatcttatcattttgataacttggttttcaaaggaagtgtggcctttcgtctgtttggggtacccatctccataacctgttgcagatgtgtgggaaccccgggcttctcctgatgcaacattctgtgtttctgaagcgtcctctcacttcagctttgagggcgtcatcacccctgtgcatggtcagggtgtggagcacaccagcagggctccccagtgtggaccagtgctggcgcatcacggttcagggctcatggtccagtgggaggggatgtggagagcagcctgtgaccacagaagaaaaggaggttcacaaagccatctgggagtccagcgggaaggggcggccttctgggaacagcctggagctcgtctgcggtctggggacagcctggagcccgtctgcggtctggggacagcctggagcccatctgcagaggaggcctggggcgtgggagtgggtggaggcgtttccagcagaggggcagcagcagagccccagcgtgcagcacttgctctgtgcagtgtccggcgggctggggacgacatctgagaagccctggtgtcctcggttcttctccacgcggttcgccggccatcctctcgcatcagggctgtgtctcactgtgcgtctggcgttccggggcccctgatgtggtggctatgccagcatagctgcagtttctccaccgccttactcctgccgtgacagcccaggaaatgctgtaaaatctagttatccgtggggtcgttggaatctgaggacacatcttttcttgtgatggcgtttgcctacagagctgtgtgcgtcgcagccccctctcctcccctgtcactcygggagcaggggtcccctctgtttgagcaggcctggcctttgttgggctttgctgaggagctcatccatgtcacrtacacttgctgttgagagaaaccaagctgtcccgctttaaattagtgggaccgtttgtcaataactgcatgaaaatatatacgtaagacttctgacccaactgtccatgtggaggggcggccgcacgtggggataaagacctgccgatgaagcgcagtggtaattttacatgtcataactcttcatcatcctgcttttctgtcacgtgcttgaaatcttgccagcttggggaaactgagagtatgtgctgttgacgtagctgagctcacgttccgtccagtacaaagcaggtgttgccaggtcgctctgtgggagatgttgactttaaatgaatgtcacggagagaggagtcattttcctcagttgtttatttaaacttagtgatttgttaaaatttagtttcaaatactattaattagcaaggtcattgggttgaccaattaagatatattgaatatagggggktttttttctcccatagaggtatggtttaatcagttagctctgctagtatatagaaggaattcaactattaaagactaagaaaggcacaaaataaacctaaacacatccaagttrtcactgaatattgtactactgccactgtctttctctgggtggtacaggagttgaggcagtctagtgagaaaagtcacgggcctgaaggattttgaggccagatgtggggactcacacctgtagtcccagcactttgggaggctgaggtgggagatcactcgagcccaggagttggaggctgctgtgagctatgatcacactactgtactccagcctgggcaacagagtgagaccctgtctcaaatgaaattaaatgaaataaaattaaattaaataacctataagtgtaataaatatgttgtcttaggacgggcagcttagtgtttggattctgagacctagcaggaatggtgaagggacggggcatgagaggaagtcaaagggcataaaagcatcagcctggcccaggtctgaggatgctgtgagttactaattctgctggtgcattcgaggtgctgtgaccaaggccaggagctctggcatagaagcaaaagccagcgtcrgttcctgtgcccagccctgcgccactatgcccacagcatccatcaccttgggtcctggcgccctgtgagtgaggagagtgctgacatcgcctcccactcacagggggtcgtggaggctccggagcttggtgaccccgtggtgtcctagggcgtgtagacacaggcctcttccatgccagggaggcgtggcagatctcaagcccacccactcttcccccaccctcggacaccacaacaaaaccagagttgtgcatcaagacagctggaaccagaccaccggaaacactcagaccaccggcaccaagggttgtctgttttcagaacttctgttgttttgagcacagcccaaagggacagctggcccttgggaaccacgttgggccgtctgttagggagaagtgcactgcctgggcctgaaggcagtgggctgtctggcctcctgagtgcccggggagcccacgcccacgcccaggagggaggggcccactcggtgcatccacgcagaggcggctgcgaactcaggcacggccgcccttgtctcctgctgccgctgccacctgcagcacagacggagcctgtgcacggggcctggtcagagctgtttctgtctccccagcctgagccccgtcttcacctgcagcacagacagggcctgtccgccgggcttggttggaaccatttctgtctccccagcctgagcccgtcgtcccttgctggctgcccacttgctcagctgcgccctggaccgtggccgctgggctcctgggaggtgggccatgcccacagctccacctggctcacagtgagtgccgtgtcgtcgtgagcacctccaggctcccaagcccagcacagacagcaccggccccttctctccccgcctttccgctcctccaaggaagctcgtccttttgggccctcagtggctgttgtagcaccaccaccccggcaccagacagagagccctgtcggggcttgctccttggaagcgctgcgcatcctgtgttccaggggagcggggtcaatcagtgcctcacccctcatcctgctcaagtgaaatggggctccccgactgcctcacatgtgtcccacccagggtttcctgccaggtgagatggttcgtgtcctggcctgtcaggactcccatgagtggcgaggtgtgcggtgtggggcagtggctggactgacagtgggagatagacggggacctggaaggaggggaggccatgtcgatactgcatccgctctctgaattctctgcccgcgcgtcctctcagagcctcatggtggaagccgccaggtcacacaggaagccgcactgacaaggatatttgttgcactgctctttagctgtaaaagtttgggacagattcagcacgctgcagcggtgattgcttgagtcagaatccttgctggggacctcagagacatgtcgggggcctgggagccttgatggggcgggcggggcaggggcaccagtggccgtgatgccaggctcaggttcccggctctgccacttagtggaagtggccttgcgtgagttgctgctgtgtgtcggcgtcctcccaggctgtgagcaggcggcggagtgcctggctcctacacacgtgaacacacatgcatacacaggcacatgtgtacacacacatgctccggcacacgcgtgctggtacgtgctcccgcacacgtatgcacacgtgtgcacccttgctggggttgtgcctgggtgttgctaatggctgccttcctggtgagattgtgaccagttgatcttgaggctcccagaggctctgcagtaaacacgcataacatttttttaactagaaataaggcctctagatgattgaagaggcttctgagaaatctggactcttttctatggaatttacagtaatgggaaaatgaaaagcactggaaatataaataactggaagcacaaaggcgacgtgactcctagaatctgtccagaacccatggtcgcagacatggggccccgtctctgccagaccctggtggctcccaggctgtgggggcggtggagggggtggtgccacgtgtggctctgtggacggctccgacgaccctgacagtgtgcttctctccctccaggtcgtgcacacacacargccgcacttcatggccttgcactgtcaggagtttggagggaagaactacgaggcctccatgtcccacgtggacaagttcgtcaagtaagtctaggggcaggtgcyggtgcatgtccacttcccaggggtgtggggtgccggcgggggtcttttcatggtactatgatcaccagcctcaccattcgggactcacctgggggtcatcttggctgagtctcagttttccaaagagaggagtggcccagacgtgtggccacgagcctccttggggyggcgacagaaggccacggagtgacagcctgctgcctccacacggcgagggtctgtgctctcgggccaggggacgtgagccccagataccagtggagccgtctccgtgtgtgtgtgtctgaggcctgggcctgtggtggccggggttcacatcccactgcgcagtctgtctcaaggaggtcggcagggagcgtctatcctccttgggggcgaaatctccatcgtttaggaggaaggtgccccacgtgtattcccactgtacatgccctgaggcttctgacagggccggcccaactgggtcctgcctgggaagagggggcgcccggacctggggcatccaggagtggacaggagcaggcaggggcaggcaggcttgtgttcagacatggggcctcctataggctgttgctaatagtggctgctgtattttcccgaggccgcagccgtgaagcccgccctctgtgtcccctacagtgtggccttggcacattcccatgttgggggctcgtctccacctccagaccctgggcaagccctggcttcttcacagcatgagggcttctgggaccagcccccaacatcgcagagcttcacaaagctgccacactctgtgggccgacgccgctgccacgctctgtgggccgacgccgctgccacacactgtgggccgacgctgctgccacgctctgtgggttgacgctgctgccatgctctgtgggtcgatgcagccacccggagtcgggacctgtgggcagagccgtcgagccctcccggcctggtgccagtgtgagtgtgagcgaggcttcaggcgatcccagccgctgcatccttgctgtgacataagccctccgtgttgaactcccagcgcagggtcctcgagcagagcaaagtggtttcagctgctaaaaaaaactgccacaacttcccaaaataatctgtaatttaaggcattttttttttctttttttttttttgttttgagacggagtctcgctctgttgcccaggctggagtgcagtggcgtgatctgagctcactgcaagcaccgcctcctggattcatgccattcttctgcctcagcctcccgagtagctgggactacaggtgcccaccaccacacccagctaatttttttgtgtttttttagtagagatggggtgtcaccatgttagccaggatggcctcaatctcctgaccttgtgatctgcctgccttggcttcccaaagtgctgggattacaggcatgaaccaccatgcctggccagtttaaggcagttttaatcaaaatcttagcggcatttttcctaacactcaacaaactaatactaaaattgccatataagagcaaagggtcaagaatagttaaaagaatcctgaaggaaaacaaagtgggttctcacccagctcgaccccaaggctcattccgaagaagcagtggggcaggtggcatgacgcaggcccggagaggagagcggatcgaggcaggtgcgcagcccagagagtggagagcggagtcgaggccccacccagaccctcgcggctgccttggaggagggtgggtggggacatgggctggggcacggcatcattggtgtcctgttgggaaaaatgaaattggatccctgctttgtgtcataagcagccacttctcactcaccctacataagatgaatttcagttgtattaattatataaatgtaaaaggcaacattaaaaatttcagtctaaaatataggagaaaatatagttttgggatgagagatttcttttaaaatgtgcaggaagtgcagcctacagaatggaaggctgaaaaatgtggccatgtttgaactaagcatttgcttatgaaaaggcactcaaaatgaagtcactcaaaatgaagtcactcaaaacaaaatcaaaattcagccacttcgggaaaagatatctgcagcacaccttactgacaaaaacgagtgtttaaatatatgaagaactcagtaagtcggtaagagaaggaaagcagcccctgttgggaagcaccttccagaggagagaaagtgggggtgcaccctgagcacggaggacgccgccctcacagcaggcggggacaccgcaggccggacgggaacgatgccgccgtgtttggtgtgagagcttcacagtggagtgtggcccccacggccttgtgcccccgcgatgccgtgtgtgtttccttcctccgcgctttatgcctaatgtacagcgttatgatttttgctttaaacaattttctttttaaaagattaagacgtgagagaaacgcccttggtgtggaccagttcactggctttcagtgccctccgcccttttgtgtggattctgctttttatctggcacccttctctctctgcctgaagaacgttctttaacatttattttagcacaagtcagctgctcatgaattttctcagcttttgtttatctgaaaaaggtctttgtcctcatttttgaaagctgtttttgttgtaaatagaattctagcttgtcaattttttttcctctcactactttaatgatatcgccccattgtcttctgtattgcattgttgctggcgagaatctcgccattgttctctcttaattttcttgtatataatgtgccctttcctccactgctaggttttgtctttatagctggtttgcagcaacctgattatgttgtactttgctttgatgttctttatgtttatcttgcttggggccgtttgagcatttgcagtctgtgggtttatcgttttaatcaaatttggggaaaatttgtccttgtccattatttctttaaatactatttttcttttccttcccttctcttttgttcttaggctccagttacctgatgttagattgcctggttctgccccacagggccctaaagctcttctgattgttttcagctcattttccctgtgtttcggtttggatcgcctctgttgctgtatttttaagtggctgggctcttttctgttgcagattttgatcttctcttaggtccatgcagtcagttcgttttatttctgacattgtgtttgtccactccttccagaagcctcacgtgtgctttccctgtcctcgcttttccttccgtctgtgcgttcctttcgctgtctggtcacagttgcaatgactgttcccagttgctttcagctcactccgtcatttttgcctcttccgggtctgtttctgttgacggcttcttcgtaggatgacgggacacattcacgtggtgttgctgcttctcatatcaagttattttccgtaggatggcagacattgcgaatgttacgttgtttagtgtttgagccctgttttcttcctttaaagcgtgttgaaggttgtgtttaccaacagttaagccacatggggatcagtgtgggtctgtcaaggcattctttgccttgcccttctctactggtgcagttttattttcttcaatgtggaccccccttcttcctgacacatggactggctggatcacagggtgctggtctcctctctccccactggcttgaataagcatgcgtgggtagggggatgatggactgtctctgtggaggggccaggcagacggggcctcgtcctccgttcatgggctccaggggtgtgcggtggcctcctgtgcagccatgctttgcggagatggtggtgagcttgtctccttaaggccttcctgatgataaaatgtgaccagtaggatgaacggtcggggacaatggcgtgtccagaggtcctttccctcctgtgtggttgcaaggccgtggcaactcaaccaccattctcgctgccacttctgggaggagcagatggggacagaactacctgggccctggggtgcatgtgccccaacctgtgtgtgctggtggctactgggggtccaatttctctcttaagaccaagcgtgagctatcaggagagcccccagagcttggagttgcgcttccctggcatgagaccttgggtgagttctcaatgtctccatccctgggatgcctcagaccccggcatctcacaggctgcgtggagaccagagcctgtgggagcttgagctctgcacatgctgagagctgaacgtgaggccagctcctgcggtggctgccgccattccctgccctctgcctgtcacgggtggatggtctcacggtgatgtacctatgtgctggagcccctcttataccttgtggtcatctcatgaggtgcaaggcgtctgtgtggcttttcctcaggaacctactttcttccttccagagaactattgtcgagtgatgcgatgaaagaatataacagggctcgagtctacctggatgaaaactacaaatcccaggagcacttcacggtgagtccctcccgctgcctggtgcaggggtcagacaggctggccttggcagaagccagcccttctcctgtgtaaatggagagaggtcggggtgctccctgcctgaagcctcactcacgctgccctgcctggcactcccgcagcctgcttggtggtctgctcgtggtctgagcccatggctggcctggcagggaaggtggcccagcacgcacagggtcttggggctccagaccaagcccaagagggaattggggagtgacaggtggggagaggcccagggcctcagcgtgcatgaaaataagagggagtccggggctccaggcgtgtagatgagaggttggacagcagccggtattgcttcaagagccaccgtcgccagccctgctcccatgctgggtccgtcccttcctgatccctgagtgtgcagggctggggcggtgtcctgcctcggagagaggctgttcctcagggtgagcacagggggagtgggacagagccttccacagggctgggaaagacctgkccctcctctgcggtcctctgtcaggtggacacatgagagggtggccctggtggacgtggcagccacagagatacaggcaccaggtgtctgggaaggggcaggaagctcctcagaggaggggacactctgcaggtcgtgaataacttgctgttggttcagagacccacgtcttaaatcccgtctttatgccctgggtcccccggcctggatccatctcccccgtctctggggaggccctgggtcccccggcctgggtccatctcccccgtctctggggaggccctgggtcccccggcctggatccatctcccccgtctctggggaggccctgggtcccccggcctgggtccatctcccccgtctctggggaggccctgggtcccccggcctgggtccatctcccccgtctctggggaggccctgggtcccccggcttgggtccatctcccccrtctctggggaggccctgggtcccccggcctggttccatctcccccgtctctggagaggccctgcatccttctcccccatctctggccttctgtccccagcatcagcgcccactagccgtcattgcgccgtcacgtgacaggcccttgttaatctgccctctcccaggtgggcccccgtaggctgcagtgctgagggtctcgctctccagtgcccccctgccctgcaggtgggactctcattgctgtttgggttcaagggccatctcacttgtttgggcatccagtgccagttgatcaatgtccttgtccctgagatggtcacacagctgtcatgcgtggtccccaccagtagtggagtctgtacaatcccgggaatcccccgttcggtctccgaccctcgccctgtcaagcagctgcccacacacaagcggcctctcctcacgctctgtggggcacacggggaccacggggcccccactcacaccagagccaaggccctcacccctgtgctcaggatgtagctcctcctgtcagccttcctccctctcccccttggtccctcctccctctcccccttggtccctcctccctaccagcttctttctctcagctctgccatcctttccataaaatggcagcttccttgaccctctcactctcctctgccatgacccaacgtaatgtgtttcccaagtaggggcttattcagatgaaaaagaaaaacaccactgggggagcagcaaattagacattgcagaagaaaagagaaggtgactgaacttgaagacagccacaaaattaaagtgaaacagagagaaggactgaaaagtggatagaaatcactgtgaaataccaggtgtcctaacacgtgtggctgcagccccaggaggagcggggaaaggaggcagacagggtgatgcttacagatgtcatggctcagatttcttcatcagtccatgaaacttacagaaagatccaaatactgcaacaagcttcaagccgaataaacataccaacgcaggccaaggtccgattgctgaaagcaagttacatgaaggcccttccttgccacccatcatcctcggaagagtggggctctgctccccgtctctgcgtgctgccctgccatgggagcctcatctgtgccagtcgccagctacctcttcctcatggggaccgtcgctcagctctttccagcttcctttagatataaagacacaggtattttaaaagtgaagggacggaggaggatgtaccttgtaaaacagtcgttagaagaaagtaggagtggctgtctgcatgtcagggtgccctcagaacgagcgtgttgtcggggctgagagcggtcatttcacgatgataaggggtcagctttttgggaggacatagcggtcgtgaacgtgcgcccctaatatcagagctcacttagacgcgaaaccgacagggctgggtggagacgggaggctctgcaccgcaggaggaccccacagtcccctcctgctggccgatgtgcaggtgggcggaggggcagtgcccgccacccgcacccttggcatctgaggctctccagccagagcagtggtggacgcagccaccgacagaaggcacccgcgtgctgggccctggccagagcaggcctctccgtctgtccgagcctggctgggatacctgagagcgaggcacacatgggctggcggaggggcagccgtcatgctgtagttctgtttccaccaaaacgtttttccacatgagggcgaaagcctcagcaaaacctccttcaggctcccgagggccgcggctgcctccacacctggctaccttcttcaggcccccgagggctgcggctgcctccacacctggctttcagggttttccaggtgggtccggagcggcctgtgcttaagggctcaggtccacccgagactctgcctggcgtgcgtatctgggcatctgcacctggctgccgggcacaggccgtgccaggcctgtacgagctctggggttgttctcccttctttccagggktcctccctggccctgggtggttccagcaaaacagtcgccagggcacatgagtctagttccagaaagaccttgcccctgcctctgagagatggaaaggatacaaacgcattctcttaccaaaaagaattaaattagaagtaaataaaaaagatatatggaaaagtctcaaatatttggaaattaacttgtttgttaataatcccaagtcaaagagaattacaaggtattttaaattatgtgaaaagctagaaccttcaaaatctgtgagatgccaaaatagtctgcacccgctgcagatcgtacggcagccttcagcgcggggagcacggcgccccccgtcaaaggaaaggtgcctctcaggggaggaagcacaggggctgggccgggcccctcccctcaagaagccgctgtgtacttggtgcctcaaagtgcccgacagtgacgtgggcctggcagcccattcttcagcacacacgcttcccaattacgtctctgagatgtctgaaaccagggtgcggggcaccagggcggctgaacaggccacccagaggcagccgkgctgtgtctgaggccccgaggctgttcctccagtcaccctcacgatgagggtttccggaaaatgggacaggataaggcttgggagtgagagtgggtctcaggcctgctctcggggaactgtggcctggcaggagctcccgtgcctctgctgccgcccttcagctcagtgggctccagccccggcttccctgcctgggcacggacctgatctctcccacagccacggccctgagtgaggctttaggccaggtggatggtggagggcagccttgcctggcaggtaggagggtccaggatgccccagatgcccagttagctcatgccaagctggcgccaggcgggcctgtcctccctgtcttgtcactgagactgggctggcagacctcggaacgctgccccctgggccaccactggctgcctcagtggcctggtctttgctgggggccctcggggtgtctgtgtggcggggcctgacttccccggggtcctgggcagagctgggcagcagcggccagccagacaatcaccctcctgccccagccaggtgccctctggctgtcagagggaggaaaatttaatttttacaagattgatggtattggagcaatatttttagctgagtctggttcaaataataggccattaattgaaaaaggaaattgaaatgaatttatcttgtacataaatgctgtcacgggtattaatagggatcagaaaatagtggcctgttcccagaaggcgattgaacctgaagctgcgcctggcgcgtgagcctgtgggggggacgcggctgaggggctttgagcgacctgcaggtgcccattgccaccaggagatggcgcccacgcagcgcctgagagtttcctaccggagatgatcagaaggcaacttttaatgcttaaaaaatgaggatattaggctgggcgcggtggctcacgccggtaatcccagcactttgggaggctgagtctgggatggacatgcaccgactccgccaggcgaggtgggcctggctcagggcagaaggccccaggaggtgcccaggctgagccccgagctctgcgcccgcatggaaaatggaaaagtggcgagagccaggctggaagacacctgagtgccaggcggtctgtgtgcctcatccctgaagcgcctttgtcagagcccttgctcctgggttcagcctggtgtccctacccctgggaacacatgtccacccacagcactggagacagggctcagagctagccccgccgtggaggtctcggtaccacgttggtacccagagaaatttcttagccaccgcggtgcatcctcccacacaggcctcgacactgaagaagtgcctgggcgaggctttcccgggctgccaagtgcctattgatccacagctccaacagcacagaaatcccgtgtcttgtctgccgggcacgcagggagctccgagaacacatcagtcagcgcccagagagccgacgtcggccagaggacgcagggtaacggctttcctgaactccgcttccaagagggttctgtgaggaagaggttgcaaattcattttcgtttaacgtcacccgcatctggtttcaccacagaagtggagccctgcagtgggaggggtggggggcctgtcactgggctttgctgctgatttggcctacctgggaagcccagaagatgtatttactgtagggacttgaggcttgcttggggcctggtaggagccaaggccaccccatcctcccagctcagcttggtgacttaccatccatggctctggttcgcttgtcacccgcccctcccagagaggctgcgtggggctgcaggcgcctgagtgtaggtcccagcctgtgtcctgggctctagtcccattgaagccttgtggctggctgggcatgggtcccatgcagactggtggggccaggagggcctggcgtgggcacctgcagcagcttcttcaaggcctcccagcactgaccgtggcctctcaaagcttcggctgcttcagcagctttcctgctgggagctgtgagcactgctggggcccatgcccaggactgtcctgaccggactgaaagccctagagggaagctggcagtggggacagggtgcaagaggaaagaccctctctccatgcagctccttcatccacccacctggaggaactcctagagggaaggtggcagtggggtcagggtgtgagaaggaaagccccactctcctcttcatccacccacccagaagaagtttgaagaaaccatgccttttaatggcttaaagttggagcagaagggtttatctgctgatacaattaagatagcttcgggagagggctgagaaggtgtggcctggcggacacactgcctccagggacacccctgcccccgccagctgtgcctgctcagagagtgcctgctcctcggagggtcccccctgcttgggaaggtacctgctgcacaggaccccagctggagtcaaggagtcagcagaagagggggttggaggagcggctggggacaggaggtggctgtgccggctgccccacctcgcctcttgcctgagcccctctgtggccacatagacagaaggaggggttggaggtgcagccagccagctgggccaggtgagccggtcctgaagggcaccaagcagggttgccccgggctcctgagaggatttttcacatgcagcagctggagacagtttggaggggcccagggcggtgcagacccttccacagctgctcaggtggcccggaggcgtgtgcacccttccctatgcagcagggctccacaggcctgggcactcagcccagatggtgcatgtggggaaccgtgggaccccatgtgccaggagtctctgggcagacagcagcgacagggctgtgtggggacttgggcaggcctgagcctggggtccgatgacctagttgggtctggggcagccacaagccgaggcgttgaggaagagagagtgaagtctgagctccttgtgtaggagacctccgtgtggagtagccccagaggcaggaggctgcctcagccaggatggccccatgcacttgctargctgcgccgcctgctcactcaaggctcttgggctcggagcagaactatgagcctgcaaggcctgctgggcagagtggccacagcacgtggccgctggtcaccaaccgggggcttacccctctcccacccgctagcgctgcctttgcacctcggagggcaggtctctgctggcaccatgagtgacctgcaagcactgccatggtggactctgctcgcgccttggtggcttctaggcttttccaggggctctggcctcctgcagagcagggtctgcctcccccgcggctgggtctgtggagagtgaagtggggcacagatgccctttgcaagtgctgtgcacggcagctcacagcccccacccccagctctgtagtctgtaagaggcaggctctcggcatggcccccaggcagtggccctggtgctcttggggtggggggccccagtacccagcggtggcccaggaatgagaggcccgctgcttcctgggagaggcccttctgctttccctcctcctcctctgtgagctcccccttccactctcgttctcctaaataagactttagggagaatttatggaaaattgatggagtttacggatgttctttgatccagagaaggggaaggaaaggcaaacgcgtttatgatgaggaagctcatctgccttagggctccagccctgccctggggctcgctgcctcctcacctgcctgggggcaagacagtcctgatgaagtgagagggggcgagattggttttctgagggcaccgggcccttcatgctcccctaaatcacgggctgtctcctcagcgggcaggtaatgacctgctccccggccccagcacctgcagtcccgtgggacgcgatgatgtgcggctggggctgcagtgaaggtgaaactgtcatatcgatctttttagcactaaaatatgagccactttactccgctccccgctgctgtgatgtgaaaaataataactcggatccaaattaaaaatattgatctctggaaggtgttgaaagtaaataaacaccttccgaagtttttgggtcagccgagaaatggtattcagcaataaatgtgtcagagtccagggttcttgatctgttttttctttgaattgatttttcattatttacttcctaaaagtgttggaatttggtcctccactgtgaaatcccagtgtttgggcacattatttctttggggcttatgaggtgctcctaatccactcccttattgatggattgatgtttgactccataagcctgctttatttaggaccttccatcataattttttgtacatttaggcttgactcttttatttccttctaacagatgagctgacattgggctatcaaacgggtgggaaaacaattgccatgaggttaatttcatggtcggctccgtgcgttctgagcagacgggtgtttcctggctgcaggccgggccttggatgcagccttgacgcgtgtcgatctgtttacacacagggctgagtccgccggccccccgggggtgctcatgggtgcccgggtgtctgcaagctgcccgcagctgggtggtctctgggcacggatgctctaggccctctgggctccaaggaggctgggttgtatgtctcttgagaagctttcctttcgaaaggccaccaagaccaccgagactgctgagaccgccaaagccaccaagaccgccgagactgccaagaccaccaaggccgccggctgctcccggtggctccatgcacccggcaggagagtggaaggcgtcgggcctggggcagtttgaaaagataggtgccgccagcatctgcgcttcctcgtgggtgctcaacaggctgcctgggaagctccttctgccatcacctggagtcagctgccgtccacagtggaagctgccagccaccaaggctaccgacctgggccctggggatgagcagcccaggaggcgaagatgcctaggtgggtccccagctctgcaggtgccactccccacgccagtgttctccaaacttccggggagacctgtctgtgctcctgtaggtgtcaggcagactcagaggcacaggggttcagattgaggcctggggctgaggaagcaggaagtcctgtcaggagctggagcactgagaaaggcaccttgctgagagcagccttggaagggtccagaactggaaagatggagagctgccattggcccgtagctctggggctggtcctggccatctagccatgggaccatgggcagagggttccctagctctgggtgaggcgggagtggtgggcagtgctggccatgaggtccctgtggggtgcatccacggacgcgggtctggaggcgctgctgtctaagctgaggcttttgaaggatgaccgtgcccaggttatccagtgttccttctcagcgagcagctcccatggcagtccattcattcaacatgccctggtccagctgctgcacagccatgggtattctgtgctgagcgccgtggctgatgcacacccaccgtcccctgcagaggagacctctgcacgcaggcccacagcaagggccggatcaggagaacaacccacttggcaggcggcarccttgcctggcactcaccagggcctcctccccagcactgtcccgagtcaggtctgcacggcttcatggctgcctgccctgggaggtggagcatggagaaggccagtgcctcatcacagagccagatgcccacaacaggatccagtgctgtcagctgggctccagaaacctgaggacatgcagcctgcagctcctgacacatgacatgtgacatacaacacatgacacgcggcatactccctgtgacatggcacatgacacgtgacacaacacattctcatgctccgccgacgcgtgacccacggcacgttcccgcgctccgccgacgcgtggcccacggcacgttctgacgtctgccaatgcgtgacacacggcacattataatgatgtaaatattgattattgatttaagtgaaaatattgagagggtgggggtgagagatggagtgtgtgtgtgatattgagtgacggggaaagatagtagaaagtagttaaatcctcttcttccagcatggaaaaattgaaaaatcaatgttgaaaactggaaaatcaagaagtggcaatataagctttagaggtatggagataaataccaaaagaaaacaatcaaaagaaaataattgcctctgggaactagaagactgaagtggacaggagctactgttttcatagtgtgccttgcagaactcgtgtgtgtgtgtgttactagcttttaaaaaacaaaattccaggaaacttcttaggaggaagagactccttctgttgatggtgacatcaaacaagacctgcaggaggaggtagcactgacaagaaggtggtgtgccagtttgtgatctggtgcggtgaggcacctgtgtcagcaacaggtgggagtggctctggtgtctgagcagaggctctggtgtctgagcagaggctgtctggatgccaytcacggtgagagaagagcctagaatcttgactgtcctttgagtatcaggtaaagaaatttgaatgtgattaggtagtcagtggggaccattacagagttcagggagagaggtgaggcagtcagaactgggggaagatggagaagggacaagtgtgttgtttcaaacgtagagtcctctgatatctaccttttaaattcttattgaagtaaatgcacagagaggaccagaagtggtgatccatattggtgcacatttatttttttgactctgattcctttaagcctaaaactagggcagtgtcccatactgagcactaaagagaagtagggtcaaacccaggagggaggaaaaccagatccctgcaccttggccaagatgaggatgccggatggagcatagccagtcctggaatgaggcctgcatctctcccttgcacaatgcccccacccacaatccagccaggtctctctgtgtccccagctgcatgctcccacctcttcgtgatatggtttcaaaaacacaatccagcaccatgtgtaaattgtttgatgcttgagatcaactttactgaattgcctacattgaaagtgatgaggacaatacctccttcaggaagaaaaaggcaaaatgaagtgctttcatgaatagtcagaagggtcttactaacataaaaatattttgattatgtcttcagaatctctttatgtagttagtggcttgtaagctgtcaacttgtaaatgatgccgttggaaattgaaatgtaaataacattaccatttataatagcatcaaaaatatgaaatatttaggaataaattaggtcaagatgtgtaagacctgtatactgagaactatgatatattgctcagagaaattaaataagatctaaataaatggagagatatactatgttcatggatcagaagactcaatcttgttaagatgtcatttctccccaaattgatgtaaagattcagtgcattactaatcaaaatctgagcagacttttttttttggtagaaattaagctggttctaaaatgtatatgtaaatgtaaaggaattagaatgggccaaaataactttgaacatgaataaagatggagtccttatactacctgattaagacttctttgaatctcaataattaaatcagtatagtattggcataaaaccagataaacagatcacagaacattatggagagtctagaaagtggcccactattgatctttgtcagaggtatcagtggacttcagcagtgagtgaatgatcttttccacaaagggtgctgtagcaattagagggccgtttgcaaaaaactcacttcaattgttacttgaaaccacatgaaaatttagcttgaactggatcatagacctagcgtaagagctagaaccatgcagcttccacaagatcacacaggacttctttctttaaatatgacaccaaaagcagaaaccactataagaggaaaccagtcagttggacctatgaagacgaccgtggcaagcgctggggaggcggtggtagcactgcagccgtcgtgttagtgctggaaatgtaaaacatgcgaaaacatggaggtcttaaaaaaaacgttgaaaatacacacaccgtatcacccagccgtttccctcttcagtatttacttaagagaaatgaaagcacattccacactaagactgaatgttcatagcagctttattcagaatagccaaaacctgtcaacagcccagatagccacagcaggtgagtgggaacaggaggggacagtctgtgtacaccgtggtgtgtcagctgtcgcagtaattatggtgggcaaaagaatccagaccaaaccaaaaatgcattctgtatgatttcatgtatatcatattcttaaaaatgcaaacaagtctgtaatgacagaacacagatagtggtttcccggggaaggggttgtggtgggggctggagggattccagtgagcactaaggagaagccaggtcaagcccaggaggggagcacggtagatccccgcaccttggccgaggtgaggatgctggacggaaggcagctgtcccttccacactgcccaccccacccgcgctccagcctggccgctctctgctcccaccccttcatgctgtagtttagcaaacacaatccagagccaagtgtaaattgtgtcaaggggcgaagggacccagggaaccttctggagcgacgggcatgttagtctcctaattgtggtgatggtttcacgtgtggatgtgtcaggactcatccagttacacgtcacatgggtgcaattctgtcagtgccacttacacgtaccttagcactctagaaggaaaatctagtcttgtggtggatggcttgtgaggggtcaaactgcagatttaatggaaaagggaagtacttccatcagcagctggcccctcgaacggactgtgcacaccactgtgtgtctcacaactcaggcaactcggcacgccgcaggacataacggcagagtgtgagtaattttccattttatatacacatatgcgtatgttatataaaattgaaaagactttcttctcgttaaatcttattttattttgacacaggatgtcactctgttgcccaggctggagtgcagtagtgcaatcgtggcttactgcagccttgaactcctgagctcaagtgatcctgtggcctcagcctcccaagtagctgaggatacaggtgtgcatcaccacgcctggctaaaaaaaaactgtttatagagactgggtgtcaccgtgttgcccagtcaggtctccaactcctggcctcaagtgatcctcttgccttggcctctcaaagtgctgggattacaggtgcgaaccactgtgccctgccaaaaagacatttttaaggttaagtaaggctttgttgattttgaatgtaacattattcccactcaatgagtgattttggtcgacgttcacctgtactttctctgcactctgagccggcaggtgccacttctagcttctggctggggttggtttgcagtggagtctgtgcctgtggcagccgtctgcatgactttgggtcattgcgctttccttgccttttggggagggtccctggtgctctgtgagcagattcgcccctaggggtgaagtcatctcgctcctcttctgagccgtgagctgggcagggccgcgctcacatcattcctctccccctgtcgccgggtgggaaatccgtaacaggctctgtggcaaaggctgggccaaggtgcctcgtgggcagccgatccatcaggcggccgacaggcgtgatcgagtgccgtgtcacacgcagcccaggaaacaaacacgccgcgcgaaaggtattggtgaacgaactgaaaaattgtaaagctcttaaggactttcatgcttgttagcattttttgacagaaaatcactgaagcagtgaacataaagaaatagccatggttgattcacagtttagcttgttgttctgttcatttggcctcaggtgatgtttcacttccggagccccgtgagctgctccttgctctgcctggctttctttcctgtgcaaattcttgcgggtccctcagctgtgctcacccaaccacagcctccctggagatgggtttttatgattttgaaggagaccgaaggaaactgaatgaacaaatattttctccaaagcccgtccaggtttggcttcagatgctgtgagccgtgtgtacatttctaggcttaatccacagaatgaatgtgagcttttatgtcacagcctgcccaggaccctgctgtgtgcctggagggcacctgacctgctcttgaggcttcactacctgatgtcccaaagggaacatcgtgtttttcagtgtgttcctgagcagatgggtgtctacacagacctcgcctgttgccctgtgcgtttgtgtgatgagttggggtgtggcacaccgctgtgtgggggtggctgggcctctgagtgcgctctctcacagccacgtctgctggggcccacagctccccatcagcagcagcccagagctgagcacagaagtgtgggtgattttcatgagtgcaccttgccatttggcttggcacctgttagaactgctatgtgctctttgaaaaccacccatccttctgtcccaaggaaggtgacaagcacgatgttttcctgggagaaagtggctcccatcctggccacacatccctgtcagggcagcgtttagtgcatcccacctgtgcacgtagagatgcatcctgctgtcttaagtatcggagtccccgatgtaggcttgttggggtggctcaggttttcccgttgcaactgaggcgttgagcagtcaggggctgcccctgcctgcccagaactttcctgaagtcgtggcctggcagcgccccgcctgtgcagggcaggtccctcaaggccaagccctgttgtgcatgagggcacccccagactgaaggaaacgaagctggagcttcagagatcatgcccacctgaggccttccctcgcctttgcagacacacctgtgtttccaaagaagggggacagacggagcacttcacttccatcccgagagtgtctcccagacagcgcaccccgcagcggccactggctgacccgtggccttgagaacacaggaaagccccctcttagattcacagaaacgcccttcctaggagtaaacggatcctgtgtttttcccctcgattctgtgtcgctaattgttaattatgacaaaggaaaagtgatattaagattcggggtatttgtttcattgtgtaatttcttccttggttaaaagggaagaatgggctgggtgtagtgcttcacacctgtaatcccagcactctgggaggctgaggcaggtgaattgcttgagcttaggagtaatcccagcactctgggaggctgaggcaggtgaattgcttgagcttaggagtaatcccagcactctgggaggctgaggcaggtgaattgcttgagcttaggagtaatcccagcactctgggaggctgaggcaggtgaattgcttgagtttaggagtaatcccagcactctgggaggctgaggcagatgaattgcttgagcttaggagtaatcccagcactctgggaggctgaggcaggtgaattgcttgagcttaggagtaatcccagcactctgggaggctgaggcaggtgaattgcttgagcttaggagttcaagaccagcctggccaacatggggaaaccccatctctactgaaaatacaaaaattagccagctgcaatggcgtgcacctgtagtcgcagctacttgggaggctgaggctggaggatcgtgtgagcctgggaggtggaggtagcagtgagccaagatcacaccactgcactgcagcctgggcaacagagcaagatcctgtctcaaaaaaaaaaaaaaaaagagaagaatgatataaccacattagtcctttaccaggtttgccttaaaactgagtcactgtgtgcctggcctttactcagcgcttcctcccatgtcgtgactgttataatgcatcattacttcctcactatgattcatctaggaacttgggggagtaattcatagtcagggatatttatgtttaaaccgacagaaagggagagccatttgaacacattattccatgttttcactggttttaaatctgatttctgctggctgggggaaacttgaggaactgtgaagtcatcgtaggcagtagggaggtaacggataagggcctttcaagcatgcagtgaagagacaccagctgtacagctccctcctgtatggaaaaggtggaatttagacagttaaagtattaaagtatacatcactgggtttgaaaacagccacaaaaaaacccctgtcggatcacccaaaaccgctggccccgtggcgcaccatcccgaggctgccgactttgcagtggggctctctttccttctggagtgcagcagcatctggaattgtctgggaaaaccctgaaggatggcccacaccgagccgaaacatctttcaaacggaaattgttacactgtgctcttcatcttgaaattaatgtttggttgtcaatttttattgctgacctaatggatgaagtccagcaattgcagctgtccccttaaagcggcccccagcgtgtgctgtgcagaccttctcggcaggctacccacccacctcatccgtaagtggactcgggtagagaaagatatctgtgcattgagagctcgttggagataacttgagtcataatgtgtactgagtgtgctgggaatcataggagggtaaaggtggtttttaaaaaagttattttcattaattcctctcacccccaaccccctctgccacctgggacaaaaaaatggcagggtcctgctggatgccgctttccaagctggggcagacccgccagtgttgagcaagagggaggtttcatctgaggctggctgagttttatatatctatttatgagatccaataatgtaatgatgtgcttgtctaataaatgctgctgtacaagctcaggacagcagacgtttccagtatgacctggattgtctaagccgcagccccttttggttggagctcggctgtttaataaatgtcggctgttcttccaaccatcataattatttaaaggggcttcaaaagagagagaacaaatcaaatcaagccattactgttgaagctcgttctggagttaagtgtgtttttaaaactgtgggccttgtgcagaggctcctcccagttttcatctattatcacaataattgagtttgtagctggaattaaatttatcaaattgcgttatcctctttagaaattggataggcatgctggcagggcgaggcagaagttaatctgctttgctgaagcctccagtggccctgcacagcggggctgaagaggcccagacagcttcctgtcaccccggacacgatgtaatttctcctcaatcccttgtgcaaataatgacatttgaatcgagcattaacaggcttaattactttaaaattgtcattttaatttacactgatatagtattgatcatacaagcagagattaagctgttcagtggagcagatgatggggaattaaacattaaagggtcctcagggggccgtgtgcgctgcccggcgcgagccggaagagggatgatatttctcggtaatgaactggcggcatgcggggacatgaatcttgggctcttggaaaaggggaaataatggggtttgggaggcatttgcaggttattcattcgccgccatgcaccaattctccagtgattcatccgcctcaccaacatttatttatccagcaaattccggagctttgacctttttgctaagtacattgaacataagttggagtggagatctttcaagtgtaacttttacaagtatttgttatttttccttatttctaggcaacattaaacaaagttattcagttttttgagtgtactggagtctgccggccttgcagggttggtgtggtggtgagggactaatgggctcctgcagcccagccccacacttgacttttgaaaattccagtggcagatcccaggctcaggtgtcactgatcctttcttaggtgaaatgacacgagagcctcacgttcctgccatgggctgatggcctcggcctcctttcagttgaggctttctgttggtggttagggggcaaagtgacgccctgtaacttattgatgctgccatggaaaaaatatggaaatgaagcagaacatgagtttctcagaagcacatttgacggacttcttttggcgaaaatcagagcacttcaaatcctgtaacctcaaactgtttcacttttcagaggttatataataaaaagttaagtgattgattttatagttcagtagggagtgatgaaattcttgatcactatccataatggctttattttaaacagtgggctagagatttaattaaagcatgatcagggaaatgaaaaaatgttgatatttctcctcaaattaaacatgaatttgcacagggagcattagaagggcttatcattcctcctgatgtttttattctcttccgtaggatttaaaagcttgcggcccacttcacccctctctgaatagctcagggggcttcagcccctgttgaccgtgctctgggtttggtccatttctgtggctttctttaaaaactgccgagctccatcgcacgaccaccactgctggcgtttattgagcgtgtactgcttgtgaggctttgttctgggggatcatttccccactttatctttggggtgccggagacacaggaaggttaagaaacagccggtgaggccgggcatggtggctcactcctgtaatcccagcattttgggaggccgaggtgggtgggtcacgaggtcaggagatagagaccattctgccaacatggtgaaaccccgtctctactaaaaatacaaaaaattagccaggcgtggtggtgggcgcctgtagtcccagctactcgggaggctgaggcaggagaatggcgtgaacccaggaggcggagcttgcagtgagcagacatcgtgccaccgcactccagccttggagacagagtgagactccatctcaaaataaacaaacaaacagccggtgagtagcaccagcttgtgtgaagctgggaagtagccccgtgagcgccaggtgttgccgggccaggccttccctgtgaggcgggttccctggtgcccactgtggcctactctgaggggcacaatgcaggctcctattcttaacctcgaggctttctatgtagcacgtcctcacgggaccacagaacgagagggagctgggggtgtggtggaggagtggcaagtgacagggcagaaacagctgctcgaggaggccccgtgttctcctgggggaccgtcggtgacatttcagcctggcttagctgcgtccttgaaagtggttctgcttctcttacgtgcttgcagacaccattcatgtgtccttagtctgacagtgacttggtcaagcttggaggatgtggggcctgcctgtgcgtgccccatgggcagagagggcgggcgcggttcgtgctggactctagatgtgcagctccaagtgagatgtgggtagatgccattgggattttggcgtgagcgtggacctgggtttctggaagggcattgttcccgtgtccctgtccccactgtggccttgctgagcccccagggagccaggacccgctggtgactgctccctctctgtcctcagggtgcagccctgcacagcccttctagccctctcaggtctttcttttgtccaaactcttatcttctcttgggtccccagggtcaccaacctctttgcagaaaatccctctgcagccactgaccccacacccccagcccccatgccctcactgcacacgttctcagcccccatgtcctcagcttccaatccctaaaccccacgtcctgaaacccacaccctcagcctccacccccaagaccctacaccctctgactgcgcactcccagaacctgcacctgaccccacaccccctgaccccacccccccgaccccacaccccctgaccctacaccccctgaccccacaccccctgaccccacacccctgaccccacatcctctgcatactcccagaacccacacctgaccccacaccccagaccctacatcctctgtgcactcccagaacctgcacctgaccccacccccccgacctcacaccccctgaccctacatcctctgagtgcgcactcccagaacccgcacctgacccccacaccccctgacaccaccccacagcccccatcttcagcctctcctctgctgtagtccccagcccctggctggcttgcttctcagcacagccctggcccagaagcaggaggacactgtcagcccctccttgctggggggagagtggttggggcacacctgtcccctgcccctctgctgcccacagcacagctaagtcttcaccctgcctgcgcgcatccctgtggccttctgggaggtcccagtggggagcctgtcttctccccagaacacccagtctccctttgtgccgggtcacccctgtgagcaaacaggcaggcatttccctcttagggaagaagcctcccttgaccccgtatctccccagctccttgtcctatagaaactgatttcttggcagtgtctttctttcttttttttttttttttttttttaaggaaaatgatggatattcatgtggtcaggacagcggtgccaaagtggagaaactgcaaacggcggtgacggcttgacgggcgtcacttttccttggtctttgtcagtcaggtctaatttataacagggccattagtgggagatagctttctttggatgtcttttcccgtaagggttgctcatggtttggcctcagtaaagaaaagagaaggtctctctttcatattgttggaagcagcaggtggcccactccttctggagtgaggcatgggcatgtgggcacgcctccatctgtcaggagtgtccctgtctctcccttctgattgggacagtgggtcacactggtggccagtgggcaactggggcccctggagccgtggcctcccctgggcccaagggaggcacagatgacttaggagtggagagttcaaacgtgggctgcggcgaggcttgtgccctccctgcttcggactccgccctccctgcttcggactccgccctccctgcttcggactccgccctccctgctctggactccgccctccctgcttcggactccgccctccctgcttcggactcggccctccctgctctggactccgccctccctgcttctgactccaccctttctgcttcggtatctacctccttgytttggaaggacacaaccttcttggctggcacagcccttcctgccatgcctgttgatcccatcatcagccaaggatgtgttggggccgtattctgcggctsctccagcatgggaaggtgctgacaggaagcagcaccaacacctcctggaatagccgttggcacatgagcttcctgatactgtttcatgtgccttacatgtgccacccatgcagggatcagagcagccctatgaagtgggtactgttatttgtcttccccgtgtcacagatagagatgttgaggcacagagaggttcagggaccaaccagaagaggccaatgtgggatttgaacttggttctggcctcagagcctgtactctcaaccagcctgctctgctctcagaaggggacagcgcaggaaaggccagcttcagccagggtgacggtgggggtggtgctcagggtggacagcattgattagaggtgactgttgtccaatattcagctaaactgtaggttttaaagcttgaggacaggtttcgttagaggtcaaaattcagtagttcctttcccaaggatgtagggagagaactacgttttgttaagtggctcttattgagcattgtgacattcttttgctaaaaacatgtttgtgcatgtatacacttgtactaagaaaatatcttcattttatttccttttcctttatcatgtgacataagatttattcacttcatatcagcatttaagtattgtcaactttatgaaataatatttgggttggcgattggttttgaaatgtgaggacaggagatctgggaggggtcgggatggaataatatggtttggctgcgtccccacccaaatctcatcttgaattcccacatgttatgggagggaccctgcgggaggcaaggggatcatgggggcaggtctttcccatggtgttctcatggtggtgggtgggtctcatgagatctgatggttttacaaagaggagtttccctgcacaagctctttctttgcctgcttccatccatataagatgtgacttgctcctccttgccttctgccatgattgtgaggccttaccagccatgtggaactgtaagtccatattaaacctctttcttttgtaaattcctcagtctcgggtatgtatttatcagcagtgtgaaaacaaactaatacaaggtctttcctaagtttggaaaaacgtgatttctcatctcttcaaaaacgacttccactccccctctgcattccctctaggttccagttacatgtgcgttggaccccacgccttccacgccccaccccactcccctggtattgatgactgccttcttctactgtccattctgtattccctttgccttcagcatcacctcagcgggtcgtggtttttttcctggtggaatgtcccaaaccttcattcctgaggggtctgggtcacttgtagtcttgcctggattgggctgttgtagtttcccgttgaccttaatcacaaggcatggtaatactatgggacgccctaatggatctcctgtattccatgtatactcttccttagcttcgttgcagagtagtagactgatttcaccttgatagaccagatcaatcaccccaacagtgtaactcctttcttagcctattgacataaaggtaggaggagcccagagtatccaggtgacaatcttaacttccagttcagtgggattgctgtttggtctcgcggtggcagcgttcttccctctggaactaataacgctaggccagcagaacgtaatgttgcaggaacaggaagcaaaacttttgctagtggatcattaggggtgatggtgagtggtgccacttccacttccacccttgattcccggacccgtgaatcctggctatgggagaaacagtatcatatattggacgctgattcagagcatccatggccctctggagaactttgccccagccctgcaaagtattgccacctagttggtgttgtaattgtgacttcaaaaggccattccaccattctgtcaacccagctgcttcaggatgatggggaacatggtaagaccagtgaattccatgagcatgagccccctgccacacttctttagccataaagtgagtgccttggtcagaggcaatgctgtgtggaacaccatgatggtggacaaggcattctgtgagtccatggatggtagtcttcacagaagcattgcatgcaggataggcaaacccatatctaaagtaagtgtctattccagtgaggacaaacctctgcccttcccatgatggaagaggtccaatataatcaacctgccaccaggtagctggctgaccactccaaggaatggtgccatatcaaggactcagtgttggtctctgctgctggcaaattgggcactcagcagtggccgtagccagatcagccttggtgagcggaagctcatgttgccgagcccatgggtaccctccattcctgccatcatggccactttgttcatgggcctattggacaatgacaggggtggcttgggaaagaggctgaatggtatccacagaaggggtcatcctgtccacttgattatttaaatgctcctctgctgaggtcacccattggtgagcactcacatgcgatacaaatatcttcacaaattttgaccactcagagaggtctgtccacatacctcttccccagatttctttgtcacaattttccaatcatgcttcttccaagtccctgaccatccagccaaaccattggctacggcccatgaatcagtatataatcacacatctggccatttctccttccaagcagagtgcacaagcgggtgcactgcttgaagttctgcccactgggaagatttcccttcaccgctgtccttcaggaatgtcctagaaaggggctgtcatgctacagctgtccactttcgggtggtgcctgcataccgtgcagaaccatctgtgaaccaggccccggtcttctcttcctctgtcagctgatcatagggaacttcccatgaggccatcggtgcaggctgggggagagaagggagggtggcgggagtggagaccatgggcatttgagccacgtcgtcatgtaacttacttgtgccttcaggacttaatcaagcccaatcacatacatgccacttccatttgatgatggaatgctgctgtgcatgacccacttcatggctagatgggtcagaaagcacccagttcatgacatgcagttcaggtcacacggtgacttgatgacccatagacaaacgttcagtttccaccaaagcccagtaacaggccaagagctgtctctcaaaaggagagtagttacctgcagaagatggcagggcctcactccaaaatcctagaggcctccgctgtgattcacctatggggacctgccaaaggctccaaacagcatccttatctgccactgacacctcaagcaccattggatctgctgggtcatatggcccaagtgtcagagcagctggcacagcagcctggacctgttgcagagcctactcctcttctggaccccctcagtcctccatacccaaagtccagaaagttgggaatcccagtgaatccctagcagcatcaaaaaaataaaaactcatacccagtcagattataacaaatcaagaaaaccatagagagcataggggtgtgccgcagtcacactgacaggccaccttcctgttcctgcagaaatggtaaccgcaggggacggtgcagccgcatcttccgtgtccttggaggaaatgtcagcatagggtcttacccggcaaaacatctcctaagattgaaggtgaaatagacattttaactcaaatgaaaaacagtaagtactaacggatgttcttcaagcggagagaaaatgatctcatatgaagtcagagaggagaaaggaatgagactcaaggcagttgggggaagcgggcaaatggccatgggcattggttgtgtaaaccgaggcacctcctgcagtgtaaaacacggagagaagtgcggttgagcatgggggtgggtgcgtgtggagtgagcgttccaggggccttgccgtgcccgggagagtgagggtaacggacattcccacggggatattcccacgcggagaactgggaccccgatcagggtctggagggagcgtgtgcccttggaatactgctgttttagcatttctggggaccgggaactaaggtaaattatttgaaacagaagtagatggcaatttcctaatataatggacatttaaaactcaattaaggcttttgagtagagttttatatgccctgagcttttgtactggcagaaggtattttgtaaacagcttgtgttcagtgttggccatctcttaaagtgcattttactttaattattctatatccataatgcacataaccagtttctccagaacatgtatacatgaaatgtaattgaaaagctaatgatttttagaagacaaaagataagagtcagaaccattttaattaggatgcaaactccttacataatttaattggcataaaagtttattgatttacttgtataatcatttatacgtagaaaaatataacaaatttcataattaaaactagttattttaagactgatatttttctttgttcattattgaaattttcaatttgtgaaatatttattattcaaaaaatagcatctgcgttgcaaatgaatctcattttgagaggaagagctctaggtgatacaggtttaaaatgactggtaggcacccacagggaaactaggttcctcacacagcctcgtttttcatgagacctgcggaaaggctctggggcgtcacgtctccctgtggccgaggctgctgttgtctggcacaccgtgagttctgggccaggacctttccacctgtctccctccactccgggtgaaagaggcatggggaatttacttgcttttcctttttgtctggcatcagctcgtgaaatatattacatcagacaaaagtcaatagagatttcccttttgaaaagcaaggtccatgataatgggctgaacacaagcaggtgactgtgtgggacagggctgcccaaaccgccgctggcctacagactgctgtcccggccagtgctccgctccctgcgcccctgatgagatggcagccctgggcacctgtggctgctccctcctcctgactctgctccaaggtgccacctgcccaaggttccgtcctagtccctgaccggcccctcctgtttcccccgtggctccttgccccactgactgctggctctcacctgctcctgtctctccacagtagtagcctcagtccagtgcttgaccctgcccttttctctggctccagctcctccttggcaagctgagtcttccccagctttgaggcccatccacatggtgacccccaccgtcacccaggcatctgtcctcaactgcagacccacaggtattcacatggtgacccccaccgtcacccaggcacctgtcctgaactgtagacccacaggtattcacatggtgacccccaccrtcacccaggcacctgtcctgaactgtagacccacaggtattcacatggtgacccccaccatcacccaggcacctgtcctgaactgtagacctaggttcagtcacctttgatgcctccctgaggtgtctgaagctgtttcagcctctgcaggtccatggctggacgctgtctctccagagcccatcccagctcacattggtcttggaggtcctgtggatgctgcctgggtgcagagctgaacctccccactggggctcctctgtcatggcccccctcaccacgctgccrtcttgggctctggccatctggtcactcatgtatctcacatgtctgagaacatatgtggcacagaggaaggagaaagtgccgggtgcatatttgtggaatgtgagtggtgactgaattctctcagcaagggtgggtgtccttagaccggccaatgactttgcccccgcagtgtgacagagagcccagtgctggtagcaggcgagaagccaggactgctggtcaccttgccgccctcagatgtaccccctttggagaagcctgccgcaggctgttttacaggccatctcgttccatttcagttgctcctcaccgtggtaatcggaaatgttaacgggcgcactcgtctggtggaatttatcgtggccagcgagggcgattaagcggctggtatgtggcgtgtttaccctcgtgtcagcatgactggtgttccaccctggcagatgaaggcccggtccttcctgggctcctaattggggacactacatccaagagccgtgacagggttcagcamcccgcgtgcagaatgccggcttccacggggcacgctttataaaatgctctttaattcaggaacagaatatcattagctttgtaaagtggatgaatacaatggacaaccaatttaattaacctctagcgtcagctgtcgaacaggaggcagaatgagattacgtgtgcatctctcccgccagcagccagccgggagaggggctcggcaggaggccagacagggggacaccttggtgccgtcatcccgtttggccccaggagctgaaattggaaagtcagtgctttgtaaataagtcagctgtcattttgtggtggtcacggagctcctctgagagcggacggtcacagccccccgtatgctgcctgggggtggcactgggggaagtgggcagtagtgaggacgccgccttgtccagttgggtcagccgcccatgagttcattatacaggaaaagatcaatgaagcgctacattgatttaaacaaaagctttgtttcatttattattgtttataatctaatgactgttattataactttgctttgatttattactcartctgttaaattgtttcaaaacaaggtgtcttgggacttgcctttgtgatagggttaaatgtgtgacttttgcaagtgtgttcagcttctcgggagcaccgtgaacctgtgccttgggttgtgctttgagacctgagctgagggttctgtccagcggtcctgagctgctgctgctcagcygggcgcccagagggtgtggtgcctctctcattgcccaggagccgtggaattcctgcctgccgtgacctgggcattgtggtggaggactcagaggcgcccaggccacatgcctgccctcagggggcttcccttccctgaaagaatttagatgaggaaaccagtgagtgctggaatatgcagcaccttgaaggaaaggctggggactgggactgccaagcctctgcccagagtagccaatcaagagggctgcttggaggaggctgcatttccacagagacctgaagcagcagggggtccatgtgagaagctggaaaaggggaggcagcaraggtaccctcctgacagaagggcgcagcctcctcaggcccagatggccaatggggctggagctctgtcagctgggtgtgtgagggccagaggacagctggggtggccactgtgcaggacgtggctgggaggaagtgcagtggcaggcccagaggtgcatgtggaaaaggccaccttggtgcccggtggagaagagaccaagggggctacagctgtggaggaggcgggggccccacagggagatgagggaggtgggtgtgcagcagtgcagagacgtggaaggctagagatggacagggttctgtaatccgtagaacctgtggaaggaagggatgtttgggtgaggcatatggacaagatgctggaggaatctggagagatccgtggtttccagtgggagctggaggagggtgagggtggagtaggtctccagtcctgaaaggtcggacttgtcacgggagacccaagtggagactgtgcagccgccgggccaggaggctggcctttaggaggctccatgctgtacacacaagagctgcccgctggaagatgggacagacgggccaccccagcgggaggaggaggtggaggagaagggctcgtagggtaccctgagcagatccagagtgctgttattcccaagtaggaggaggagatccagggaaggagaatgtggagtcccgtagcctagaagtaacagagtttggaggagggtggagggcgtgagaaggtgatgagacaaataaataattctggattatatttaaaaattaaaaatctacaaaatgagacaggaaaatgggcaaaggatacaaagagttcacagaagaaacttaaattgccaataatcttaaaaagagatgcgccagacacacagaccatggagcagaggggacagccaggaggcaccctgcctgggcagccaggtggtctctgacaagggtgcaagagcattccatgggagaggacagcctccagccagtggtgctgggacgctgatacccacacgcagaagaatgaagttggcccctcacattacattgtgtacaaagttaacccaaaatgagtcaaagacctaaaactataaaacttttagaagaaaacatgggccagaaccttcacaacattggatttggcgatgatttctcagacgcagcaccaaaggcacaggcagcaaaagaaaaaagagacaaattggactgcattaaaacacaaccactttgtacagccaaagacaacatcaacagagtaaaaaggcaaccgtggaatgggagaaaatatttgcaaatcaaaaatctgataaggaattactatccagaatatatagagaactccgaaaactcaacaacagcaacaacaaaaaccaacctgagtcagaaaggggtttgaataggcgtcttccctccaaggacggcgtggagacggccgataagtacacgaaaaagcgcccagctccacgaacctttagggagatgcagatccaaactgccattttcatttgtcagtttaaaaggacttgcaaaataccttatacccattaggatggctgttgtcaaaaagcgcagaagatagtgagaggtgacagcgtgctggcagtcctcacagccctcgctcgctctcggcgcctgctctgcctgggctcccactttggcggcactggaggagcccttcagcccaccgctgcactgtgggagcccctttctgggctggccaaggccagagccgactccctcagtttgtagggaggtgtggagggagaggcgcyagcgggaaccggggctgcgcgtggcgcttgcgggccagctggatttccgggtgggcgtgggcttggcgggccccgcactccgagcagccggccggccctgtgcaatgaggggcttagcacccgggccagcagctgcggagggtgtactgggtcccccagcagtgcccacccaccggcgctgcactcaatttctcgctgggccttagctgccttcccgaggggcagggctcgggacctgcagcccgccatgcctgagcctcccacccgctccgtggtctcctgtgcggccggagcctccccgacgagctccgccccctgctccagggcgcccagtcccatcgaccacccaagggcttgaggagtgcgggcgcacagcgcgggactggcaggcagctccacctgcagccccagtgcgggatccaccgtgtgaagccagctgggctcctgagtctggtggggacgtgcagaacctttgtatctagctcagggattgtaaacgcaccaatcagcgccctgtcaaaacagaccactcggctctaccaatcagcaggacgtgggtggggccagataagagactaaaagcaagctgcccgagccagcagtggcaacccactcgggtccccttccacactgtggaagctttgttctttcgctctttgcaataaatcttgctactgctcactctctggatccacactgcctttatgagctgtaacactcaccgcgaagatctgcagcttcactcctgagccagcgagaccacgaacccaccagaaggaagaaactccgaacacatctgaacatcagaaggaacaaaccccggacacgccgcctttaagaactgtaacactcaccgcgagggtccgcggcttcattcttgaagtcagtgagaccaagaacccaccaattccggacacaatagcaggtgctgataacgatgggagggagttggaacctttgtgcacgtgggtagaaatataacagggggcagccactgtgaacattgaggtgattattcaaaaagttaaaaatagaattcccgtctgattcagcagtcccacttctgggtacagaccccaaagaattgagagcagtctccagcagatatttgcacacctataatcaaagcagtattattcacaactgcaaaatgcggaagcagtaccatggaatatgacccaaccgtaaaaaggaaagaaattctggcaagcactacaacatggtggaggaacttggaggacattatgccaagtcaagcctgtcacagaaacacgaacatggtatgattccacttacatgaggtactcggattagtcaaagtcatggagacagaaagtacagtgcctggttgccaggggctggggagagcgggaagggaagagcgggaaggggagagcgggaagggagctgctgctggacaggaacagtttcagctgggaaggtggacagcgtcctggaggtgggaaggtggacagcgtcctggaggtgggaaggtggacagcgtcctggagatgggaaggtggacagcgtcctggagatggatgttgtgatgggagctgttgctggtcgggaacagtctcagctgggaaggtggacagtgtcctggagatggatggtgtgacgggtgcagacgttcgttaggcgcggactgcgtgccactgacctgctcacctgaaggtgggtacgatggtcaagtttatgctgtgtgcattttaccacagccacacagttcgatgaagaggtgcccaactatgctagtataatgaagatgcaaattaaaacaataaggtctaatttcacacctatccagttggcaaaaactagaggctggcactgggccatggcaaggatgtggaacgtgggcactgccctgatgagaccactgggggatcgtcatggcaacaggaggggcaacgtggtggtgcctgggagggcatgtgtctgtggtgacccagcaaggccatctgtgtattatatacatatgcacgcatgtttaatcagcgtgtaaactgtgtgttatcctatgtggaaggcacgtgtctgccatgacccagcaatgctgtgtattatatacataygcactcatgtttaatctacgtgtacacgtgtgtgatcctatgtggaggacacatgtctgccgtgacccagtaaggccatctgtgtattatatacatatgcacgcacgtttaatctgtgtgtacacatgtgtgtgatcctatgtggcgggcacgtgtctgccatgacccagcaatgctgtgtattatatacatatgtacgcacatttaatccacgtgtacacgtgtgtgttatcctatgtggagggcacgtctcctgtgacccagcaaggccatctgtgtattatatacatatgtacgcacatttaatccacgtgcacacgtgtgtgttatcctatgtggagggcacgtgtctgccgtgacccagcaaggccatgtgttgtattatatacatatgtatgcacgtttaatccacgtgtacacgtattatcctatgtggagggcaygtgtctgccgtgacccagcaaggccatgtgttgtattatatacatatgcacacacgtttaatccacgtgcacacgtgtgtgttatcctatgtggagggcacgtgtctgccgtgacccagcaaggccatctgtgtattatatacatatgcacacacgtttaatctgcgtgtacacatgtgtattatcctatgtggagggcacgtgtctgcggtgacacagcaaggctgttatatatatatgcacgcatgtttaattcacgtgtacatgtgtgtattaccctatgtggagggtgcgtgtctgcagtgacccagcaaatcctcctgcatagtatgtctgtgtgaacactcagtacccatgtacctggatgcttgttatctctgacacacttgctcagtaacaccatgcagggaagattattatagcatcaattacaatactcaaataattggaagtagtctttatgtgcaacagagaaatggataaattacagggttttttgtttgtttgtttgagacaaagtctcacttgctctgtcgcccaggctggagtgcagtggcgcgatcttggctcactgcgacctctgcctcccaggttcaagtgattctcctgcctcagcctcccaagtagctgggattacaagcatgggccaccacacctggctaattgttgtatttttagtagagatggggtttcgccatgttggccaggctggtctcgaactcctgacctcaagtggtcgacccaccttggcctcccaaagtgttaagattataggtgtgagccactgtgcctggccaaattacagtatttttatatggtgaattattatgtagcattcaaaataagctaaaatatgtctttatcttggtatcacgccataggacatttgagaaactgtcctctttcttggcttcctttgtgaaatccacctgtgtttctggatgtaactctgatctgtgtattttccttgctgtatctggttctatcataggaatatttcaaatttgatttacccatttgcacgttaagcatttgggtcattttcagttggtgttttcagaggtcatatgccattgtattctcatgcctgtstcctgagagctccagcgtctctgagagaggtctgtgtgtgcattccacgtgtgtatacagacatatgtatgtctacaggtgtatgcatgtatgtgtgtgtattacatatgtatgtttgtctatagtgtatatggatgtgggttatgtacatgtgtgtgcatggatgtgtacatatgtgtgtgtgtgcaggagtttctcttgggtgcaaagcagccgtgagggtgtggggttgtaagttcacaggatgtggtgtgtccctgtggctcatgtcttcagcagtcactcattagtcactgtgagcctgtcttctcatttctcctgtattacaagggcagaggaaatgtctgaaagatcaggctcagaaccacatgcctgcctcagctcgggcaggtgctttcaccctaatgaggacggaacgtcaggcttggcctctccgtgatgtccttagctttgttctcagagagcacagatgtttgccactggccctcacagggtgtgtcagagcccaggtgagcatggtttcgtgcccctgggctcctgcgtgaggccgcgtccttcatttgggggtcctgtgtcctcacagcatgcagctggggaaggagtgggctgcgtatgaggggagtcatgtttagtaatctctcgactctcatttaaaacaaatgaagttctctattttgttgcagacttgaagattagttaccaacaatatcttatgaagtttttctttctgctcctagatttattttattwaaaaaaaaaactggaggtgaaaacgctttatctgtagaaataacaaaatgtcatgctgtctcagagtgagatgggagtcaccaaatgctgccactcttttttctgagtcactgttgataagcacggtcggccttagtcagggctcccctgggccgcgggccgtggcctcctccctcaacactttttcccttcccagtggcagaatgcagtggcaggctccacagagatccccctggggcgcactgggagctggcacctgtggtcacgcccgcgacgcggttggaaccagcacaggggaagggccctgttgccacctggggcctcacatgggcactgcttgtgcatttcccctttctgtctcgagcagagtgtgtgctcatgtgcgtcccttagcgcggggtctgtgtgactgaagttttaggaatgtgttctgttttgtgcacgagggagctgggtgcagaagaccaggttaatgatgtgtgctttggtcgttcacctgattgcggaaatgataaattaccggccatctgacttgtttgcaaataaaaagtgatggaggcatttccaatggcagctttgtgttcctggcttgtcagcctctgccccggcctgagtcatcccgagccttccagccggtggctccgtccgggaggtgggaccctgctcaacaaacacgggctttgtgattgcacagtgcctgccgggacgcgttgttctttccaaatgtgtgagaagtggtctgctcccgccctgagttggctgtgtttgcaaagtgggcccgctatcagaattcagctcccgaaatcaagctaagtgacacggtgtggccatttatcacattaccggactccaattgaagttgagaggttgttttaatagcatttgtaaatactccatcttcactagccgcccctgtgagaggcactgagcccccatggtacgcagggttcgttgcgccctggtcgccagttggtgtggaagcctgatggtggtgactgggagcttcagttgcccattagctcccaggctgccttcagagaccagggtcccaccagtgcagccccagccagggcccaggttagccggggtctggatctcctgtgtggcccgcaccggatcgacttttcggtgccccaggggcttggctttgtccrgtggaggccgcttcccggctgtgccgtggcctccgggggctggaggactcctgcccrtgtctgcagtcctcgcagaagcatcacagctaatggctgcatttcactaatgcagaattaatgagcactcttgacagtcttgtttatcaatacgtaaaaagtattttgtttttagcaagaggcgaggagtcattattctcagatgtgacagacatactcttgacaagtactgtggtcagagacctgggcgagctggggacttcctgtcggcaggccccggacacgctcctggcccaatgtcctggtgtctgtgataaatgggtgccctgaaccgtattgatgggacagggtaaacaccgaaaaagttgggtcgaactttgactttaaatgttcattacagctaattatggattttctgactatgaattgcagtttctatccctgcactggcaatttatttttcacttatttattgcaaactttataatattctgttagctttaacattcaatgaggtaatgatttaaatgtttgcagcgacatttattatgttttttcagagtgctttctttatctgaaacaaatgaagggatatcttctataaagaagggctgatgttggtggaggagacattaagtttcatccatggggcataggcctgcagttttctctcttaactctgtgctgaaactctattttgccaaagaaaaggatgaacactggctttttaattttaattttctatttttttgagacggagtctcgccctgtcacctaggctggagtgcagtggcatgatctcagctcactgcaacctctgcctcccaggttcaagcaattctcctgcctcagcctcccaagtagctgggattacaggctcatgccaccacgcctggctgatttttgtacttttagtaaagacggggtttcaccatgttggccaggccggtcttgaactcctgacctcgagtgatccgctgcctcgcccccacaaagtgctggtattacaggcgtgagccaccaagcctggccaacactgggtgtttttaagacctgctgtaaaggtggctcagttccccgggttctgagcaggttcacagcagatgcctagtgagatagcgggtcagtcgagcagtgtccatgtcacagccgagtgcatcatggccacacgcagccttctggacccagcagcagctcaccagggcatgtggcctggggccagggaccacagagggcctgaggacacagccccatgtcaggcacacaggttctcccaccttctggctttcccgtggaggcagagatgctgcctgctgcaccctagacccacctgcgagagaagaggaagtgcactgcgtccccctcgggtatccttcatctccgtcccctagacagaaggtccctgtcatctagcctgggggctcccatctgggtggtggccaggatgcagggctgggaggcccatggttaccctgcagctttgggttctcccaccgaggtctggcactcatgagtgtgcatgtgtgtgtgcacatgcaagcgagcactcgcacctgccacctgtgctgggtggaggcggcacgtgtccctgctcctgcctgtgggtgtgttcccttccccaccagacgcagcagagacaggaggcagaggccaccatggcgtcggtgcacaggactcaggcttgccagccggcctctctttttaggagtttaaatgcactccttgaagtgtgttctgtcagagggcagctgtgtcatccccaaggtgaaacactgttttctggtgaggtgtccatgtggccagcgtccccgggagcaggaccatcaccccagcccaccatgcactgcacacgccctaggagcaggagctgcacrgcctccagggagcttcccatgttgtggagtcggcatcaaaccagagacggcctaacaggccccagagagctgacccaggggcccagggggctgcagacagggaccaggccagagttactggcacgattggccctcagcaggcccagaacataagtcccctcaccatgcactgtgcctgccgccctgcgcctctgagggagcagcagcctcctgacgccccagtgtggtgcaccttcttgcagccctgcccccaggacagccaccccagtgaccrgtcgtcagggagggagcagcagttccctgggaactgcagagcctgaagtgtgtgggacgtttagcttgggccatggaattaggtgatgttcaggcattgcctttgactttcttagagagacaatagctctgcagccccgtagggcagcatctcagcaggaggtccacactggggcactcagaactgcagggttgtggggtcatggttctgcccaaaacaaagcaagagtgcatgagtgcgtgtgtgcaagtgtgtgagtgtgagcaagtgcgtgcgtgtgcatgagtgtgtgtgcaagtgagtgtgaacaagtgtgtgcgtgtgcatgagtgcatgtgtgtgcaagtgtgaacaagtgcattgtgtgcatgaatgtgtgcaagtgtgtgagcaagtgcatgtgagtgcacgaatgagttcgtgtgtgagcaagtgcgtgtgtgcaccagtgtgagtgcatgactgagtgtgcaagtgtaagtgtgcgtgagtgcgtgtgtgcatgagttagtgcatgagtgtatgagtgcaagtgggagagcaagcacgtgagtgtgcatgagtgcatgtgtgcatgttagtgcctgtgagcaaatgcatgttgtgtgtgcatgagtgtatgtgtgcaagtgtgtgtgagtgcctgtgagtgcttgtgcgtgagtgcatatatgtgttaatgtttgcaagcgtgtggtgtgcatgtgtgtacatgaatgtgcaagagtgtacaagtgaagccttggaatgaggtgatactcaggcgttgcccttgtgttgcccacaggctcacacagacacagtgagggatgcaccacgccctgtgctttcagctgaggacaggccctgttcagaatgcagagttggggttagagcccccagtggctcagagtctcttccctgtggaaggccctgtgtgacctggtaacggttgggctccctgcaggcagcccctgccctccgtctgcagctgcgcccgtgtgccctcctctctggcccacctggcaccgccgcttcaaactctcccctgctttatcccaggacctgctacccccacagggcacacagctatctcctatgagataggtttgtttgttaagtcaggtttataacgattaatgtatagatggtgagattcgccctctttggggtataatttagtgagttttgacaaaggcaaccactgcaaaccagtgtagaatattctgatcaccccagagttgcaccaggccccgtgttggggttgccagatttagcaaaagaaaaaaatacacagaaataatacacatgtcagtacgaacacactgctgcatgtagacacaggttcatctgtagaaaataccacgtgaaacttgcagttcagatcaacaagtaactgtctgtgtggtatccgtcgacccagccctgtggcgtccagccgcgtacttttgccttctctggtatgaagagcagggatccctgtgctctgcaaccatccggctaatttgtaagtgggagacactggcagctcctggggcgatggggcagggtggggccaggcgcagtggagctgatggttggaggccccaggacgaagccgagcatcagtgctgggaagggtctggtccactcaatgcccggccggtgggacctgcgcccctgctggagccagcaccggctgcacggctcacctgggaagggtctggtccactcaatgcccagcccgcgggacctgcgcccctgctggagccagcaccggctgcacggctcacctgggaagggtctggtccactcaatgcctggcccgtgggacttgcgtccctgctggagccagcagcggctgcacggstcaccgcatgcctggagcttggtggagtttgggtgtttgcaggttacctctgcctgacatcctgtgcctcagtaactgtgattaaattataactggtgaaactcttgctctagctagtttaaaagagcttcttttattgttaaaaatgatctttagaaatattcccagcaccagtctctcatttgatttctctttttgctctacaggcactaggaagcttttattttcttcatgagtccttaaaaaacatctaccagtttgactttaaaggtaagactgcgtgccgtcttccgggattttgtctcggcactcacccctcctggtgtctggcttccccagacctctcctgccctgtctctgtgagtggccactgtgggctgggtgtcttgagccactgtccagaggtcactccaggggcctcctggacctggactcgaggccccttggctgtcccacactggctccctggcaaggctctggtggggacctggctttcctagagttgagttaagaggaaggaatagtttgtatctgtgttcccatccagtgtgagaaaatgaaaagccgaatgagagggttgcatgtttcagaaataagaacrggcagggacggtcctccctgccgtgaacagcatccccgtttgatggtcatgtgctgtgtgtcttcacggaaaagacttgccctgagacgctccgctgacacaagctgtcccctcctgttcatttctttgtcgggggcaggtgcgtgagctaggccgggtgtggggcttccgtgcgtgctccacacggcctgggggtgtttgtgcgatgacttcccgtctgacgctatcgtttcctgcygtgtgtgagttctcagaaccccacgcggcctccggagcagatgacatccatgtgaagtgccctgcacgtcgtagtaactgtggagccacaaacgatgtcgtttcgttcggattccgtgtttgtgctccctcgggagacggagcggctcctgtgaaattgcgcggyagtcttatctcagttgcttgagtggtgatttcattgatgacgagagcaagattctggccagcaaaatgatttgtcactgccccgttacctgaagaccttcagatccttccaaattatagcatccaagcccttctatgaggcccgtggcaggatcagccgcacagaattgcaggagccggccggtggcgctctccgctccgttttggagacacggcgtctgcgtgctgtgcgctcaggcacggagcggccggcgagagtggagagagcgcgccgacgcagcgtgtgctgcaggaagctggagccaaggagctggtgcgtcaggctgcgccgtgccgcggatctgcagaccttttgtgtttttcagtagccatttgaatacctgttttactactaagttaaatcagtcataaagtgcctggtgaacctacagtgtatttaaaactatacatgagatacacacttcactctagcaaaactttccccagagccctccatgtggccaaactaacaagaacaacatgaggagtgggcagcgagcatgtcctgagcacgtggtgcgtcaggaaggcatgcagacacaggaggcgtgtggacgcgggagacgtgtggacatgggagacgtgcggtcgcgggagacgtgtggtcgcgggagacgtgcggtcgcgggagacgtgtggtcgcgggagacgtgtggtcgcgggagacrtgcggtcgcgggagacgtgtggtcgcggggtgtgcggtcgcgggaggcgtgcggtcctggcaggcgtgcggtcccgggaggcatgcggatgctgacgatattctcagtgccccacacggcaggtgttgctgctgatgctcagcgcagtcggggggcctcgggctgggcggttgggctcgagggtcaggctcgggggtcaggctaggggctcgaggctctgagaaggactcaaaaagaaaacctagaaatcagaaacagtaccagaaatgaagcagtggctcatgtgcacacgcggctgagggaagaatcagcgagctggaaggtgttagaaacttcacaaactgaaaagcaagaagaaatgagaataaatttgaaaacagaagaaaatggccaagacctgtgaaacagcgacaacaggtgcagcttgtaaagggaaccccagtaggagtagaaggaaaggaacagaaggaagatttaatgtagtaatggtttagaactttccaaacttgtaactgacaccaaaccacagatccagaaagctcaacgaatgccaacaccaagcaggataaatgccagaaagtcaaccccmggccaccttgtattcaaactgcagaaaatcaaagaaaaaagagaagatcttgaaagaatccaggagattccttataggcgaggtgattccttatctgtaaaggaacaaggataacaattacattggaccttttcccaggaaccatgcaagaaggaagagagtagtgtgaaacatttaaagcattataagaagaagaatatcatattcagaaaaagattattcttcaaaagtgaaggaaattgactttgtcagataagcaaaaattgaagtaatttgttgccagtagacctgccttgcaagaaatgctaaaagaagctcttcaacggaaggaaatatcatatagcccagaaactctggtttacctaaagaaagaaaaagcattagagagggaataagtgaaggtaaaatgaaatatatttttcttacccttaattggtctagcagataacttttgctcaacgtaacaacagcaaccatgtattggttaactgcagcttatggataagtggaatgaataacagaaaagtcataaggacaggagggaggaatttggggtactctgttataagaaacctgtactatcgttttaaggaatatagtattatttaaaagtggacatggattagttatacattatattgcaaactatggcaaccactaaaaagctttttaaaagaagtataattgatgtgttaagagaggagagataatggaatcatataaaatgcccagtaaaagccagagaaggcagataaagaatgggagaccccaaagatacaaagaacaaaggcaacaaatagaaaacttacaaatatggtaaatattactccaactatatcaacgatccctttaaatgtgaatggtctaaatataccaattaaaggacagagactgtcagagtggattaaaaaaaatacccaactatatgttgtcttctagaaacccatttatataaacacctaaagattaatagataagggatggaggaaggtatagtgttctaacatgaatcaaaggaaaacttaaatgggccaaaagaaagctggaggagctatattaatttatagcatcaaatacatatattagaaaagcagaaagatctgaaatcaattatctaagcttgtaccttaggaaactagaagaaaagtaaattaaaccaaaagctggttgtttgaaaaaaacaataaaatggataaacctctagccagactaagaaaaaaaatgacacaaattattcatrtcagaaattatcagaataggcagagcagacttcagagctaggaaagttttcagcagtaaagagggacattacatcatgatgaaaagatcagatctccaagaatacataacaatccttagtatctagctgcctaacaacagagtgtcaaatacacaaggcaaaccaagtagagctgccaagagaaacagatgaacccactatcatagttagagacttcaacaccctgtatcaggaatgaacagatctggcaagcataaaatcaggaaagacatagtttaactcaacagcaccatcaaacaaattgatctaattgacacttataggatacctcatccagtaacagcagaatctacgtttttgtcaagctcgcctggaacattcactgagacatcacattctgggccataaaacacacctttacaaatttaaaagaacagaaaccatatacagcatgctcatagattacaatggaattaaaccagaaatcagcaccagaaaagtagctggaaaatccccaaatacttgaacattaaacaacacatatctaaataacatatgmgtcaaagaagtctcaagagaaatttaaaaatattttgaaccaaatgaaaacgtaaatacagcttaacattcatgggatattagcaaaagtaatgtttagaggtaaatttatagcatcaaatgcatataagaaagagctaaaaagaaaaaagtgctaagaagaaaggaagaaagagctaaaatcaattatctaagcttctaccttaggaagctaggagaagaaaagaaaattccaaagtaagcagaagaaaagaaataatgaaaattggaacagaaagcaacagaattgaaaacaggaaatgaatagagaaaattagcaaaaccaaaagctgattctttaaagcgatcaataaaatcgataaacctctagccagactaagaaaaagagagagaagacacagattattaatatcagaaattagagaggggccattactgccgatcctgtggacatttaaaggataataaaagaatatcattaatttctgcctataaatgtaataacttagatgggccaattccttgaaagacacaatctatgaaaactcataaaaggaaaactagagaatctgaacaggtctatagctattaacaacactgaataagtaattaataacctgctgaaaaagaaagcatcagaccaaatggtttcactggtgaattctatcaagcatttaaggaagacgttataccagttctctacaatcttttccagaaaatataagcagaggacaaacgtcctaaatcattctatgaggccagcattaccctaatactaaaaccagataaagacattacaaagaaggaaaactatgaactgtaaacaaaaatgctcaacaaaattctcaagagtcagttatatactatgaccaaccgagatttactcctggtatagaggctggttcagcatttaaaaatcaattaatgtaatccatcacagcagcaggcaaaagaaggaaaatcacatgatcataggatagatgcagaaaaagcatttcccaaaatccacatctcttcattgtttgaaaaaaaactcccagcaaactaggaatagaggggaagttcctcaacctgataaagaagagctccaaaaatcctacaatgaataccacacttaatgagaaattagatgcttttcctatgagatcaggaacaaggcaaggatgcctcctctcctacttctcttcaacatcttactgaaaatcttagataatgtaataagacaagaaaaggaaataaaagccatgttgatggggtgatgggagatagaactatttctgttctcagatgatatgattatgtcaagaatctcaaagagtcagcaacaataacagacaaacctggtaccagtaagcaattatagcaacattgcaggatgcctagttaagatacagaaatcaattgctttcctgtgtagcagcaatgaacaggtggaattttaaattaaaaacataataccatttgcttaagcacacaccaaaaggaagtacttaggaataaatctaacaaattaatacaagatctctgtgaggaaaactataaaactctgatgaaataaggaagatctagataaatggagagagatttcatcttcatggatagttctatggttggaaagtaggtgccccccacccccaaattcatctgctgacctcctaacccctaaggtgatggtgttaagaggcggggccttgggaggctgattagaatgtgaggtcagagccctcacgaatgggatcggagccctcatgaaagaggctgggagttcatttgccccttccatgcatgaggacacacacaaggcactatctgtgaggaacctcatctcctagcaccctgatcttggacttcccatccctccaaactaggagaaagacacttactttgtttacaaaccacccagtctattttgctatagctgcccagtggactaaggcagatgggaaaacccaatactgtcaagggctcagctcttcccaacttcagctatagattcaacacaaccccagcaaggtgtgtcatgccattgacaaactgactgtaaaggttatgtggaaagcaaaatacccagaatagcccagagttttgaagaagaagagcagagtcagagcctgcacttcctgacttcaagacttgctgttctgccttgtgggtgaatgggccaagcagactgtggcatgtcagctccacggggtrttatttggtgataaaaagaaatgagctttgaagctgcgagaagacacagaggaggctgacacacctgctaccaatgaaagaagccaacctgaaaaggctacacactgtgattccaactctgtgacactctggaaaaggcagaactgtggagacagtgaaaggatccgtggtgtctaagctccgagtttagggaatggcctctatttcacgttctgtccatgctccataagtcgctgaaacatctcatgctgtctcctgtccatgaggcacccacatccaggactgtgcgcctagggctgggccgggtcacagcacccagggccaggtcagaccacagcacccagggccgggccacaccacagcacccagggctgggccagaccacagcactctgttttttcctgaaactcctgcccaccccagtggtgacccagtaccttggcccatggtgctgtggtcctcaggttgccccctctgttcctcctgccatagtggggtggataataccccagaaactgcaggttggagctgcttgtgggacacaacacactgctccaaagcggtctccaggaacctcgttgacacccaggagtgtcacctcagtggcccaggagccatcctgtggcatcttgcaaagaggccagcagccacctgcccactggacccagcaggagtttgaggaatggatccctgccatccttgatcacaccccaccttgggtgtggagctacctgtccataaaaagaaaggctgaggcctggttgtgaacaatagtgagacgggccctgcccatggcgaggcctgtgtccctgggcctggcctatccactggggggtccaggaaaggtgccaagcagccactggcaaagcccatctgggaggcaccctgccgcgcgctgcctctctcaccatcacacataaacctcttccctggaatatgagtgatggaggctggatacggggaggaaatcgatgttattaaataaattcatgtgaaggtctgagtgaatggtaattctacagccctcttaaatatattcacgggtttaaaagaggatgccaattagctcctgtaaatctgcagtctgggagctctcaggcgataatggagtggagtgtcagattccaggtcatgggaggggaatttatgagccacaggcatggagtagccggcccgctgggggtctgttctgggtcggacccctcatcagggcctcctctcggggggcctctctggctcccatcgggctgaagtsgggtggaaacaggttgtgctccaggctggttggatggggcacartgatgggatagtcacctcgtccttctggtctcttccagctaagaagtatagaaaggtcgctggcaaagagatctactcggataccttagagagcacgcccatgctggagaaggagaagtttccgcaggactacttccccgaggtacgtagcgaggctttctcactgacgtgtttacttctcagagtgagccagtcagaagtgacatggaacacggaattttcgcattgcactgttactagtcacagctgcctgttgttacctccgataatctgtcttcctgggagtccaggcttctgtggttggtctgggctgtcacacgtaagggcagtgagaatctaaggcattagcaccaagtaatcagtaagttcctgaatcctcatatccaggagaaagaaccttcgccaaaagaygtaggaaaatcattcagctcccttggcgtgcacctggggtctcccgcacgcccagctgggagagggtcaggctgactggtggtaaccaagacagtggctgacagtcctgtgtgcccgtggtgtgagtgtggggcaggggcacggtcctgtgtcagatacagccttggtggttgtgccaggctgcgagcagcagggtcccggcagttatgcctgcgtcacacggagagattagaatcaaaatgtgtggaaggcatttgtcgtctcactgccagacacggtgttgatgagaaattggtgtttccttctggcggccatgcactttgctgagctgtgtgcgcggctgttgctctgtgcacgtgatctttgggtaaacctcacacgcggcattgtcggcgtctccctggctgtgtagttaacctgtcgaggcagcgtttgctgctttgcccttcctcatctgctgaatcacagtggggtgcaggcactgtggccagaagcagcccaggcactgagacggaagagctggcagctggacgcaggtttgggggcgtccaggctgtgatataggagctctcgtccggacttgtctgcgcaggcagccccaagaaggattgctctgcggtcctgtctccacgagagctgtgcaggctgaggctgctacggagctgacttccagcaaggccacaactttattaacttgctttatggcccgcaccttgagtgagggactgtggccgcccgtgaaggatggggtgctcctgtcaccctgtggctcggcctcctcatccgtcttcccaaggccaaggacgccgtgtcagtgggccagcctccygtcctcggtcctgcttccggcaccgcccgtttgcctccctccgctccggatgtccagcagttggaaaggacatgcaagaaagctccatggtcttctccacgcacagtagttgcgtccctgggtcatgacagcctccctgaaggggccacctgtggtgcaggcccatcggaagggcagggcgggggctgtggtgcaggcccgtcggaagggcagggtgggggctgtggttcccctggagagcctgcgagctgaactctggcctctcttgaacccgggcaaggctctcatctcagagtgaccagagaccgactcagggccctttgtgggaagcgtgggtgctggggtgggggggggctgggctgggcagggccaggcgctgccacctgatggcatgaggagagcagctgtgggtggctgggctggtccaggcagaggctgttgacccggcacctcgtctcaggacccatgtggctgcattgctgtccagggccgtggccggaccaggtgctgctgggctgtcccctccccaccaggtgtccacttattcactgggtcctgtccactccggatggggtaggagagcccatagggagccccatagctcttgggggtgggggccgaggtgtgtcctgagaggccagggcccgcagggtcagccagggtgggaagctcgggggcagcgggccctcagcaaggaacagacactctagggtcctcccaggcagccacacaggctcctgacccctccgtctctcagccccgccccgaagcagccctgccactctggccagcgggacctccttcttgcacccatgcctcaggcttctcttttggacccagcaagcggggagctgaggcccggggcccagactgaagttgggcaagatctgggggcctctgctatgactttgccaccctttgaagggtgggtgccctggcaggggtctgagtgtggcccctggccttggtccctaatgccagtactctgaggcctctgtgatgctgggggcctgctggcatgggtctgtggagggcatagcacgaggggccgcccctcccccaggaagagcagcctcaggcccggtttgtatagaaaccccagcccccagcctgggtccaaccccagtgttgtgcagtgttgtgtccacaggcagaggagaaggcacattctggaaagtagacgattcctgggaggaaaaggcaccgagcctctttgtgtggacccgtctctcccctgggaaagcagcgtgtcgctgtctgcggcctggtggtcagctgctcagcagatccttgtggctgctggtggctgggacggggggccagcccctgccctgggccgaggcctccctgtgggtcagggccagccctgccacgtcatcgtcttagaaatcctcccgggacccgtgtgtttgatgatctgcaaaggttttctgacgtttcctcttccctggtaaattaacaaaaggaaacccttattttaaaaactgtaagcttctaacattctgtccctagtgtgggtttttaaccccacagagcctatgtggcaccctgtgtccttgctggagggaggaaggaggagggaggggcccggggagccatgggagtcccggcctggcagcctggccgggcccgcccctccctctgtgcctctgcacccgacctctcgctgtgtttgaacacattttggaggaaggaactagtttcagactgatttctctttcttttattaccatcacttaagggtaatctaaatgtaattaccttgatgggggtataatgcagtctcagataattacagccgcagcagaaactaacaaaactttctctgctgatttatggatgcttttggcttggtatgaatttcaaatgatgcctctgggagccacactccagataatgtgaggccatttttaaaacgcagatttgtgtagtcgatcagggtgagtcatttttttccttttgcccgtagtgagaaattggttgctaccatagatcacagggccggctgcaagctctcatgaaggatgaattaattccactaatgctctgagcgggccttcggcgtgagggttgtgtggcaataacctccccgcagcctctcttttctccgtggcgatttatgccgtcttttagtagatgaaaccggctggattcgctatccatctgcctgctgaaggaaccctattaacaggggcctgagagagacttcatatcatcaggtgaaggatgtacccccacccccacgggatgtgggtgtcatttctgaggtgaaaacctctctgggagtagaggagccaacacaggccagggggcggccacctcgggagagcggagccacggccgtcccatctgcaggctcctgagggctccccaagtgagggcttcgaaggtggccggtgaccagaaagttcccgcacacagcctgggatggaggagacccccagccctggccatacaccctctgcctccatttgccgtggctggagcaacaagtatgtacatccagaagcttctggggtcttcctgagtcctgagcatgtgagcgttggctgaggccccaggacgcccgtctctgcctcccagcacttcccggccctgctctggaggacagtgttgggtgtggggtgcatccacctcaggctggggtgctcaggtgcgcccgtgggggcgtggcctctgggaggggcccctgaacctgctgatgactctggggacctccttcctcttgggccaccccaccccaccccagccctggctgcctgcttggggcttggccagcaaggggagtggggcgtcgggaggcggggacttcagtgcaggaattggggcggtggttcccgttctggttctttctccaaagagctggaggtcttcaggccccagtttcctcgctggggaaatgagggtggtacctgtcctgagtgctggtggggccaccgaagggtgcatgggacgccctctgtgaggactctccctgcaccgcgcatcccaccctaaacccaaggatgcgaccgcacctgcagccacgggccgtggaagtgtcaggacactgtgggctgtggcttcatttgttcctgctgtaaaatccctcgaaacatagtcttagtgcagtggtagctgctctgacgagcttacctcaaaaggaacttattttctacaaatactttagaaaatagttggttatgataatatactgttaaattttctgagattcatttgcaatttatttaaaaatcttagaatcctaaaactacagttattaccaatttatattattcaaaaataacattgtttctcgttttatttattcagtctatggataattaatgttggaaaaaattctccattactgtggaaaacttaaaaatttaaaaaaccaagatgtacccacatgcacatagattcaagacacacaaacacacaccttaacacaaataatcgaaaactcaggagaagaataattaattttggttcaaaaatttacaaatgccttccatttttaatggaagtaaaactgttgacggttatcgcaaattctaggtaaaaacctgggcatgctcagtttggggtctctgctgtacctgtcagaattcagaggcgtgcgtgcagggaggtgctgtgtccctgtgtcccgggccctactgcctgcctggaagcaggagaggcagtgcccgggcacagctctgacgcacatgggaagcgcttgcctccacatgccacggagcacctctgctctctcgttccacagtgtgctctggggctctggccccatccagcaggactgagacccatgggctgtcctagcagaggatgtggacagcgcctgcacccaggaagtgggctgtgggatgcttggggtgggccggggcacttgtttacacaggggtgactgtgggcttgggggagtggcaggggcactaccgcgagtctggacgtgggagctggcagagggcgycctgccggtgctggttaggagcggcctccaggctccctgccgagcccacacaccggggttgggactcccctccctcccgttgggtgccccccacccttcggactcaccgtttctcccagaggagctggtcctgactgtctcacaaggccagcttcccctgcggtcacccctgtgacttggtgcaggcaagacacctgtcccggtcgcttggtgattgcatcagcgaggacagatccgggctcttgtgattgtcatcagctggcgaggacatggatctgggctcttgcggtcgttgtcatacgtgcctcctgcacaaccctgtgcccgcggtgcctgtcttcccatccatgttgaccgcaggtttctcacccgccagccgcaggcccctgatggagttggtttctggggaactggccctcggccatcttcacacacaagcggcttcacccccccacatacacacagcttcacccccacacacatgcttcacccacagacacacgtggcttcaccccccacacagtgtcttcacccacacacacacacacacactcacatttacccayacacacacgtggcttcacccacacacacacgtggcttcacccctgcacacacatggcttcacacacacacgcacagcttctgccccccaacacacgcgcaccttcatccccgcacacccccacacacacacacgtgcagcttcacccccgcagacacatgcggcttcaccccccccacacactcacggcttcacctgcacacacatacacgtacggcttcaccccccccacacacacacacagcttcacccccacacacacgcttggcttcactcccacacacacacgtggcttcacccccccccacacacacaagcttcacccacacacacacgcacggcttcaccccccacacacacacgtggcttcacccccacacacacacgcaagcttcacccccacacacacgcggcttcacacacacatgccacacacacgcaagcttcacccacacacacacgcacggcttcacccccccacacacgcgtggcttcacccccacacacacgcagcttcacccgcatgggttctgaaggcttggcctgatctctgctgcagcatctggttcccaaagcatgtcaggccccccagtccccccagacaggaggtgtcgaggcacggaagatgagctgctggtgctctaggggagtcgtgtattgaggcgccttggcctgcagggacggtaccttttctcctggaaagacgcctgcctcccactgtcactagtagaggggcctcacccagttactgtagatttgtcaccagtcacacgtccagccttctcccatgrcagcccccatgggtgagaacccagccttgggcccagtgactgtggcctaaagccaccaagggaccataggtgcagttcttaacctgtgagcctcagtttccctttctggtcggcccgagggttgggtgtgtgcctgtgtgttggacgccagcccgcggcggctgctggtgcgcagagccacccctcgcagcccgccggcaacatgggctctgtcctcccctccttgtacccgaggccccacagctgggacttgaacctggcagcctggcagtcctgtcttacccactgccttgaggccctgggtgctgctggtgtggatcctgtgcgtggctgggccgtgggggggcagtggctgttccaggtgggccgtctccccggaaagtgcaggctggatttggacgtgtgggagatggaggaagggcgtctagtcaggcagcaggcagctcctctggagtgtggaggatggaggaagggcgtctggacaggcggcaggcagctcctctggagtgtggaggatggaggaagggcgtctggacaggcagcaggcagctcctctggagtgtggaggatggaggaagggcgtctggacaggcggcaggcagctcctctggagtgtggaggatggaggaagggcgtctggacaggtggcaggcggctcgtctggagtgcaggctgagtggaggggagagagtccaagcattgggggtgtcccagctgcaccgttggtgggagcatggagcccgctgtggggcatcagcagcacccacttctccccacagctcagcttcccactgatgtgtttccattgcagacacagttaccgacaggaaatgaacacagaggctccccggggcaaatggcctccccgagagaggaggcggacatgtttggaatcagagacaagtgtctggtgcagcacgcrgggagcctgccaccccgccaccccgccatagagctccctgggtcgtctgggcatggccccatgcagcagccagaccagtagcctggggatgccttggccagcctcctggagctttggcacagcccatgttgtttggcaagcagggcagcctgagcacrgcaggggatgtgggctcagyaccagagccagctcgtggtgtgaggacggatcctcctcgacgagtagagccatagcctggcgtccaagtgcgtggccaggccgggaggagtgtacaggaagtctctgtaccttatgctcaattcttctggaagcctaaagctgctctgaaaaataaagcctattacttctttaaaagtctgcttacctggggcccgggactttacaggtgagggaagaaggaccagccctggaaggaggaagcttggagccacctgtggaccctgagggtgcgtctgtgggtgcctcagtatcactggggagcagagagcccagaccttttacaatgctgggtggggtggccatggaactgcacaggtgaggagggggcgcctctcactccccaggagactgcaaaccaagaacgtctatgagacgagcagacaccagaatacagactcaccccaaataaagttgatttcttgggaaaagctgacagactttaagtatgtttaaattgctcaaagagataagtgaaagatagggttcattaaaaatgttattcaactaaaacagaaataaaacaagaaaagggaatatgaagaggagcctgtagaaacattaaacattctgcattagaaattacagaacagattctagactagatgtggtcaaagagagaatcagagaattagacaatgtcattaaggagttcatctaaacatagtcaagacggacaaagatttgtgtttgtttggttgtttgtatgttttttatttttatagaaaggagcagttaaaagacataaagactattaagaggctcaaataaactcaaaataaattccagaaagaagcagtggagcagtgttggaagtgataaggggaaattcttaaaaatttaattcccgagcacaatttggatacagagcaggatatataaaaataaacccatacctggatggcagtgaagcttcagaatattgatgacaaagagaaaaactttaaaacagccagagagaggaaaacatacattcagaggattcacagttcgtgtgccggggtgcttcttacagcagtggtggatccagagtgcaggggaagaatgcagtgtgtacgggaagggttggctggcttcagcatcacccccaccagtgtgtggggcttggaatttcccttcttgagcatgagtgggagcacttagggagggggcagggagcacttgtggtgggggcaggcaaagaagggcctcatgcctgggaatccacagccctagagccttgcccaggagggagctgtgggggccactgtcctggagggagacagggagaaggagacggggctgcaggggccactgtgctggatggggaccaggagaaggagacagggctgcaggagccactgtgctgccaggtgccgccaacaggccaggcgagatgaagggcgagtgtctgtaggagtttgcctgtggaggctgtggtgaccttgcagagagcatttgggcagctgttgtctggcacgtgcgcatactggaggagccaaaggggacggtggccagtggcaaggtggggtcaaagggagagcctctgatcactgcgctctccgtgttagatagagggagcacgccacgctggaccctttcttcacgggtgtttcgtccacagttaactccagattcccatctgctttcatctcctcagcagaccttagggtgtggtggaggagacagggtcttccctgtcctgctttccttctctgccagcccatgagcaccaagaacagcagcccctgtccacctccgcccccgatggcgccaggcatatggctgctgctgggaacggaatgggcggtgccctgccctgttggctgccgttcccccgccactgcctgaagcgctttgctttgtggaccttggacttgactctgtcagcctcttcccagtgccttctgtggttttcaagggtttcccaagaggcctaggctgtgaagctaccctgttctgcatggctgtttaaattaaaattaatgaagataaaatggaatctaaaattcagttcttcagtcatacactttgcacgctcggtggccccggtggctggccactgctgtactgggtggcccagcagaggaacctaccatggtgggaggtgggagggcaggagggcctccatgccatctcgaggggagccctgcyacctcttaaagaacacccctctttggaatctcatgctgttgactgtttcacttgaattttgggggtacttttagaccagagctcaggctctacgttcggtggctctgctaggtggtggggatcagtgagmggcatcggtgggtgagaggcatcggtgggtgaacggcatcggtgggtgagaggcatcggtgggtggtggggatcagtgagagaccacacacactgttggggtgggcaggtcacccactgtccaggacgcctggctgggcacggctgctcaagtcttccctgtggtccagccgagggcggccgtgtgtctcgagctccctgatcagcatctrtggtgacagtggtttccctgcasctgctctcacatgggggcatggggctcacaggyggcaggctggcacgtttcttcatatcttccccccaccccaccccaggctgggcatcagcagcccctgcaggcatctctgtgcgaagccccacttgaggataggtgcacagctcggttctctttagtggggcggcatcagtgccggaagagccctgctgtyttttgtttggaaagcatctcctgtgtcctttaggtgtgtgggacccacgtgttgctcttgctcacttactctggctcatttgtgtgacstgtttatttttcagtgcaaatggtcaagaaaaggcttcatccggacgaggtggtgcattgcagactggtacgtggtgtctgtgctttgtcaatttccataacgtttcttacccttttatatcttgcaccagcggcatgttccacacacctcattggaggctctactgattttgcatgaggacccccagctgcctgacccccacctgccactctgacccttttggttcacrgcgatgcattcggagcattgtcactgttccctgtaagtcagacatctgggtgcccagtgccaatggagacacagtgacggccccagtccctccccgcagctggagagttccrctggccagagcccgctgcacagagaagtcagcagggaggccccctagtactggggcccygtggctgcccagtgagacggcgtaarcgctgcctggcagcctggtccatcagcagactgagcacagacgtagcggagcctgcgtctcatccacatatcctctggcctggcctttctgcagtgaacatgttctcgatagcgccgccccaccttttctgcatcataagaaacagaaacctgttatctgctttcctaaggtggcttccaggtggctccccaacgtgtccctccagccatcacatctcatttgaatactgttttcattttcttttcatggattttccaaaacttggctgcttgattatctgctgccatgtaacagaccgccctaaacttagcagctttaaaaacacatacgaggtcatagctgtgagtgtctcaggacccaggagtggcttttctggggctctggccctggtcaccttggggcttccagaggactcatctccgagctcactggggctgtgggcaggggtttctgcccctccccctcgggcctctccctggggctgctcagggcaggacatccccaggaggagcaagagtccagaaagtgagggggatggagggagggaggggggaggagggggaggaggaggggatgggggaaggagggggagggggaaaagaaggaggtgggggaagagtgagagagaagggtaggagaggagaatggggagggggaagagaggaggagggaggaaggagggggagagaaagaggaagaagagggagggggaggacagagggagctgagaaggagccgcggtcccgtgcccaccccaggcagtgyaggctgcaggctgccctttgctgttggtcacagggaacagccttggcatggtgtgggggcacatggggcacgttcaccaggcagcgtcatcggggtcattgtggcagctgggccacaggctggaggagggcaagaccgcctgcacgcactcattcctggcgcctcctggtagggagacggccaggtcttggagcctgtggaggacacgcaggcagtgagggctttgtgggacagtgtccagactgtgccaagccctgcactgacctcccctggtgagggggcacgtccttgccagctgaaggtgctgagggtcccctgcagtgtgacagaggctcaggccttgatcaggccttgccgagtccatgtgcctgcaggcccacagccggcccacggggcttcccaagggtcttccctttgggagtgaaatgaagcactcttcttgcctgtccctgtgcccccaaccctgccttacagggtccccgatgggtgcagccggcagccctgagcagcatcagctgaggctgaggggtggcccttcctcttagcttagccatcagggagagtttccatagtcacctgtaagtttttctctttaaagaaaagtagctcactttttagttgcccagagtaactgcatttgtaaagacatattcagacttcactggaggtttcctgacctctggccttgtcggaagacaggtgggtggacaggtgccccgcctcgggtggctccgcacggcggaggccagtgcaggtcttatcttcccggggactccttgggagaacgaagtgtgacccggaggctccggcccttggtgacgtgtccttttctcttttggttgcagtgcctttgacttggtgaatatccatcttttccatgatgcttccaatctggtcgcctgggaaacaagcccttccgtgtactcgggaatccggcacaaggcactgggctacgtgctggacaggtaggtgtgggcgggcaggtaggcgtgggccgggcaagtaggtgtgctgggcaggcaggtgtgagtggagaggtaggtgtgggcggacaagtaggtatgctgggcaggtcggtgtgggtggacaggtaggtggggtggacaggtcagtgtggatggagaggtaggtatggatggcaggtaggtgtgctgggcaggtaggtgtgagtggacaggtcggtgtggatggagaggtaggtgtggatggcaggtaggtgtgctgggcaggtaggtgtgagtggagaggtaggtgtgctgggcaggtaggtgtgagtggagaggtaggtgtgctgggcaggtataggtatgggtggagaggtaggtgtgctgggcaggtataggtatgggtggagaggtaggtgtgggcgggcgggtaggtgggtgggcaggtcggtgtgtccactcaccctgttggccactgggaaaggctgtgcctgctctgggaggcacactctgctctgcgcttgctgatttgccgatgggccttactggagttgccccatggaggtggcagagcccccaagccctggcaaaggctggagctgcaccctcacaatggacttggatggggatggcttcactttctctctgacttttttgtgggaaagataagaaaacggtgccatggggtgctgtggtgggaggtgaataggacactgaagagtcagtgggagcgtgggggccacctccacctgcgcctgggcccctgccccccagtgctccgggctgctccaccggtgatrctgtggagatgacgggctgtcactgggaagcagggracccccattggtgggatgtgtctgatcttggggcccgtgtccctccccatctacagctgggccttttgctgaagctcaggccccacagccaggcagtctgggtttattctctgcccattccagttaggcctgtcatggaaacctttcccgccagcatccctgtggttgacaagacagtgctccgtcagcttgggcttgcagcagtgatgaacacaggcctgagaccagcagttctgccctggggtggtccctgatttccacctgaaccccattctgctccctagagggcccctgacctgagcccccgcccagcccccgtgcgtgcagaatgcggagttacactcccgactaagcgtgcgagggcctggagctgccctgcgcctcgcccaccttccagcagctggcatcctcagacgccgaccttctgttcccggggccggttctctcccacccacacctgtcttagcctggacttgtgcagagcagaataactgagtcattcccaggccaccactgtccctggggcagtcacaactgcytggggctgcacaggcagaggcagggattggcaggcactgaggtctggacccagagagggaggaggctgggcagggcctggtaccctctgagcctctgggaggcttcctggggaagacagtgggaggagcagtccatgtggaggggtccgtgggtggggcccctgccccagagtcatgtgtggtatgtgaccagcgccgtcagatgctcaagagcaggagtgggagagtcctatgagaggcacccctggggactgtgtggagcacatttctacccaagacccacgtcctgaggggtccctaaggcaggtggggttatgaaggagaacagcagccagcaggtccctgcctcctaatagtgccttgtaaggatagtgttcagtgtgcatgtgtgtgcctgtgcgtgtgtgcatgcctgagtgtgcacaccttgtgtgcatgcaattatgtatgtaattgtgtgtgtgcacacatgcacatgcatgtgagtgtatgcacagttgcttgtggggtttgtgtgggggtgggtgtgcgcacatctgcgtgtgtgtgttcgtgtgtgcatgtgtgtggatgcttgtgtgtgcatgtgtgggtgcacgagtgcatacatatgtgtgtgcacgcgtgtgtgggtgtgtgtgggtgcatgtgtggtgtggatgtgtgtgggtacatgtctatttgggtgtgtgcacacttgcaggggtgtgggggttgcattgtgtgtgcacacgtggacacatgtgagtgcacttgtgtggctgcatgtgagtgcgggtgtatgtgtgygcgggtgtgtgggtgcatgtgtgtgtgggtatatgcatgtgtgggtgcatgtgagtgggtatatgcatgtgtgggtgcatgtgagtgggtatatgcatgtgtgggtgcatgtgagtgcaggtgtatgcatgtgtaggtgtgtgtgtaggtgcatgtgtctgtgtatttgggtgtgtgcatgtgtgcaggggtgcactgatgcatgtgtgcatgtgtgtggggcctcgtgtgggtgcatatgtgtaggcttgtgtgggggtacgtgtcgatgtgtaggcctgtgtgggtgtgcatgtgcctgtaggtgtgtgcatgtgtgtgggtgtgtgcatgcatgggtgtgggcgtgtgggtgtgtgggtgcatgtggatctgtgtggatgcatgtgtgctaaggtgtatgcatgtgtgctggggtgtatgtatgtatgtgtgcgtgtgtgtgggtgtgtgtgcatatgtggggagagcatatgcacgtgggttggatatgtgtgcaggtacatgtgggtatgtgtgcatgcaggttgtgggtgtgtggagtgcatgtgtatgtgtgtgtgcgggtgtgtgtgcatttgtgggtatgtgcacatgtatgtgtgtaggtatgggtgtgcacacgtgtgtgtaggtgtacaggtgtgggtgcatgtgcacataagtgtgtacctgtcatagctcagcactgtgcatcctgaggaaggggtggaaggctgcattctccagtaggtgtggctccagggggagttggagctgatggggcccctcctgaatgctggctccgtctgctgctgtggtgagtgtggcctgcgtggctccttgcctgccgccttcacgatcctcccgggttccccacagggctctgcacaaggagtctgggctgggctcccatccctgtgctgttattagcgggtatatggccttggctstcctctgcatctggcccttgctgagggccctgaggcgtggccccttatcccctctgaccgcccctgacctccgtctccagagtgatggagccctggtcccctgccactagcctggtcccggggagggtggcaactgcgaggcctgggtgctgctgtgctcgtggccacacactgaggccggccctcagccctgtgcacggccacaccctctgcaggggacctgtccggcctcccggatatctctggagctggcactgacaccgaggcagggatcggtctgagcctggggactgtgctctcaactgcccaccgtagggaagcagcacaggtgggggatgggggcctggggctttgtcagcgacaaagtgactgatgaccgcctgtgccctgggcgccctccctggacagcatgtcagtcgcccagggagaagggcctcacccacaggagcggcgcggttcttcctgcctgatcagccctcggcttgcaggcaccaagcgtctcggggacctcccacggagcccaggagcagggagggccctgccgtgtctgctgttgggtcttggtgacagcggttaggttgtcagcatggcatggcattaaaatgtgtcattgcccctcgctgccatggctccgcggcctcaagaaagcagcctttgggcttttgggccacttttctgcgtctctgcattcccatgaatggctcctgcggcgcgctcagccagccgcagatccggacctccgcggcgtggggcgggccgcgcaacacaaagggcggctctgtcggagtctggaacaatgggtcgccctttcaccgcggctgctaacctcttggcagccaccagcagaccacattctgctgtgcggatcgggcaggacaatgccgcgcggcctctgaatggacgctgccaccaacggggccccattcacggcgttgggaaccgggcgcacattgtctgccccgcagggagacagcgaggaggctcctgcagcctcttcctggtttaatctccccgcgcggcttcccaggtccatgtcccgtatcagctgcggggccggcagcaccaggcccaggagggagggcaggtcccagccctggaggaggatgcaggccaggttaaaacccagaggcaccgtaggaccttcgcaccgttgctctaaacctaaacgcattccagagtaggaagatgattgtaaaacaactgagagacaagctctgagttaaagtcttcagaagcagccccagggcgagtgctgcggggtgcctgccaccaccacagccagtcacagggctccactggacttcttatcacagatgcgaacctttacttttttgtgtgtaatttttgaaattgttgctgttaacctcttgttatgagaagtttaaaaagaagacaaatccctaatgagtgaggaggaccaggctctgggcaggtgttggcggcatctgtgctgggctggggtcctggaccctgggtgaggccgggccgtgcacacccttgtgtggctcttggaggcgccgagcactcagcccgtgttgggggcagccccggtccctctcctggacacacaggtcagcccttggggggcatctgggggctgagccagaggtgcacgtcagccttcctaggcaccatccactgaggcgtcccgaaaccttcctgagctttcagctggaaaggagattttcccataagtgacgggactctttgtctcccctctgaaatgtggcctgggctagttcaacagaaacattttacattacaactgtgaaatctcggcataaagcacccctttgtccccccattattttctcacaaatacagtccattgtcatggcgctgaagttaatttgatcaacattgggacatttaacttttatgtccagtcaaaagagttgtttcatgctcattttgggcattcaaaggaaatgattgccagaaaaataatgttcttctgaacaattccaagcaattagtttcccagggagaggtgacgtgatgcccgcgccccagccccgctttgtggctttatggagggccatcagttagctgtcagccgctcaaagagcccccaacctaaatgtttctctttagacgttcccagaacttgccttgctgtgcagccagtaaagaaaagctgctgcgtctccaggcaaaggcaaactcggcattaaagatctgggtcaccctgagcgctcctggccacagggctggttctcgcgctcctcacactcccgctggcctcggagaacagctcacaggctcttgctggtcgtgggctcgtcccaatcaggctttctcagactcggagacctcagggtggccgaggtcatgtgtctgtggagcccaccaggcaccctgtggtgtccctccgcatgcccgggactcctggcagcacaagcccgtgccctctgccgttccgctgccgtgaagcccgctgcctctgtgtcgccttagcctctccagggcgtggtcggtccactgctgcccggcaggaggggctcctttcgcctgtgcctcagctgatccatggctgcgatcttcattttgttgaacatggagtcaagagccaagaaaggtggtgccgctatgcagatgcaggggcagcrcctgcacccgccacgcaccctgcacgttctccgcatgtttcctttccttaagaaacaaaccatgtgggcccgcaggtgccccgtcctccatcctgaaccccatcctggcccccagcatcagcctgaattcagcacctgtcgctcctttgcagctttctggcctcttgtgacacaggcacggatgtttctgtacttttattatgtgccagctggaggcaagcgtcgacgtgacgttgctgtgacgcctgtgtgtggtttatgtctttacacatgtcatcgcctgtgaccaacatgtccagcatcctgtgaacggagtctgccggacgtytccacgagctccagccacggtgctcggtcatgggactcgctgccggctgtctggagagcgtttgggtggttcccggccctttggtggcagacaggacgatgcctgtgctgggccatgggggccgtgtgtctccactcccgctggtcctttccacaccctgaaccccagcgtcaccactggcatctcagccagttgtgttttctgctagctggagaggagtggggggtcctggaggttgaggcacttctgtgccgcaccagtttttgtggtttatggcggtgtccaagcagagtttgagagggtgggtctcagagtgagaaaaacaaaagtaaaatggcgrtgctccgtgtggagagcatgagagcggcggctgccgaaggagagccctgcacagccctcctgccgccctgcacggggctccccgcacgactctgcccgagagcacttgatgtggggatggactcatcgaagggagtgtgggctttaaaaggtgccagacactgagaaggcacatactgctggggcccaggatgcccccagccccaaggctgaggtccagaggccatctcagccccgcccaccgcaacacaactctgtggcggggctttgcagccgaccttagttctcagtttgagatctgagttctggtgacagcttgcagacggccgccttctcactgcgtcctcacgtggtggagggagggagggagggaaggtgagcttttggtgtcttcctcttttacaaggacacccttcctcttgcatcagggccccgcctccctcccccacccccgtgacctcaggtgctggcccctaaagggttggggctccgaggctgggactcactgggtggggaagtcagggggcctttgggtgcggcactggggatcagcgggttggtcaaggagcttcctcaagagcagtggttgctgtgactccacccagtgagcagcctggctgccccaggcactttgggggctctgctagccctgaggctgaccctgctgcttcagaacatcccgccatctgcctgggttctgcctggaggagccttagacgactgtcttcagggttctgtggtacctgggttctgtctgagggcgccttagacggctgtcttgtgggttctgtggtacctgggttctttctgggggcgccttagacagctgtcttcagggttctgtggtgcctgggttctgtctgggcgccttagacggctgtcttgcgggttctgtggtgcctgggttctgtctgggcgccttagacagctgtcttcagggttctgtggtacctgggttctgtctgggcaccttagacgactgtcttcagggttctgtggtacctgggttctgtctgggcaccttagacggctgtcttgcgggttctgtggtacctgggttctgtctgggcgccttagacggctgtcttcagggttctgtggtacctgggttctgtctgggcaccttagacggctgtcttgcgggttctgtggtacctgggttctttctgggggcgccttagacagctgtcttcagggttctgtggtacctgagttctgtctgggcgccttagacggctgtcttgcgggttctgtggtgcgtgggttctgtctgggtgccttagacggccgtcttcagggttctgtggtacctgggakctgtctgggcgccttagacagctgtcttcagggttctgtggtacctgggttctgtctgggcgccttagacggctgtcttcagggttctgtggtacctgggttctgtctgggcaccttagacggctgtcttgcgggttctgtggtacctgggttctttctgggggcgccttagacagctgtcttcagggttctgtggtacctgggttctgtctgagcaccttagacagctgtcttcagggttctgtggtgcctgggttctgtctgggcgccttagacgactgtcttgcgggttctgtggtacctgggttctgtctgggcgccttagayggctgtcttcagggttctgtggtgcctgggttctctctgggcgccttagatggctgtcttgcgggttctgtggtacctgggttctgtctgggcaccttagacgactgtcttcagggttctgtggtacctgggttctgtctaggcaccttagacgactgtcttcagggttctgtggtgcctggtttctgtctgggcgccttagatgctgtcttcagggttctgtggtgcctgggttctgtctgagcgccttagacggttgtctggcgggttctgtggtacctgggttctgtctgggcaccttagacgactgtcttcagggttctgtggtacctcggttctgtctgggcaccttagacagctgtcttgcgggttctgtggtacctgggttctgtctgggcaccttagacggctgtcttcagggttctgtggtgcctgggttctgtctggacgccttagacggctgtcttgcgggttctgtggtacctgggttctgtctgggcgccttagacgactgtcttgcgggttctgtggtacctgggttctgtctgggcgccttagacgactgtcttgcgggttctgtggtacctgggttctgtctgggcgccttagacggctgtctcgcgggttctgtggtacctgggttctgtctgggcaccttagacgactgtcttcagggttctgtggtacctgggttctgtctgggtgccttagacggctgtcttgcgggttctgtggtacctgggttctgtctgggcaccttagacgactgtcttgggggttctgtggtacctgggttctgtctgggcaccttagacagctgtcttcagggttctgtggcaactgggttctgtctgggcgccttaggcggctgtcttcagggttctgtggtacctgggttctgtctgggcgccttagacggctgtcttgcgggttctgtggtacctgggttctgtctgggcaccttagacggctgtcttcagggttctgtggtacctgggttctgtctgggcaccttagacggctgtcttgcgggttctgtggtacctgggttctgtctgggcgccttagacggctgtcttgcgggttctgtggtgcctgggttctgtctgggtgccttagacggctgtcttgcgggttctgtggtgcctgggttctttctggaggcgccttagacagctgtcttgcgggttctgtggtacctgggttctgtctgggcaccttagacggctgtcttgcaggttctgtggtacctgggttctgtctgggcgccttagacggctgtcttcagggttctgtggtacctgggttctttctgkgtgccttagacggctgtcttgtgggttctgtggtgcctgggttctgtctgggcaccttagacgactgtcttcagggttctgtggtacctcggttctgtctgggcgccttagacggctgtcttcagggttctgtggtacctgggttctgtctgggcaccttagacggctgtcttcagggttctgtggtacctgggttctttctgggggcaccttagatagctgtcttcagggttctgtggtgcctgggttctgtctgggcgccttagacggctgtcttgtgggttctgtggtacctgggttctgtctgggcgccttagacggctgtcttgygggttctgtggtacctgggttctgtccgggcaccttagatggctgtcttcagggttctgtggtacctgggttctgtctggrcaccttagacggctgtcttgtgggttctgtggcacctgggttctgtctgggcaccttagacggctgtcttgcgggttctgtggtgcctgggttctgtctgggtgccttagacggctgtcttgcgggttctgtggtgcctgggttctttctggaggcgccttagacagctgtcttcagggttctgtggtacctgggttctgtctgggcaccttagacggctgtcttgcgggttctgtggtacctgggttctgtctgggcgccttagacggctgtcttcagggttctgtggtacctgggttctgtctgggygccttagacagctgtcttgcgggttctttggtgcctgggttctgtctgggcaccttagacgactgtcttcagggttctgtggtacctcggttctgtctgggcaccttagacggctgtcttcagggttctgtggtacctgggttctgtctgggcaccttagacggctgtcttcagggttctgtggtacctgggttctttctgggggcaccttagacagctgtcttcagggttctgtggtgcctgagttctgtctgggcgccttagacggctgtcttgcgggttctgtggtacctgggttctgtctgggcgccttagatggctgtcttgcgggttctgtggtacctgggttctgtctgggcaccttagacggctgtcttcagggatctgtggtacctgggttctgtctgggcgccttagacggctgtcttgcgggttctgtggtgcctgggttctgtctgggcgccttagacggctgtcttgcgggttctgtggtgcctgggttctgtctgggcaccttagacgactgtcttcagggttctgtggtacctgggttctgtctgggggccttagatggctgtcttcagggttctgtggtacctgggttctgcctggaggagccttagacgactgtcttcagggttctgtggtacctgggttctgtctgggcgccatagacggctgtcttcagggttctgtgatacctgggttctttctgggggcgccttagactgctgtcttcagggttctgtggtgcctgggttctgtctgggcaccttagatagctgtcttgcgggttctgtggtgcctgggttctgtctgggcgccttagacggctgtcttgcgggttctgtggtacctggattctttctgggggcgccttagacagctgtcttcagggttctgtggtgcctgggttctgtctgggtgccttagacggctggcttcagggttctgtggtacctgggttctgtctgggcgccttagacggctgtcttcagggttctgtggtgcctgggttctgtctgggggccttagacggctatcttgcggtttctgtggtgcctgggttctgtctgggcaccttagacggctgtcttcagggttctgtggtrcctgggttctgtctgggcrccttagacwgctgtcttcagggttctgtggtgcctgggttctgtctgggcacctkagacrgctgtcttgcgggttctgtggtgcctgggttctgtctgggcgccttagactgctgtcttcagggttctgtggtgcctgggttctgtctgggcacctgagacggctgtcttgcgggttctgtggtgcctaggttctgtctgggggcgccttagatggctgtcttgcctgcgtctgtggtgctgggagattcaccctgagggcttgaggctttatgggggtagagctcacagtgggtggagtaaaaagtgaagtcatgaaaaatagtccagcagtttctaggaaggtaaaaataaacaggctggtatgtttattttggggggatgagtttatttaaagtggcttaaacacatctgcgatgaaccatgcagtgaggtgtttatgattattaagagaaacttttaagcgattaactaaaatattctcagtagttttagtaattttatactgtcgatgtttttgcttatgtaaagttgtttgatcagagaatgtggtctctaccatagcagagaaacaaaccaactttaatagattcccaattgtacacaacttaggcctttaaaaatacagtgccaaaggtttcagctacggtcgctttcaggggttaaaaaataaaaaaggaaagaaggaaaaaaaccaactcctagcaagttaggtgtcctggttggatgaatgtctcacggccagtttgcttcccacactgcactagctcctccttgggggaaaaaaaactagccccattcgagtctgatattttttagggccccagtgagactgccgatgacgctctcccgccacctgccctgtcmccgtggggcctcccacggtgtcccaggccccagcagcctcgcgcccggttcccactgctgtgttaggraagcgcccgctgttggaaatgtaattcggaacgttcaacccgtgactctccctaagtctttaatctgcggtgtcgtgaggtcgcagttgtcctggagacacgctgacgagccccccagccgtcgcggtggagcagctgctgggacgatgaggcagcccctcctcccagtgcctccgccgcgtaatgagaccacttgtcaaaacagagagagacacccattttcaaggcctaaaaaattgatttttatggctcttcttgtaattctctttttgaattaggcacatgatattgatgtgggcctacgttttaatcataatagctactgacaaggtaattaattttagaacaactgtttttttttctcctgctccaaatggcactatattgaaattgaaagtgagctctgggagggcagcggggctggcactcaggtgattgcctcggccgtgacagccccttcgtcttgcggccgccgtgcaccctttagaggcagctgctgttattaatgggctcaagctgttctgtcagcagagcagggcgaggaagtgtgatccagtttagggtttcatgatgatcctgcaggattccagacaggacgatgacgcggcgtctccagggcgttgcaggcccacctggtgcgtcgcctggcggctttctcgggaagaaggagcagccaggcctgggcagggcctcctgtgaggcggcaccccagagtattgagagaggaaactcggtcagtggagtgagggccagccgggaggccgcatttcctctctctccgcactggggaactcattagagtttgttccgtcagggttctgctgtttgtttagccaactgacggccgcgtctgttcctgcgacaccgcacacagatgcttggccatgtggggattggccgtgtggggattggccatgtggggattggccgtgtggggattggccgtgtggggattggccatgtggggattggccatgtggggattggccgtgtggggattggccgtgtggggattggccatgtggggattggccgtgtggggattggttttgtggggattggccatgtggggatggctttggtatcttgtggtctcgcctacacctgggcttggctggctgcatcctgcccgctggccggcgggcgttgccgccctccctcgggagcctctgtgccccgggctgccgctctcctggggtctcggagcacagggccctctgtcttcctccatgcaccctccgagctttctgtgctcacgggacacagcaagcgcttccctttctcctgggcagagcttggggctcgtttaagcaaatcacactagaatagatcaaacttgttacaactgagatttaacctaaagtggaaggaattccaattaaaaaggtaaacaagactttcgtgggctttgccaagccaaactatagcaattaacaggcaagaggagcacgaaatagctgggaccatttttgaaagaactgtcaacaagaaggacttccctataaaaagttgtactaattaaaagcatgcaggaattgattttttaaaagatctgcagaaaagaatagattgtctcaaaaaaacccgtgccgctgggaatgttgtgttgagatacagacttggtgggaagatgggacacgttgaataaatggtgccgatcaattgaccgtccgcttgggaaatcgatgaacttagatccctgctctacaccttaattccggatggattaaaggataacccttaaaactctaccataaagatgaaggtgggggctccatgcccgcgtggggactggggcaggtgtctcagccacaggggaaactgatacatgtgactatatggaaattaaaacttttgcctgacagaagccaccacaggcaaaacggaaaggccagccccaggccagcaggagcacgtgttcaccacagacgggggttactcaatctccagaactcacaaggaggccccaggccagcaggagcacacaccatattcaccgcagatgggggttactcattctccagaactcacagggaggccccaggacgacaggagcacacgccatattcaccgcagatgggggttactcactctccataactcacagggaggccccaggatgacaggtgcacatgccatattcaccacagacgggggtcactctccagaactcacggggggccccaggctagcaggagcacatgccatattcaccacagacaggggttactcactctccagaactcacggggaggccccaggatgacaggagcacacgccgtattcaccacagacggggatcactctccagaactcacggggagaccccaggacgacaggagcacacgccatattcaccacagacgggggtcactctccagaactcacggggggccccaggcyagcaggagcacaygccatattcaccgcagatgggggttactctccagaactcacrgggaggcccctggaatcaaagagaaaaggccaggaaccaaagagaacagcaggctgtgaacaggtgaaatcgggagaaaatgcaaattttgatatgtagatttaaaaatattgagggtgtgcaagttaagatgraaatgaactcctacgctccatagccaaagtgaaatacagtggtgatggttccacccgcactcagtcatgaaagtgtgacctgcacggatgctccgtcctccctcgctctggtctaaaggccctggacagtgcagagcgggtccacagccattggtggccccggctggtgcctcacggccacttggctctccaacccgagggtggaggtgtcagcggtggcggcggggcaacgcagaacaagaccacataagaactgggaagcgggagaccatctgctcacttggggattcttctacttctcaagcgaatggatcaagctggaaaaggctgagttagtgattggttgggccccctgcctcccggcctcatcccactgggccctaccgtgcccctcatgcccctgtcaccagctccargagggcacagtgctcccagcagtgacctgcccgggctggcactccctgcctgtggacagctgtgcacacctgcagttaacctgattggaagctctcacttttgcctggctaataacctgagtttattatctccaaatgcagcgtagttggatgggcagcstctgtgctgcctgcccctgccctggcagccccacctggctctgggctgtgaaattaggaaatttggcaaccagagtatttcctttttttgtctacagatcacatgtttctgttccactgatggttttggtggccaatgccacgttgcaagggttctcgtgttgctttcacaccagaagggttgagtgccttgccctcctcaaaagcaagcagttcacggcgttactgactggagccgctgaggggagatttggggtttgagtgagttggcggtttctgagatctttttacaggcttatatctgtaagggaagccgcagtggaaaaacctttaggaaactgattgtgattgattgaaaatatgaggaagaatttttcttgagtacagctgtacctggctaaaaacatacacamacgtatgcagccactgttaccctctcactttgaaacgtccgagtggagatcatatgtaaaccttcaaaacaggtctgaggggacatccctgtctgggaggagagagcgggggctccggttcctgccggttcacctgcacgcgcctccccgtccatctccctcccgctgtcggtccctcctcccgtctgtctccctcccgcctttcctgagctctgcggtggattatttggtttgtggtggattattcaggcatccttgtccggccctttcccgttctcggggcagccgtggttttccatgcgtgaggctctcacgctgccctggcccagtgggtgaggaggcagctgagactctgcctttcctcttcctccatgtcgctggcaacagatgcgtgtccgtgttgccaagggctgagcactgctcagtggacctctattgggggtggtctcagagctgaattttgggtgtgcaaagaggcaaccactgaggttcccctgcagcaggtgacagaacagagagtgtgcggatggggagcgtggaggagcaccggggccgggcatgagggctggccggcttcagcgccctcggtaacaagtcctctttttctttccagaatcatygatcagcgattcgagaaggtttcctactttgtatttggtgatttcaacttccggctrgattccaagtcygtcgtggaggtaggcgctggcttccctcccgccctggtctcatgccttgctctgtgttgaggaaaacagtggaaggagcgtggccccttaytggcactttcaatgccatcygcctcccgggatgcactttttaaggcaaaacctttcaatgaagaagcatgttttgctgtyggcagagggatccgtgttggaatccggggtgmgcgggccctcaaggttgccccggatggcgggtgacagtgctgtggggctttgccctgtggcttccgccgtcggcacacaaggagctgctggagtgccgtcacagcgccaccccctcgatgcccacagagctgcagcctctgcagagtgtcagctccttcacactgtccaacttgatctcagcgattttttgtcataacacgtagaaactgtcagagcccgttttaaacattgtgcttttctgtctgcaaagtcattattccgtgagttaacgagtcgtcacccccgcctgggaactcaggggtcccgggtgctcctgggtgtgggaactcaggggtccagggtgctcctggktgtgctttcgggctggccggggaccagcagcttgggcgccgaggtgccaccgacaggaagtgggcctctaggctcagtgcaagggccgatgtttctctgtggtccagtccacgctggctgtgggtcctccctcccagttttcatgacttgggattccacttcccgggcagctgtgaagaggggggtgtgggaaatggtggagcacctgttgcccacccgccctggccctgctgccctcaccctcagcctccctggtggcccctccaggtgctgggcatgagctgacagcccacagcggggccacagtaagttggatggggccacggtgagtcagatggggacacggtaagtcggatggggacacggtgagtcagatggggacatggtgagttggatggggacacagtgagttggatgggaacacggtgagtcgaacggggacatggcggtccccgagactgttatcttcccattttagtctccagttccaaacacccacacgtattcatcttccaacggtggcaggacattgtttctgaaagacagactgagctggctttgatcatcctgggtctcttgtggttggcagaaatgagtgcccctaaaaccctctgttgggttgagctggcagcaccttgtcacaaggccccaccgcatgcctgtgtatcaacatttggccgtgctggtggcattgcctaaacgttcagtggctcctggtcgaggcatcccttcatctggctgtggaggaggaaggcagggcctctgcgtgtggtgggctgaggagcacatggagtttttaaagcacacatcccccagcaggggccccgaagtcctttccatcccgctgctgtgcttcctttctcctcgtagaggctgtcaaatggatcggtctctggcctgccatcccacaggctcggtgagggctcgagggcaggggctgtgcccatccttgctagaatccatgtccccgcgtccgaggctgtgcgggacccgggagcaaggcctgggggccacagaggcggggccctgtcataggctcctcctccacccccgccaagccacagggggctggaagcggcatttccggcaggtctggaacatctctgagtgagctcatttctaacctgttactcgagagccagtgagtccacagtgcacataagtacttcccgctctgactgggaggggccaggatgaaagtcaagaagaacccgcgaaagaccaaagccgatcaatcccgggcgcccagcaattggggaaaggtcagggagcttggaaagggccttttccttctggtagagcaaatgtcacagtaaagggcagctggtcctggccgggtcagagccgtggtgaggcacgcactggagcagccgcgggagcctccctggtgaagggagccagctgctgagcccggtggccgggccgtgtgaccacaaggcgtcgggggcagtgggaagcctgggctccggtgcctgtggggcttgtgtggccgctctggtcttggcaggcgtgggggtcctggacgctgggtcccgtggggcttgtgtggccgctgtggtctcagcaggcgtggggggcctggactccagggcctgtggggcttgcgtggccgctgtggtctcagcaggcgtggggggcctggacgctgggtcctgtggggcgttgggcaactcctatgaaggactgcaaggctttcctttttctgctgagcagaaaaggaagaaagcacctcaccggggtttgcctgtgggtgtggccgtaagaggaggcatggcgggagaacagtgcaggggcctcgggagccggcctgagtctgccacatcttctcctgcatcacctggcctgctcccctggcctccctaagtgccttcacacacagccctcaaccctcatgggtcactgtcagcagtgttttttgatcaccaagatcagtcctatttcttaaagagttcctctcacacaggcagtygcagcacggcagctcctgcccaggtctagatggccctggtgccctggaccccgccagggagggtgggtgcagagcaggaactgcctcccgggcctcagtgggctctccggaccttccagtttcaggtctgggacctgcctgagttttacccaggaagaagcaagaccatgctcgcccccacctgtaccccgtcctccgtgttcgtgttaggctgtcgctaaaggagccctcgtcccagccctctgcgctgctgaaggggtccacgcagagggccagtgctggggagggcactggcctgaagccagagttcgaagattcccatcaccaataaaccagtgggatcttccacggcagccttcatgcttaactttaaacatcaaactacagaggacgggaattctaatggctgtgcttaaggggctgtttactttgtgaactggtgataaacagttctccagaaactgccactttctcctgagagtcagtaaagagcttcascaacctccaggcagctgctcgagcggctggtggagcactccagggcgagtgagcacctgtgtctgagagccgcccacaccaccataagcctcaccagctcccgtccttcaggaattgagtcgtcactgttttttatcactttcccatccacagtaattggaacagacatggagttacttgaaatgctgtttttcctctcagttcccccacagtagctggttttaaatggagtccagcagcctgggtccacctgccctgtcctcagcccctgcrgggccctccccaccacctcctggtcttccctcagcccctctgccctggaccggccaggcccctttctgggctccacggggtgcatcattgccacccatctgcctccgcccccatcacgctggtgtcctgcttgccggggccacgtgggcgagtcgggtgacagacccagtgcagccgggtgggctggtggacgtgctggccggggctgcgtgggcagcgcgggagggggcgccatctgctgcaggacagttcacgtctgtccctcacgccctgtctgcaggctcctcggccgctctgcagccccacccactcagctctgtggagaggtgtcctgggtgtaggaagagcagctcctgcgtgcagcttgttaagacagcgggtgtggggcttgcctggccatcgaagcgtcagaggtgactataagtcaggaagggaaagaaaactgcggtcttcctggaacctcctctgcatgccccaagtggatttctcaaaggaacagtaagcaggaacgtggcagagctcctgcgggcctggctgacccaggtggcgtcytgaagtcccagccgcgttggcgtgtcctgctgtgagcctgaccgcaagctgcctcccctctgcccctgcagyggctgccaggacatgaggctaacaagcaccgagggcagcccaggaacccgatttttcacttcatttcattttaattcagatctgataattcagatctgatagagccgcgtggctattccatgggacagtacagaccaggtgactttcaaccagtgcaggggctaccacgggggaggaacattcccgtggacttgctgtccagccagcttgggctcagctgctccccagtgcatccctgttctcggaaccacagccctgaggtgggccctgggtggggtctccacgctgcctggcagacgtggcggtcattcacatgggatggcgtggtcagccctgcacaatcccagggaagagtcaggcctgggttccccccggtgagaggtcagagaacagagaaggcggccctggaggtgaccgcacccctcccgcatatcaggcacccctcctgcrtatcaggtgtccctcctgcgcatcaggcgccccctcccacttaccaggcatccctgggagtgactgcgtgcctcctgcatatcagatgcccctgggagtcactgcgtccctgccctgtatcagacgcccytggaagtgactgcrtccctcctgcgtatcagacgcccctgggagtgaccgcgtccctgccccatatcaggcggccctgggagtgaccgcatccctcctgcgtatcagacgaccctgggagtgaccgcacccctgcctcgtatcagacgcaggtgttttcagcagcaggttttcttcgctggtgccgtttgttggtgtcagacatgaggaggggaccaaggaagggcacgcaggaggtggtggctgagcctccgttgcatctgctgggagtgggggctctccagccccgcgatcagcttgggagggagctggtctctggtgagggtttcccccagtgagggtttcctccagtgcgggtttcctccagtgcagaactcagtgttcacacgaatcggcagaaggaaagccgcatgtgctctgtggttatcaccgaggcatgcccagggcgttcgtgggaaatccaggttctgtctgcaaaggtcccttctaaatggcaccagaattggacaccatgtcttcaacagacgtagatgccacccaggggagcccctgtctaaatggcaccagaattggacaccatgtccccaacagacgtagatgccacccaggggagcccccggcaccccaggcagtggcaatgcagattcctgggagcagggaggcctccacccaccacggctcattcacacgcccggccaccctggtctctgggctctaggatgctgcccgygacagcagctgcccatgcagttaccaggccctggcttataatgccctcatgctggacagacgtgggtcttactgttctgcgctgtttgtctgccatttgcaaaggaatgggaagaaaaatgaatagttttaaactggattgtttactcagcaagtgtctaagatccttgcattagtgtttggagggttttcctgcccacgtggctctttaagactgtggatacatagctgttcatttgacaagtctttcgttacattttgcacacagtttactatgtaagtaaagcgagcctagtggaaaatagggaaaatgatgtgtagtgtagagttcttgtaggactgttcagtcaagggagggccacacctctggaataaggaccgcttttccctcctggcatcatcaacacagtcgtcagctgtgtgtcaaattccacagctcactgaagctaagtgcttggtgcagggactggcccgaagctgagcacctggatcccatggccgcagggatttcctgagggctgggggccgtgaggagtcacaggaccctggaaccgaccacggggaggaccctgaggcccagggcaggggcggtatccccagggtcacctgcggcccctcagtgctgcgtggcacctccacgtggccatgtcgcttcctgtgggccgcagacacgtgcaggctctccggagggtcacggcctgtcttctgtttgctcatcygttgacgtggaatgtgcgtgccaggtggatccctcccgcgcagagtctcctgtctccgtgtggggagattcctgcggcagtggctcagaggaccacaggctgggtggcttacacagcagaagtttattctctcacagtcctggaacctggacatccaaaatcaaggtgtcctagcgccacrctgctcctggaggctccaggggggacccctccttgcctcacccagccacaggtggcccagatggccctggctcatggccgcatcacctccgtctgcgcctccatcctcatgtggccttttcttgcaaggacatgagtccatggacttagggcccaccccacccaggatgtctcatcccgagatcttaactagttacacctgcaaggccccatttccaaacaaggccccaattctgaggctctgggtgaacatgaatctgggggcacaccgtacagcccaggacagcaggcagcgccggagtgactgtctcctgccacgtggtccactgaacactagcacagaaaacgtttctttgaaagccctacctaaaaataaatctcactgaaaaatgaccagatttatttgttggtggtgattaatttcagctgcattaattaaggtgccaattaggtagattattgaattttaaaataccatccaagcccctcttatggaaaatcaaaatctgctagttggcatggcatggtttttaaaaaaggtttctgactgtaaaacatttcgtagaaattttgtggaaaccaaagaaaattctgcacgattttcttttgaggctgacttggaccaaggaattgagggcaggtgtttggggacccctcataccggcaccagatcaggctgtgctgaacgctgatgccggcctccctctgcgtgtgaacggggtgatattggcctccctccgtgtgtgaacaagctgatgccggcctctgcacctgaacaggctgatttcagcctctgcgcgtgaacaagcttgatctccacttggccctgtggcacgtccctgttgcagtttccttccacatgaagctttttgatgaagaactgacaggagtgcctgggagctccttagcacacacatcctgggctctcccggacctgcgagtctcctgggagctcctcagcacacagatcctgtgagtcaggcccagggcccaggcagcgtctcctcacgtctgcctggcaccaggctcagtgcagctggtgaaccggggctgcgcaggtacctctggtcgggattcaggctcggtccacgccacccgcagtgccatgcccgtgcagcctccagggatgcatcgctgcaggcgcacctgagatgccagctatgctctcgtgtgacgcagaagcatcacctctgggctggactgtcmtggcaggaccacacccggcagtggccaccgtcactgcccactgatctcggtgctccctgaggctgtgcgcttctccttcctcagatgaaaagtggacgaggaatccctgtggtccagggcctcattttcctcgtacagctttcatttttcgcactgtggtccagcctccagtgtctttgcagctgggaagtatcaggaggaattggagcgtgcagcagctcagcatggcctgggcagagtgcggattcgcagcgtttccagctgctcagctgagcaggttctttttcacacaggcctgtggatggctgaggttctgggtgggtgagtgtcccactgttggctgccttgtgggcagccccattggtccagcaagtgtgtcctgtgcgtttgctatgtgggcccagcaccaggatgagggtaccgcctgccctcaagaccatggccttgggcaccaggagtgcccggggcagtgggtttgcctggcggctgcctcccccacctctcttcagttctccccctgcctgggagtgatttcccaccgaagtgtctgtgcacatctctctgccttcctagaagcatctgcattttaaaggagagggagtgtcggagtcaaaggccrgcaggagtgtcttgcagggtcctcggatggagctagcttcggggctgaatggagtgggttcagtccttgagatgggctctgcccttcctcttggcagagcagctgtgtggtgagcccctcagagaaggccacacagaggcgggcagggcctcccagagggcttagaagtgttgtctgctccccagccgtgtggagcaggtgcatctcgagcacctgtccttccttcccctgagcctttctgtcaaacagcagcatgggttagagtgagaccctgtgggctccatgcaggctagtcctccccaccctctgcaaccccccgtgtggagataccacrttcagaggccacgttggtacctgcagtctggctccttgggagccggaaaaggccacacccagcctccaccctgggtttgtggggagatctgtgccctcctctggggtggttttcagattgcccaggatcagagtaagcatacgcggttctgaaggtttgtggacagtgacacagtcgtgcatagccagagcgcatcaggaagccgtgtttatcacagtgcagagcgtcttgcctgatggagtgttctgggaatgctggaggctgggggcaggcggtgcccggtggcacgggcgccctggggcggtgttggtacgaagggacacgtgagtgtaatggtctttcagaaaccacggctggcctggctttggtttcactgctgagctcccacccacagcagcccatccttgccccctcggtcctggrctggtggggtcatcctcttgctctcactgccgaccgcgttcctctgcctgctcacagcgcctccttggtgccctcagtggcaggcttgctggaaagactcatcagaggttaattaaatccatctccacagcaatgggaggccgggcagagccgggctggcagcagcagattaaatacagggttgtttgccctgccgagagttcaggggcagggtgtctgggaggacgaccagcttggtggccctggaggctctcagaccccgaggtggagacctgcttgtgatttttggtggcaggagggttgtagggattggatccgggagtcctgccctgccccacaccagtctgtgaaagaggctctgtgtgcaaagcgaagagactgtcccccaggaatgcgcagcctcctgtgtttcagatgcagattaatgcagacttgctcacagagcagaactgaaaagatactggagtcagatctggcaccacggaagctgtaattacaacccaccacatgaaacacgccrgtcgtgtgccatctgagagggccgtgcgtcctcacacgagtcagtgatgcagcctgcggctccrgctgctgctgggatgttcagagggtgtgtttcctgcctcgcgcggtggcaactggcagctggggcgctcagctggccgtggtgacaaagagtgacagcagtgccaggcgcacccgtctccacgcggcccgaccgcacaccacacctgccgtccatcacgtctgacagtgacggtgatggatgcgtctttggaggctggtggccatttttaacaaccagttaccaatcactgacaggtacatgctcaggtgccagctgggcctgcaggggaatggccgttgggggcgttgacatccagaaggagccgtcctcggagaggggctgacgtcgcaaggagacaccccgagagccgggcttcccaaaacacggctctcaatgggcaccagggaggataccaccactgcccgcgaggcaggatcccagcacctgcctcaaaggctgtgtctgccgttcagtggagaccatggccggcaagagcagccaaggccaggctgcccagcagcataagcccaggcccagacctcagacattcctggcgcccaggcgtccttccttctagtgtgcactgcgtcctgggaggaggrgcagctgtcagccagtaggtaacatcgcacctggtcatggccccccacagccccacagactcctgagacccgctggctgctccggccccagccaggctccaggtgaagttgtgacctcatctggttaccggctgccttgttgagcccctctgccccctgatccctcagccgtgggcacagtgggcgccgtgaggctgtgggcaggagaggccaggtccctgtgtccactggcagctcccatcaggcgtgacagacagggatgactgtgcagctgtcgctagccctgtgtatgggcaggcctgagctcctaaaaactgagagcatggcggcygactcctcagtctgacgatgttcctgcatcggctgcagtcggcgcagccctccaaagccctgcaccattcaggatttggcccatcccacagccrtgagcggactcgatgtggcaacatgggcacagtgtgtgtccagagggcaggtggcagggacggtcccttctaactcccacagaccccagaaagcctggctcagagtgacactcctgtagagcctcagcaccgtctccagagcagcatggatggaaagatgcacacagccccatcctcctgcygccgtgggttaatgttagcgcagccccgtcctctgctgccgtgggttaatgttagcgcagccctgtcctcctactgccgtggactaatgttagtcatcgtcaagttctcatcttacctggggacccagtgtgtagacagaccttgtgcagacccagtggggcactgccctcgccacgtgcccagcgtgctctggatggtgaggcaggccagtggcagcctctctgccctccctgccagctcctcagccacagggacgcccttccctgagggtggaggtcagggcggtgagggcctgcagagggcacgtgagctaagccgtgctgctcggttcactcacttgttattctagagtcttggtgtaaaatagcaatggcaacaacagaagcactgatttaaatcattaaatttattttttaatttttctgtttagaaagagattttatttggtctgtttctatatagggcctatgacatcaactgaaaataaaataaaatgttatacttaattatagtgatgacattaggcttcgtatttaggggattttttctaggaagttcactttgcaaatattacccaatattttcaactggtatattgatgccaagaatcttctcattttatagaaaaagaagacaaaaaacaaaagacgcttggcattttctctggtctatgctgggactctgttcgaggaactgttttttggactcactcctaaatgattcataatccgtagtgtgttcactaatctttaatgcacttttctatattttttatgagctcatactttatttaaaaattcctctgactgcccttggtttaaaagaaacccatgggaaaggtagggcayagagcaggtctctcgtgccaaggcagggggttgctggagaccccggacactgtgtagcctcattcgtcctcctccttcacacatcgcacccggctcccttactagcaatcagtggctctgacaagcatacaggggaccctgggacgagggctgagctctgtgtcctgcgtccccctccctttgccacatccccctccccacgtccagccgtgccagtggaaggctggggatgtccgggaggagccacccagaggcacagcaggtgcttctgccgccgggcagggccagtcctgtggagccacccctgggcccagcagagggtgcccggcatggtgctagacacagcctgagaaagagacccgccgccttcttcccagaaagtctgttgagctctagctggcgtgagagcaagtgggcgccactcccattccatgcgcgctgtgtccgagcctgccaggctgctggagtccgggagcaaccttgggagaggacatgaaagagtctttatagcatgttgttgttctgggtggccgttgacaatgaacacagagaggagggaggccactcggatgctgacgccaacatctccccatgacagtgcctttcactggctgcatttctgcaccccataagcttgggatgcagggccttgtgcctggccctggggctcgcggtgaggtctgtgctccagggcctcacggtgggcacttttgtcaagtgatagggtcccccttcgggtctagggttcaccaggaagaccgttgagaagatggagctaaccagaagggctttctcttgggaagtcaaagtaagggaggccggcgaagtgtctgagggcccgccccgcagccctcccagcaaaccctgccccacagccctcccagcaagccaggctctcagctcctcagattccatctgggatggtcattctctgtgttcggtgcccactctggtcctaaaaagctaggaaattggcaccatggcacactttacagaacgccgttcctggcttcactgggggctgagcatgggcacgtgcccccgaggaagggtccttggtgcctgccaccctggcctcccggcctcaccacacatttcccacgccaagtctggccggggtccctctgccaagctcaggcccagcccctggagaagcctgtgtgaggcccgtggtgggggcgtgccgacagaaggcagcgggaaggtggtttactcatccttaccctgcacctgctacacccccagcctgtygagcctggagggcacagctgttgccctgtgggcctgtgtgctaataggtcctagtagccaccagcatacttgggggtggtggctatagtgccagccccctgatctcagccactcccagagggggacgcagcgctctctggcctttgctgccctccttgccctgggagccgggtgagtcgcactctcgcttccaagaagctgcwcacgtgtgtgccataggaaaggagtctggagcctccgggagttaatttgagatgacgtgtgctgtttccatcaaagatcgtcaggcttgggtgtagtgcttgtgaggccctcgccatgccccctgccaggacccaggggcctcagcagaggcgtcttctagggtctgaggaccttgtctccacmctgtgtgtccgttggcccgtgtatgtttgatgagcactgacgttcgggggtgccgcctgtgtccaccccaacgggatgccagaggactccagaggtgaggcttccttggcactttccgtggcctccccaggacgaagcaggttttaaagacaggacttgcacgttggggccgcctgtgaagcgattggctggttgtcctcctttcccactccacggcaatgtctaagatctgcaccagcgtccataatgtgagttaccaaggaatggctaaccccacgggaccagtaatgcttctccaggtggatatccagaggactggggcgtttgtcagaacttagcgtttgaattatctctgcctgtttgcagtgacctaatagtaracctggaactttgcgtgctggtttgtcagtaggctycatagttttctgaactgtaacggaattaccccctcgattctgagcagtggtccggaccctcaggcacgttcagggcaggagcggtgggagcctcttagtgaattctcctttcacagcgaaagcrttacgttggtgtagtggcgcggcatccgggagcacagatttatattcacgttcaccatgactagaagaattatttgtagcatagaaaatgtttatcccctggagtcagttctgttttctagagtcattcaaaaactgaagccgtaatgatttcctattaactcgttttaaggaaaacccatgtaaagtactcgggccttttgttgtgaaccatattttagaaatccttttctacttcctcctttcatccctgctgctagagagtggctacgtggaacttctgtgtataacccttctttatttctagacatgtttctggttaaaatttaaccaaaaactacaggataataaagaaggatgggacttggcaagtttcttcctgccgtgcctttggtcagttttcccagtgagagccactcgcagggtccacatcgttcacccccagcattcaccacccaagggtcaggcttctctgacgtcacagtgatttcctggaggaggaggagagaaaccctaagagttcacctacaaagaaaggggaaggccagggacagtgcctcacacctgccttccmagcactgtgggaggctgaggcaggaggatcattgagcccaggaattcaagaccagcctgggcaacatagggagtccccgtctctacagaaaataagaaagtaaaattagccaggcattgtggggcacgcctgtagtcccagatactcaggaggytgaggcgggaggattgcttgagcccrgaggtcgaggctgcagtgagccagccatgatcacatcactgcactccatcctggccaacagaggaggaccctgtctcaaaaacctaaaaatagagataaataaaaaaagggacaccgcctgtcttgggttgacagcatgagatgggctggccagatctccgcagcctaacagtgggcagctccgtgtctgtgggtcacaagtggttggtctcagtctggttcctgctggacaaacactgcaggttcacaccacgggaacttctcggcatctgtgccaggaaagttagagcttcctcatccttggaaccccagcctgcattgcacccagaagaggataccccygaatgaagctggaggctgctgtccactccacagaaccctggccctcgtcacacccagaagaggatgccccagaatgaaggtggaggctgctgtccactctgcagaaccccggccctcgtcacacccagaacaggataccccggaatgaaggtggacgttggtatccgcgtccgcttgcttttctcaatagccaatgtaaactgaggtggacgtcagtatctgtgtccgcttgctttactcaatagccgacgtaaactgaggtggacgtcagtgtccgcgtcygcttgctttactcmatagccgacgtaaactgaggtggacgttggcgtccgcgtctgcttgctttactccatagctgatataaactgcagctggctgcagcacccacgaatggcttctttccgagatgtggccgtcctctgcagaaaggatgcatacttacagagaaggcgctcactcctgagggagagcaaaggccaggtcagagctgtgtgggacaggaggtgtcctcacgagtctcctggagaggagcctgctcccagakgccaatcagcaccgggtcctacagccctgaggggcggttgctctgtgaacttactaccagwtagagctcatgcgccatgagccacgctgcatcagatagggccgaggagagatggcgaagtgctcctcataggagcctgttctgttcctgatggatgaatccaggtgagtcccgtgtgaacacagagctcagagtcccaccccaagaacacactctgtgttcccyttgatgcagccccgacctgggccagcacgcgcagccccgccctgcaggaggaagccttcgcacagtggcaccagctctcagaggcgacaccacgccttgtcctgagcagagaggggcgctcccagctttgtcctgagcagagagggtgcccaccgcctgtggaagtcagccccaggtctgagcgagagggccacccccagcttcactcgctggccgttggtctcaggtcctgcctgccatccccaggtggaaggcggttgtatctagtccggcgcccagtcaggctgtgtccagccagagcttcccctgcggggttttgctgttttagtcattgctgttcttcagggaagtcttggagacgggcacagctttccataaattacagccccgtgaaacaaaaagtgcctcccgatgagttcggaccgtgagggacacccagctccgatgcttccttcccggggtctggaatccctggtgaaccggggcccttggtagtcaagaaacctgtcattgaaattcatgatgccggtttggttctctttgccgagatttatcattgacaggcatcctgcgtcctttggccctttatttaaccgctgaaggcattgtttttaagaccatttcttttasaagagtttcttttcagatgttcctacgaacatctgtttgtggctgaaattcgacccagccggcctgcgcctgccccgcgccccctttgtccccggccattgtttctgatttcatgctatcagaggtctgcgtgtttttctgcatgaagttgtcagcaggataaaagctcaggagcagggtcacgttgagaggggagggcatgaaaaattggtaaaatgtgtcttcaaggccacccaccagtgctgcactcagccccagcagggactgggcccgggagtgagggcagcccacccaccagcgctgcactcagccccagcagggaccgggcccgggagtgagggcagcccacccaccagcgctgcactcagccccagcagggaccgggcccgggagtgagggcagcccacccaccagcgctgcactcagccccagcagggaccrggcccgggagtgagggcgagcccacccaccagcgctgcactcagccccagcagggaccaggcctgggagtgagggcgagccccttgcgtgaaccctggagggccggaccctaaccctggggctgtgggctctgcccctccctccattcattcatttgtcccgtgrgtatcaattggatgtctgcaaagtgccagaggcagtttgcttccgaatcagcactttcttcaagactggactcactcctcgtcacgtgtggggaggaaacttctgaatcactgaagtcagtggctgagttcacaccaccccagccagcccacagcggtcacaccctagctaagcttgctgacgggcagcctcactggagcgcagacgttaccctcccaggaaacctgtgatgaggactggggtgcacacrtgtgctgaggacaccctccaaggccggccccggggctcagacaggcaggctggggccacatctgagcctcctggttttagtgcattcactctggcgcagacagaccatggctgagcgtgtggtcccgaattccatccttggaacagaggaagtttttgttatgagaaagaactccagccacagcggatttgcacctgcaggtctgtgtcttgcgacacttaagggccaggctggacgggcccccacagaggtggaggagtggccggctctggccaagctgccagacaccaccagggaaacaggtgcacccacagagcttctgtgcctgctgaggggctgggagtcgtagcctcaaggagcaggctcattttgttgctttctgctttaaggtggtttttcttctggttggatgagaaaagttagttgagccccccacggattgactcagcagctgagtatgtagaaactggcctggtcctggggccagcatgtgagccatcccccaccacccacaggcctcccaggaggccctgctcccgcagcagagcggccgctgtcaccgaggcaatggccagatcaggaattccaggacccccgggagggtgggacactgcggctccaccggtccctgtgtctatggaatcggtgtcagcggacatcccgttcatggtgggatatgcccgtaggtgtcgggcagatgggggagtttcaataccggctcctttagggggtctcagtttggaggaaaaaagccttatttccttgatgatggtttcattccttaagaacgcactagaatctgccccttagtagctgcctgtggtgtttctagattcgggggcaacgttggctttgtggttcgtttttattttatttaactgtgaacgcccttttactccctgcattgaggtgagacagaggacacggctctcaaggagaggaagaagttgttgggattcccaggcttcatgaggccgggctgtccctgagcctgaggcgacctgcagggctgactgatttctatccactgaggaaggttaggattcaacctcagcctcactttgtgcagccgccatgttagacatgccgccacagaccacggcaccgttgtccctcccgaaagtgctgtcctgggcccggcggtgcagcccctggcagcttgygaggcccgggctgcccgcctctcccgtggcacaggcttggggacagggtgtgcccgagccagtggctggctcaggaggccacagaggtgcatttgcctctgctccaggcragcttgggcggttctgggagggcctggggacacagggtgacgtggtgggagggcgctatggcctgtcagcctttgatcttggggcaggtggttctgcctgcctgccacagaggacggggtcctccatcccctcgcgagctcctggaggccacgatgctcctggggacacctccyctttgggaaggtgagggctggggctgtccctgttgccaggctctggccctaggaaggaggtttgtggccccagtgactaacggattcccttgtctgcctgggagtgtgttgaccaccagggagtaaccagggaactggactctccgtgtggcaggaggggcatctcccagccttcgagcctgattgcttttccagtgcctgagctgcacccctgggatcccagctttcccttcccgagtccgggcagcatctgtgctgggccctgctgggaccttcctcctcatgtgaggcatgtsasggbtggcactggccccagcccgggcctcgggtgtggtgggcccacagtgtgtcagaccctgggtgtggtgggcctcgggcgtggtggcctcgggtgtggtggccctgggcatggtgggcttcaggcatggtggcctcgggtgtggtgggcccaggcgtggtgggcttcgggcgtggtgggcctcagctgtggtggccttgggtatggtgggcccgggcatggtgggcttctggcgtggtggcctcgggtgtggtggccctgggtatggtgggcctgggcatggtgggcccrgccatggtggcctcgggtgtggtgggcccgggtgtggtggcccccgaggaggagtgtgtcctggagaacaggcgggtgcgtgagagctcccagctcagccacaagagcaacacatgctgcccacccagcctcgcctaccctgcctaccctgagacgccttggcaggacctagaagccaagcctggggtagggcctcggcgttgcctgcacgtgtgcccagatggcttcttcggagccctgagtgggcccccgaggctgtgtgtccacttggcccaggcagggcgctctggacacctggtgattccaggtagagagtggagcccaggcgcctgctggctgtgcgtgcggtgcctggaggctacagccagcgaggattcatttcagagagtacagaacaactttttgtttttataaaccagctcttgaaggttgcatttaaaaacttgggctgacagggtctgagaggatgtgtttgcctttagtagagttttggattttgtggcagagtgtccgggacagttgagggggtgatgggacagattcagctcccaacgtgagaccaactgcacaggtgcacattggggcgactctgcctgccatgcagctccgtgcacatccgaawgacygcgttatttccttgcacagaaaacagcctttctcctgggctgacacctgtgccctgggcctgtggacgccctgtccaggcagcatgcctccttggttatccaaacagtaagaagaaatgcaggaacttcgtgatccacacgcgtgtggatgaccctggcacacagcgttcccgttaaattctaagtgtggataagacggcacaccggaccactctttccagagcctctccttgcggctgctaataatgaaatacatcttagatggctttttaaacatagcatttagggtatttgtttctcctttcaaaagagaagaatcccttcccaaagtaggcgagccggaaaggcccagcctggccrctttccgcatgagtggccacgactttgctggattgaaaggcaaagggaacaggccagctttggccccttcagcctggcctgatcactcctttacagcctgtgaatgaggcagctctggggaggggtttggggtggccggccccttcctgggctctggggtccatcagatgtttgtcctttgggagcctgcctgaagtgctgagataaagcagtttttaaacagtttcccgcagatgccttttgggagacagagccrtgaatttcctgagccgcgtcctgggatggctacaatggccgtctgcctgccaagccttctcccattcagggaaagcagcttaagccacttaagcccattagcatctggatggggccggacctccttgggacacaggggtgggcagggtggccccgctgtgtggctgtttgggtgcttgttctaatcctcacgctgtttgaaggctccagactgatttgtgacacatgagtccaaaagccactttggggggcttgaccccatcagccggtctgtgctcggaatgtcaatggcctgccctggagtgtgctttggggatagcgggtggccgcctcctggcccaggctgagacactgcacaccagccaccaggaggtagacgctgcatcttggcaagaggcgggtcgggctgccgaagggctccagagttcctctcagttcctgctgagcgcatgcccggaacctgcacaggaaggccgggcaccggcccaggggtgtcctcctgagccctgtctccgagccccggccagcgcccggggcaccgaggtgctcctcagcagcaccagctcccaagggccctttcagggagaaatttttaaagccaaagttacttttggtgcagtcatcattttataaaacaaaaatcatatattattttcttaaaaaaacagatttataggccaggtgcagctgctcacacatgtaatcctagcactttgggaggctgaaatgggacaatcgcttgagcccagaggttcacggccaacctgggcaacatcatgagaccctgtctctacaaaaatttagaaaattagctgggcatggtggtgcattacctacagtcccagctactcgaggggctgaggtgggagaatcacttgagcccaggaggtcaaggttaaaacgagccttgatcacgccactgcgctctggcctggatgacagatcaagaccctatctgcaaaaaaattttttttattaaaaacaagctggattgaggtataatttacacacaagctataatccaattctagactctctctccatataatccagttctagactatccctccagcccccgccccagtcagttccctcccggcccccgcagtctccttgctgcctctgtctctccgacttcgccatgtctgggtattttgtgtaaatggaatctacagtctgtggccttttgtgtaaggcagcagctgtgccctcctccacccacaccagcgatgcagaaacgccggtgcctctgcccgccatgagcacgggccctcgctgtccacacagagctttgatttctctcagatgtgggtctcacacttcccttgttcggtgaggttctaggcattcttgttttcatgacttctgccaagctcggagagctcagtgcccacaaggcccctgtgtcggggccaggggctccccrtggccagtccacccaggtaggggtctccagctctcttacctttagggactgaccctcagtgaccattccctgcattgtactgaggttaagacgagaagaattttcaaaacaggcctcaatgtaatccttcgcggtgatctgtgccggctgtccgccagccaggaccgtgcctcctggagcagctcagccatgcagtgtgggagagagatcggcactcactcagcctccctctcctctgctgcccagatgactgccccttcccgtagctggtcaggccagtgagcatccacaggcaccagaggccgcaaccctgaccctgcagcactgctgccccagcccctctccttggtcytcctggtcggtgtgatcgctgggaccctggcgggagcctgagttgttcttgggtcctgtccacctgcctctgggcccctgcccaccccagcctgcgccccagggactggtttgagcctgttaacaccacaaagcaggcgtgtgacctcagccatccctcccacgtcagcttcacccagatgagcctgttgagacggttcccggtcaagccgcctgcagcccttgcccgttgtcacagtcgaacagctctcgagggagttcagggacgggagagagcgagcgggaggaggccggccatgtgcccccgcaggcaccctctttgctgttctcagtgctgctgtgccttccgagcctgctggtgtcgcactggcttttgccccaaagcagctctgtgggcggcagcagctccggggtgtcctcacggttgcagccacgctttgttggggagcagccagcctcaggcccttcgcacgtgtgagggtcggctgttgcgggagtggcccctgaccccaggtgcggaaatctgggtgtgacaccagctgctgtctggaaccagccatcctatcccactgactcggggtgtcgggtgacgctgccatgggcaggtgggcccccctgggacttatctccgttgctgtctttctgcagacgctctgcacaaaagccaccatgcagacggtccgggccgccgacaccaatgaagtggtgaagctcatatttcgtgagtcggacaacgaccggaaggtgagyggggcctgtgactgggcakgtgacgcayggggcctgcrcaggactctgcagcttccttcagagccgccctgcctgccyggttcggtgggggctaggggacacgcacaaggctgggggagctcaggtgctcatgggccactctgacttcacaggttatgctccagttagaaaagaaactcttcgactacttcaaccaggaggttttccgagacaacaacggcaccgcggtgagtttgtggtccartgtggcagctcccccgtcctgggacatccacgcccccaggccttcccattacctctgcttacctgggaccaccctgccttgtccctgccacctccaggactcagttctgagccagtgcaagtcagactgctggggacacatattgggtgcgtccggcaccccgggccaggttgggtggaggctccgtatcactgtcctgtccacgggcagcatgacactcgacccatcagcttcagagatccccccgtgtgcgaggggagacgctggtgctgtggggtggggaggaaagccccttgtctcagagtgaaccggccgggcctcgggcctcactctgaagtgggagactgaagggagcaggttcctcacactcctgtcgctagacttgctgtgtgtgggtctgtgtgtgagcacgtgtgtgtgctctagtgcatgcgtgtgcacatgtgcacgtgagtgcgtatctgcctctgtggggtgggtgtgccgctgtatgtccatgagcacrtgtgtaaacaagtgcgtgtcaatgggaatgtgcggctcaggtcggtccacggagaggtggcccctgccagtgagagacagccccggctgctggacctgctgttggttttgaaatcgtgagtcttcccttcaagggatcagtgtaggcgagcgctgaggggcggcctacacactctctttacaatttttattttttattrtggtctacttttgtcccatttttaatgtatttacaaatgtttatcagcgcaaagaaccaggaaycacgcagcagctggctgggccccatatgcggcctcggccgatttctgtaaacacgcccactgtggcgattccaagccacacgtgatgccgtgtgcaacgagccagcatccaagatctggaaacctcggcatcagttcctagggcgctcccgagccagctatggttcccttggcgctgcgtcagggcaggtggcccctgtcctcaggaagctgtctggggagtggccgggggagaggtgagggagcacaggcgggtagacccaggacactgcagccgcgttcacatcctagcatcctgggccagccaggtgtctgtgygtcagtttcccctcgtggggtttgggggcttatgggtgagtgcatgcaaagtgcttaggaagagctggggtctctcagtgccagacagaggggcacgcccagcccagcggaygctgccagccccgagtcccaggcccagaacctccactccaggatggcattcgctgcctccccarcggcccccagaccccacgctcctgtcttcttgggaagtcacttctgcctcctgcccctcatcaacccagagcccgaggctcccgtgacgcccacacctccgtggtgcctgggcctcctgtgcccgtccctgtcacctgctgcaggagcccatggtcctttcccccactggggtcgggtcaggccttggtgtcctgtccccacayggccccatcagcctgggcaagcctaaggtttcctccgcttctctccatccaggcaggctgggtttcctcctgcgccatgtgtgggaggcaccctcccctctccttctcaagcctccagggcctggtggggccgcctgtctgtggctcccgctgcccctctctggctctgcctgcgggactctgggctccaggatgcttccagctacaggacactcccgggtggcgcatcccggcctcgtcagtggggagcagggagagcctggggagcacagatgtctgggtggaggcaggtgcccaggaggtgtcttcgtggaggcaggtgcccaggaggtgtcttcrtggaggcgagtgcccaggaggtgtctgggtggaggcaggtgcccaggaggtgtctgggtgcaggcaggtgcccaggaggtgtcttcgtggaggcgagtgcccaggaggtgtctggatggaggcaggtgcccaggaggtgtctgggtggaggcaggtgcccaggaagtgccttcgtggaggcgggtgcccaggaggtctctggatggaggcgggtgcccaggaggtgtctgggtggaggcgggtgcccaggaggcgtctgcgtgaaagggggtgcacaggacgtgtctgggtagaggcgggtgcccaggaggcgtctgggtagaggcaggtgcccaggaagcgtctgcgtgaaggggggtgcccaggaggcgtctgggtggaggcgggtgcccaggaggtgtctgggtggaggcgggtgcccaggaggcgtctgggtggaggcggctgcccaggaggcgtctgggtggaggcaggtgcccaggagggagacagggctgccgtcgtttggaggaggtgctttcagggtccctagcagagctggctcctcagtgccaggggagcaaagtctccggggaccttgcacagggcatgaaaaagtggagggtcccttggaggaggatgccagggaagcccagggagatggaatgttttggaaggagctaggagacagggaagagggaggctccctcagccacaggtagggtggtggcaggggacagttcccagccggggctgcgtggagtggggtgcggcatggaggggcgtgtgatgtggagggggctgtggcgtggaggggggtgtggcatggagaggggtgcagagtggaaggggtgcagtgtggaggggcgtggcgtggaggaggtgtggcgtggaggggcgtggygaggaggtgtggcgtrgaggggagtggtgaggaggtgtggcrtggaggggtgtggcatggagtggggtgtggcatggagtggggtgtggcatggagggacacggggcgtggaggggcacggggcgtggagggggtgcggcatggagggggtgcggcgtggaggcggtgcggcatggaggggtgtgtctagagcatctgggagcaattgtctttcatgtggatccaaagtcctccttttctctcagcattttgacacagagcacgcccctgctgtcggtagccaccataccgtacagtgtttsctacctttagaggaaaattaatctgaatatttgagagaacttttggatttggttctgaatgaaaacacgctgtggggttgaagccacgtgaggcacccggtgtgattgcggaggcctggtgcactgtgtcgatacgtcgggagtcccatgtggaaaggcggcctgagctcaggaggcgccttctgaggctgtttctcatgagaagagccgatgcctcggcgttcctgtcctgctactcagatcctctctgtttggggcctgggacgacggcaccttcgggaacgccccatgggttcctgctgacccgggtgccctcgcacttgcccgaggtgccggcatgccgagtcagttgtgcccagaaattggcagttgtccccatcgacggagggtcaaggtggtcggacggggagcctggggagataatcccatctccacggtccggttaaacacacagcaccgcagccatggagagcaaactctccgtccgcaggatggatgtgcctgcgccggtcgcagccccaagtccattgcatccttcatcaaccgccggtcttgtacccgtctgacagaaatttaattcaggctggctcctgaaaataattattgtattttaagagtagtaatcattggccgggacatgattgaatgtgtccatgcctattgactttttctatgatttatagctttgtttagtcgatattcccatcgaaattgtataattaattataagtgtagctgtcagggctgcaggatggagtgccctggtgaggatttggagagattaaattttcctcggctgtcccagggccgggcttgggagtttccgcagcaccggcctcttggagggaggtgttttctgtgtgtttagcaaccgctgtagccccaggtgcattgattttctgggcctctttcctttatcagcgccagtgtctctgcaggagtggcgtgagcggcggccgggacagctcctgacagatgggcaggatcagccgctgccttgtcattgtccacacggccctgcctgccttcactttgtaatcaagaagaatgtgggagaccatgcgaaattggtgatcatgtttgtgaaaaatctcagagagatacaaattatcaattcaacagcaacgtgcgcagtttctaatcagaaacctctcctgtctggtattttgttccagccgcagcaggggccctcacccacatcattccgggggcaacagcccccatgccagccatgcagggtgaggctccctccgacttctcagaaccagtggctgagcagggacatgccaggaccctcccgccacacaggatccccccgccacctggccgccatggtccctgcgcagccttgcgtttgtatcatggtcgtgtgtacctctgcctgccctgtaggtgggaagacccgtggggtaaagaccgcgtgtttggagtgtctggcacagtgccgacgtgggagcagcacggtgagcccgtgtccaatgaggatggaggcaggcccaggccaggacacctctgtcaggagacagcctcacgagtgagcgatggggattcccagccggactgccctggggttttctctcaggcaccaggctcagggctggtcagtgtgtgggggcgagcacctatgggcctggggcatcacagtggacagaggacagcctggggccctcacccctccacccctggctccagtaccgtttaagcagcttgaaggttcaagttcacttcaaaccacacacgaatttccttttatttttactttgcactgccaaaactgggggccttctaactcagaagacagggtgggaaagtggccttggtccactgagcagtcctgaaacaccaccacccaggcaggatgccggccgaggaatcccattcagtccccatgggaaggagggggcccccagccaccgaaaaccttgggcagccccagcctgctccttcttcctggagttttccagcttccccacaacttgccttggggttgttcctattggagtgtgtgtcagcgtgtgtgcgtggatatgtktgtgagcaggcatatgcatgtgagcctgtaggagtatgcatgagtgtgcgtgcatatgcatgtgaatgggcaagtgtgtgtataagcaggcatgtgtgcggacgtgtgtgagcaggcatatgcatgtgagcctgtgtgagtatgcgtgtgtgtgatcgtatgcatgtgtgtgatcatatgcgtgtgtgtgatcatatgtgcatatgcatgtgagcaggcaagtgtgtgagctggcgtgtgagcaggtgtgtcagcatrtgtgagcaagcatatgcatatgagcgtgtgtgagcatgtgtgagagcaggcatatgcacatgarcgggtgtgtgcatgtgtgagcaggcgtgtacatgcatgagcaggtgtgagcaggtgtgtgcatgtgagccttcatgagcgtgtgtgtgagcgtgtatgcatatgcatttgagtgggcgagtgtgtgagctgtgtgagcgtgtgtgtgagcagacatgcatatgagtgggagtgtgcgtgagagcaggtgtgagcgagtgtgtgtgagcaggcatatgcatatgagtgggtgtgtgcatgagagcaggtgtgagcgagtgtgtgtgagcaggcatacgcatatgagtgggtgtgtgcatgagagcaggtgtgagcgagtgtgtgagcaggcatatgcatatgagtgggtgtgtgcatgagagcaggtgtgagcgagtgtgtgtgagcaggcatatgcatatgagtgagtgggtgtgtgtgtgtgtgtgagcaggcgtgtgcatgcatgagcgtgagcaggtgtgtgcatgtgagtgggtgtgtgtggggggtggtttgctttttagttagaaagtttaggcagaccctagcggcagccgctgaggcctgagggaggtcctggccacccaggagcaggtgctgaccccagaggaggctccaggggcctracacggctctgcaggtctctcttggagactgaggaagactggggagtgttcagtggtgacagtgaagccatcccctgcagtccagccatacacgtatccagacacaaacgtttggcacatgtacctggcacacacagccctcagacatatgtccaggcacacctgtgcacacaccaaacagtgtggagtcgcctctgcctgggccccagggaggcatccccagagctgctcatagggaccccrtcattgggtggtcagatttgcagctcagaagtaaagatggcaacacactcagaatccgcctggcctggaattcctcggcccggtcaggaattgaagagaaaagcaagtgtggggggggagtgtgtgtgtgtacacatatgtgtgtgcgtgtacatgtgtgcactttgtgtggtgtatgtatgcgtgtacatgtgtgcactcacgtgtgtggtgtgtacgcatgcgtgtgcatgtgcactagtgtgtgtggtgtatgtgtgtatgcatgtgtgcactcgtgtgtggtgtatgcatgtgtgtgtacacgtgtgcactcgtgtgtgtgtatgtgtgcgtgtacttgtatgcacytgtgtgygtgcgtgtgtgtatacagtcacgtcacataatgtcgtttcagtmaacagactacatatgtgactaaggtttgataatctgacgataggactgaaagcttcctctcgctgtgtgatgtaactgttgtgacatcacagcgtggcggcactggtgtgaaggagccgctgcgccgcctgctgtgggagagtctggcacactcagggatgcgcagcgtgtcgtacttcagagcaacaacaaacaactgtgttactggtgtctgcgtttcttctcccacacttcttaccattactgtaatgcactccttctacttaataaaaaaaggtacctgtaaacagcctcaggcaggtccttcaggcaggtccacggagaagaaggcgccgttatcacaggagatgaggctgcatgcgggtggttgcccctgagggcctttccgtgggacgcagaggcggcagagaggaacgtcgatgatcctgaccctgtgcgggcctaggctcatgtctgtgtcgttgtcttcattgttatcaaaaaatgttttaagattttgaaatattaaatataaagaataggcaaaaagtttatagaatatataaacaatattttatacagctatacaatgtgttttaagccaagtactatttgacaaaagagtgaaaaagttgaaaaatgttaaagtttrtaaagtaaaaaagttacaataagttaaggttaacttattacgagaaaatacatttcagtacattatgttactcttagcgtctcagcgttccgtatttataaagtctgacattctgttactctcagcgctgggcatttctaaagtctgcagtgcacagttgatcccaggccttcccgctcacccccgcccgctcaccagctcaccccgagcccgtcccagccctgccagctcccttcgcgagcggggctccgcagaggcgcacgctttttcttctttagaccttgtttttactgttccctctctacgtttaggtatgttcagatgcgcaggtacttacagtgtgttacgccacctgcggtggtcggtggcctgctgtgcgggtctgcagccctggagccacgggcctcccaccgtacagcccaggcgtggagcgtacacgcgctgtgatgtcccacagcgaaatcgcctaagggtgcgtttctcagaccgtatccccgtcgttccgtgacacgtgactgtgtgtgtgcagaacccttgccaaacagcctggaaggatgacttggtggctattgagggctggaccacagcggagcagagaggctggaaagccgagccccacagcccggcaccatggcgtgggtccccggccgaccccacaggccagtgcgatgtcgtgggtccctggctgaccccacaacacagtgccgtggtgtgggtccccggctgaccccacaggccagtgcgatgtcgtgggtccttggctgaccccacagcccagcaccatggcgtgggtgcccggccgaccccacaggccagtgcaatgttgtgggtctctggctgaccccacaacacagtgccgtggtgtgggtccctggctgaccccacaggccagtgtgatgtcgtgggtccttggctgaccccatagcccggcaccatggcgtgggtccccggccgaccccacagtccagtgcgatgttgtgggtccctggctgaccccacaacacagcgccgtggtgtgggtccttggctgaccccacaggccagtgcgatgtcgtgggtccttggctgaccccacagcccagcaccatggcgtgggtgcccggccgaccccacagcccagtgccatgacctgagtccccagctgaccccacacctatgggccagtgcaatgtcgttgggtccccagctgaccccataggccagtgcaatgttgtgggtccctggctgaccccacaacacagtgccgtggtgtgggtccttggctgaccccacaggccagtgcgatgtcgtgggtccttggctgaccccacagcccagcaccatggcgtgggtgcccggccgaccccacagcccagtgccatgacctgagtccccagctgaccctatgggccagtgcaatgtcgttgggtccccagctgaccccatgggccagtgcgatgatgtgggtccccagctgacccgacagcacagcaccatggaatgggtccccagctgaccccagctcggctgttttcctattgtcatggactgtcttatctatgggcaggtgctgaggaaggacccccagagctgctgaaaagccttagaccgtcctttgtctcctctcatgaggagcacaaggctgggagctgccatctgtggatgtggcccacgtggggtctcctgtggctgtgggactctcccacggtgtccggcggccctgtctcctgagcgtcgggtttcgtcagttggattcagacccgcgttcctcctgaaaaggatcggaaagctgggtttttaatttttctgccatcacgtttccctgtcaatgcaaatcattggttcagccaacagtgatattgaactctgtttacatttagggcgaggagttgcagagacttttctccccgaaggcggagttctgatttccagagcactgtgcatggtatgcttctgactgaggccctgagtgtgcagcaggtcagcgtggcccaggcctcagtgaggccatgcccgtccacacgctcagagcccccagggaccaacagtgtccttagggggacaggaagtccccaggcccctcagtgccagcttggatgcaccagggaagacccccggggtagtgaggggtcctcagaatcctgatctgggcaaaggtctctccacccacgagtgtacagaggagggtcggggatcttatcccctgaggcgcctcatgggctatgccagacagaagctgtggccacactccgtggcttctgcctcaggaacttgcaaagggtgcacaggcctggaatggttcagaaacacctcagcctgggatttccggcttccagaacctgcaccaacaggcgttaggggctgcctggggcttcgctcgctgctgtgctgtggtagccggaggggcccagcatcggaagttccagtaggtggggctccacgtcagggtgtgtccccaggcacccccattcctgctaacatcgaagctctcgggaagggaggtggtggggggctctcgggggtccggctacagtgaacagtctgtgttctatggcccggcgccctcctcaccctgcaggagccccggccgtaagcatcagtgaccccctcaccctgcaggagccccggccccatgcccacgccagcccatggaggtagccctggcgtcctcagagccccccggccctgttcagagtcccctgggcctgttctccctcttcttgttcacgtgccccttgatgcgcagtcccgtgctcactgtgcccggtgcattcaccaggctggggacactcactcagggctgcggcctcacgacttcggtgctcagccacgcagcaccgtgctcacagaccccacgccgtggaccctggcggccagaggcagggatgacccaccctgggcgatagccacaccgtgcaggaagcccggtgctctgctctctgaagctaaacgaattcatgtcggccaagagctccagctactcgttccctctgctcacatgcccagcctctctgcagcacctgctgcttctaggaggtggagcagccccagcagccccaggccctcaaaggcctacgtggtaaggcacagcccgggcctggctgcagcccagacaggcacagggccagcaccgaggactgggggtgctgaggacttgaggggtgctggtggttgctggaggcagagccagggtcgaacgctgtgccgcacgcctgcgaggggcgatggtccttctgggctccagagctccctgagtgctccatgagagctgtgggcccgctgtgagcagagccctcattgcaagaggccatctgtgcccctgcactttggtgctgtccaggactgcgtcccccacagctgtgaaagctctggggtcactgcagaaggttggaggaatgctgatccgggacaacttcattaaggacgtggcatcggagggccccacacagcagagctgtcattctggctcacctgagcgggagctttgctgaggactctcctttcctctgtgcccatctctggtacggggtgactgtggcgcagcgtgtgcttcctcatgacgcccgggcccctctctcccatggcccaggtcaaggcaggaggacgctcggtttcccatctgcacagctgggcctgtccttcctgggcggtcctttgtccactgtcttcctgaggggagtttgaggagaagccccaggtctaactctgtggcagacaggcccaccgccctgcatctcgggacacagcaggcagtgtttccactgtaaacgcggggagagggacccactttcagagaaagaatttggcatctggtgagagcatctcgtttccagggggaatttcagaaagagtttgcatccgcataatataaatacacacttggcaaaagcaaaacacaaagccaggctctttggattcttagactaaaaatgtgctgggaccgccaggcttcrtgccacgtctggttcgacctcgactccctggtgtgctctgcagaggtcatggcgtcttcgggtgccacatgcccgtctctgggtggcacgggcccctgagacttctatgaacttgcatctccagcttttcaagttttactggagtgtcattgaggcagtaacttgatgtgagaaagaaagcaaatgcctagattgtctggagaccacacgctgggaacaggaaaggcactgcagtgcactgtgggggcatgtgttcatttgacagcactctgggtgcctgctctgagccaggccctgctctgggttaacaagacagacagacacatccctgccatggagctctgggggtggcaggggacagcatggtggggaggagcctgggaatagtgtgctcagcaggtgagcagcacctgtgggggaggagcctgggggtgccacgaggaagcttgctgaggatggcatggctggtgggggacagcacggtggggcggagcctgggggtgccatgcggaggcttgctgagaagagccataaacagtcaccctgggtgactccaagctgtgggaggccagtgcggtgcagggacccagtcggtcactttggagggcaggtccacattcattgtcacaactaaaaaaattcccaaaaatcaagacccaccaaagacgatcttacagttgcaaactgtgaaccacgtaaggacacattccacagatagcaagagtccagaaatacaacaaaggcaggacagaccgtcaataatgccaaatcatcgaataattgatacaaattataatattgtaaattattaaaagcatgacagaattagaaacataagtaccacactatgaaaaaaatcccaacagataaaaaaaagtaggactcatagaagtattatcattaaaattaaaagctccagggatgaattaagtgccggagtagacacagctggagaagggattgaggaatgggatggcaggcctggggaatggcccagaatgcagcacagaaacgtggcaggatgggacaggagggtcggggctgggagaggagggaagagcccagcgcttgcgcagtgagggtccacgaggggcacactggagagtcaatggctgggcgttttccagaattatccaagacataaacctcaggaagcatggtgagtcctgagcaggaggaatggaagtaaatccacacacagacatgtcagagtgaaacagcggaacatcaaagaygaagagaatatttttgaagcattgtgggaaaaatgtcctattacataagaatgcaagtggcggcgggtttccagaacaaccacaaaaatacacaccaggagaagtggaggcgttcagtcaaagagctggtggaaaaccccacccacacacttagagttctctcagcagccaagtcagccttcagaacactggccaccataaagacagtacctggcgatggagagacacagccccaccagcaggtcccacagagaaccaggagtagctgagcttctggagcagggtgggatgaagaaggaagaagaacatttgtgtaaagcttaaaaacatgtaggctgaggcgagctgctttttgtggactcatgcatggcggtaatatagaaacatacttggggctgggcacggtagaacacttggggaggccgaggcaggaggattgcttgaggccagtagtctcagacaagccagggcaatgtggcaagaccccgtctctacaaaaaataaagacttagcaggagtggtggcacacgcctgtaattccatctgctcgggaggctgaggcaggagaatcacttgagcscaggaggcagaggttgcagtgagccgagatcacatcactgcactccagcctgggtgacagagggagactctgtttcaataaataaataaataacttaaaaaccatacttgggattcttgaaaggtctgagttacaytgggaggaatgagagggtttggtggtgcaggggagatctgatcccctcctgccagtgccttcctgaaatctcgaaacatgttgtatcatagagattcagggaacctgccatcagcattttggtgaaagccacaggatggcagtggctcctttctgastctcagcagatctcatagatgctcctgggcaggccttagggaaatctgggctcctagtctcatagctggtgcctgcagagccaagaaccgcatggcacctagcgctggcagcctccctgctgcctcctcacctccacacctgagaagccagcagggcccacgctggactggggacsctgctgcatctctgatgtggggaagcctcaaactcaagctccagaatgacctagagatgatgcgtgtttataggcctgtgtgtgaatgtatctgagtaaatgcctgcatgcaaagacacacatgcctgcatacacataaacacgtgcctgcatgcacacacacataaacatgtgcctgcatgcaaacacacacatgcctgtgcacacataaacatgcctgcatgcaaacacacacatgcctgtgcacacataaacatgcctgcatgcacacacacatgcctgtgcacacataaacacgtgcctgcatgcaaacacacacatgcctgtgtatgcataaacatgtgcctgcatgcacacacatgcctgcatacaaacacacatgccgttgcacacataaacacatgcctgcatgcaaacacacatgcctgtacacgcataaacacatctgcatgcaaacacacacatgcctgtgcatgcataaacgtgcctgcatgcaaacacatgcctgtgtacacataaacacgcatgtgcagaattgctccagagcccatgcccctactctgcctttgaggaggggcatccgtctcccgaggcctccgctgcatccccaccccatttaggagctgacttggggcccttcccagaggctgtgggtgctggagggagggagttgctccctggaaggggaactggagctgtaccctcttaggaggcaggaggcagtggggctgtgaacgcctgtgctccaggcaggaggcctgggccggtggctcaggtagcagcctggcacagggtaatgactgtgtgcatgaggctgctgattgcccatttcagggataatggacgaggtcacaggaagagctgggatatggtgtggttttgagggagctctagctcaatgccatgccctgcacagctgtggggccatgactaatgaatagcaccagagagggtgtgcatggtgaccgcacaggaacatggccgggccagtcctgcagggttgagagggtgtgtgtggtgacactcaggaacacggtcgggtcagtcctgctgcggtgggagggtgtgcgtggtgacactcagaaacacggtcgggtcagtcctgcaggggtgggagggtgtgtgtggtgacactcaggaacacggtcgggccagtcctgcaggggtgggagggtgtgcatggtgacaggaacacggccgggccagtcctgcaggggtgggagggtgtgcgtggttacactcaggaacacgggccagtcctgcaggggtgggagggtgtgcgtggtgacactcagaaacacggccgggtcagtcctgctgtggtgggagggtgtgtgtggtgacactcaggaacacggtcgggccagtcctgctgcggtgggagggtgtgcgtggtgacactcagaaacacggtcgggccagtcctgcagggttgagagggtgtgtgtggtgacactcagaaacacggccgggtcagtcctgctgtggtgggagggtgtgcgtggtgacactcaggaacacggtcgggccagtcctgcaggggtgggagggtgtgcgtggtgacactcaggaacacggtcgggtcagtcctgctgcggtgggagggtgtgcgtggtgacwctcaggaacacggccgggccagtcctgcaggggtgggagggtgtgcgtggtgacactcagaaacacgaccgggtcagtcctgctgcggtgggagggtgtgcgtggtgacactcaggaacatggtcgggccagtcctgcaggggtgggagggtgtgtgtggtgaccgctcagaaacacggtgggccagtcctgcaggtgtgggaggtgatgcccgcctggggcttgttttggaagagtctcagggggcaaggccatttgctgcctcccgtgcatgtgagaatgaacattttgcccccgaactgctgccagaatctcaccagtgtgcaccttggggccattttccctgacctgttctcacaaagctgacattgctcactctgcaggttacttgacactctgggcaggacaggagctgtgttccctctgctgggggagccagcactagggaggagaggccgagaggggctgctactggggctgccacggcagtgcccgaggccatgagtgcttctctggcgtcmccaacagagaaagctttmtgggtgggcagagcacatctataacgggcagggcaggtcccactgtctgcagcagaggcaggcgaacaccagagcctgctggcaccacagagctttctggtgacagatgtggcggctctgggaagagcagatgtcacaccgagcatttgagcgtcccagctgcacacagacacacgtgcccccagcgaggaaaaccaatgtgactttattttctgctctttcttttctttagctcttggagtttgacaaggagttgtctgtctttaaggacagactgtaygaactggacatctcgttccctcccaggtatggaacatgctgtttgctggatgaacccggccgggaaggtggcgtctccaccctcccagtctctggtgcatctgcgtgtctgtgtgtgccagtttgtgctgggcatgagtgtgtgcattctgtgtgcatccagagtgtgtgtaccatacctgtgtgtacacgtgtgtgttgtgcatctgtgtgcacaggtgcgtctgtgtgtgaacgtatgcgtctgtgtgtgtgcacatgtgcacgagtgtgtgtgcacgagtgcatctgtgtgtgcacctgtgcatctgtgtgtgcamgtgtgcatctgtgtgtgcacgtgtgtgttcttgtgtgcatagtgtttttgtgtgtgcacatgtatctgtgtgtcctgcacttgtgtgcaaactgcaccttctcctgcccttttcatgacatgaaaaaagcagctgagagtaataagtaattctgttatctttttccaaaaaaggttttttccaatatgcaaaatactttcttatcagacttgctcacgagggacctacggggactgtgtgttatggatctttctggcaatatcggggcctccaaatgcagtgtgtctatgtgggtgtggatgtgtttaaggcatgcgtgtgtgtgcctgggtttgaatgtgcagatgttgcgtgggtgtccgtgtgtgtgcagacctggtgcagatgtgcgtggggcgtgcgtcacacagttgtggatgtgtgtgcataaggtgtgctcgcgtacatggttgcatatgtgagcatgagtgagagcatgagtgagaacatgtgtgacgtgtgtagggctcatgcatgtggctgtgctccacggatgtgtgtgcacatgtgtgtgtgttcacgcgtggagatgtgtgcctgggtgtggatgtttgtgtgcatttttatgcagatttgccagcacagagcagttctcactgttggaagccgcaggggacttccactggcagatgtggactttgcctgtcagctgggagcaagattgggagcyggaggtgcggcctcagggagcctgggtgggagctggaggatgcggcctcagggagcttgggtgggcttgggtgggagccggaggtgcggcctcagggagcttgggtgggagttggaggatgtggcctcggagcttgggtgggagctggaggatgcggcctcggagcttgggtgggagctggaggatgcggccttggagcttgggtgggagacagaggatgcggcctcagggagcttgggtgggagctggaggatgcggcctcggagcttgggtgggagctggaggatgcggcctcagggagcttgggtgggagccggaggatgyggcttcagggagcttgggtgggagctggaggatgcggcctcggagcttgggtgggagctggaggatgcggcctcagggagcttgggtgggagmcrgaggatgcggcttcagggagcttgggtgggagctggaggatgcggcctcggagcttgggtgggagctggaggatgyggcctcaggagcttggggacacaggctttcctgaagccagaggcagtgctgaggtctgagccttgaaagtgacggagcactttggtgtccaggggaagtttttggacaggttggaggagcctccagaaggcagtggtggcccaggcctctcgtcctcctcacgagcttcttcctgttctgcaaagacaccgaggctccctgccaggcatgccagccttatcctgtgggaggtgcaggaagcctcaggggatctcgggctcacacccctcttcctggagggctcccccatcccgcttggatctgaagtctgactgctagacacacgggcccccagagagcccctcgcgcccagtggcattccagaaagatccatggaccccgaccctcagcgttcccagggtgcccatgcgcccagtggcattccagaaagatccgtggaccccgaccctctgcattcccagggtgcccacgcgcccagtggcattccagaaagatctgtggaccccgaccctcaacgttcccagggtgcccacgctggcccagtggcattccagaaagatccgtggaccccaaccctcagcattcccagggtgcccacgcacccaatggcattccagaaagatccatggaccccaaccctcggcattcccagggtgcccacgcgcccagtggcattccagaaagatccatggatccctgaccctcagtgttcccagggtgcccacgtgcccagtggcattycagaaagatccgtggaccctgaccctcagcgttcccagggtgcccacgcacccaatggcattccagaaagatccatggaccccraccctcggcattcccagggtgcccacgtgcccattggcattccagaaagatccatggatccctgaccctcagcgttcccagggtgcccatgtgcccagtggcattccagaaagatctgtggaccccgaccctcagcgttcccagggtgcccacgcgcccagtggcattccagaaagatccgtggaccccgaccctcagcgttcccagggtgcccacgcgcccagttgcattccagaaagatccatggaccccgaccctcagcgttcccaggtgctcacgcgcccagtggcattccagaaagatccatggaccccgaccctcagtgttcccaggtgctcacacaggcctggcttcctcttcggcatttggctgggtgagatcagcttccgctttcccgctgcgtctgccctggcggggggtcccgagtgcctctgcgtgccaggctcgtccacctgccgcctcacactcttccccgtgcagctctgcccctgtcaggacacgttggccttcctgtgctttcctgaaggctgccagggctctgaggccgtgggaaggcgtccttgccacggcctggcccctgaggcctgtgtctgacccagctcctcagaagctgggagccgagccgccatctgtacctgctggtctggcagcgtctccttcctgcggtgactcccggttttcagaatcgtttcatggtttttgctgttgttgtttgagtgaacgcattgcaaaccggccgagcagccaagtacatcttcccatcactgccacagtccccgccctggttttgggcagaggtgagctcaccaccttggagtggttcaaggcaccttatcagcattggtgggcaggaccctcccgcgggcagtagaccctccatggggagagcccgcacctgctgaccctgagaggagacrgcattcctagcgcagagctccggatacagccgcacccggggcgttggtgcgtacactggcagagtgacgccaggaaatgtgtcattggcggatggttctgaagaccagcggggtcttctcctgcaaaggtgtttgccactgatcccatggatgaatagaactctgctctgaatgaattgtaactgaatgctgtctgtcattttgccagaaaaggtgctaatatttcagacatttatacaaccctcaatttttgtccttaactaaaagcacggttcttcctagcgccttctttagggacagccacaaaagtgacctgtttgaggcggtcaggagcaggagagtgagcaggcgggaaggaggctggccagaccttgggctgcctctgcctctgcataaggaactctcccgggcgggaccctgagctgtaagatggtgccttcrggccaggacagcacccaggatacagcctcccgaaggcctttcatgccatgtgctatttccatcgggtgtgacgtgttaaagctctacacgtgtgcttagagttactgggggatgagggacccatggtggcagggatgagtcttgcccactctggtctctggaaaccaggcggctatgagtggatgcggggtcaggtggcgtcagcccttagtggtgagcagaggcggcgatgggctttcttcacccagcattggtctgcccggctccccagacgccaaggccctcagggcaggattgtggtgtgcgcctcaacagcagccctgcagcccccaccccgtagctccccccacsccgaagttcctgatacgtgtggctcccggtacagcccaggctcaggtggcggcgatttggacaccccagtggtagcatggagctgctgcctttttgcgcatcctagctagaagtgaatttctaatttttagtttaactttgagaattaaccgccattaactctaagataaagagatttaagatggctcctcggtggccgctccactggtgtgacagcccgacatttctaggcgttagcatttctcacgaaaccccatgtagaacagggctggcgagggcggcgcctctggaaccagagtcccacctctgccctgacactgcagagttgggcacattgctcacccctcgtggcctcagcgtscccctcaggatgctatcgtctcctctgggcaggctgagccttcaggcccaggcctgcccgacggtacccacccccaggtcagcctctccgcagccagagagccgaacgctcccaagtcaccgcagtgtcgccggccatcgggtggctcctgttgcagcttccggaatgtggggggcactgcgtttcctcgcggaggccgtggtgctgtgcatagtcagccggggtttggctctccctctttgtctgtgtggacgctgagcgtatggaggatgggaaytgtcacgtccattgcctgggggctccctgtgtctgtggactccttacatagtgaagagactgcatcattcatttattaagaagaaagccacatgccaccatcgaaatggccccgcagagcctcgctggccgccccggtggcctggccacttccctcttccagctactgaggaccctggagcttttgtctatgtgggttccatctgttggtcatggccatcagtttttaaatatttattagtccgttttaaaaataacacaattacatgtttacataagtaagtaacatttttgtgaaaaaagtacccatgcacggggaggtctccttccgccagggcgtgatctgggagccgcacacacaggtcccgggaaatcccagccacccagggtgtgggagtctcgacgcggcacgtctggcacccagtgcgagcagcaccttcctcagaatatggcasagctcaagggaggggtctctgtggtggggacgccgccagcctctgggaggaatacgttttccaacaccctcgggtctccttgaaagcttaaattttgtcattggcaacaaatagcatccgctgctgctggaagaggcaggctcgtccgcccttctggagaaaatgcctgttagccacygaggtctaagttaccacagtctgtctgtcaatctttctggcaaaatatggtgtccgtgaaaacgagcagctgctttagctgacgactcagatgcaggcacgctcccctgagagatgagggccatgtcatccctctgggcagaggactccctggaggcctcatctcatcccacccagcccaagaccccatctcccaggcctggggttcaacacaaggaatcatttctcctgcttccctcgtaagtgaaggtagctttttgtttagtgctgagggattgaccctgggagagaccctgcccagcacggcccggcctctgcctggttcccacgccggcgccggcagttttaccaccttgggcagcttttgccacatccgtgcaatgccagctccatgaaatcagtgaatatcaccttagtgtgctcgtcaatgtagatctcccctctcagactgccgcaggggtcccagggacccacagggggccacacgccaactccagaactgcccaaaacttggaagtatccccagtgcccatgaagagtgggacggacactcagcactgacacggaggccccggcagccgccccgcgaagagtgggacagacactcagcactgacacagaggccacrgcagccacccgatgaagagtgggacggacactcagcactgacacrgaggccacggcagccrccccgtgaagagtggggcactcagcactgacacggaggccacggcagccacccgatgaagagtgggacggacactcagcactgacacagaggccccggcagccgccccatgaagagtgggacggacactcagcactgacacagaggccccggcagccgccccacgaggagtgggacagacactcagcactgacacggaggccacggcagccaccccacgaagagtgggacggacactcagcactgacacagaggccacagcagccacccgatgaagagtgggacggacactcagcactgacacagaggccccggcagccaccccacgaggagtgggacagacactcagcactgacacagaggccacggcagccgccccacgaagagtgggacggacactcagcactgacacggaggccacggcagccgccccgtgaagagtgggacggacactcagcactgacacggaggccccggcagccgccccgtgaagagtgggacggacactcagcactgacacggaggccccggcagccgccccacgaggagtgggacagacactcagcactgacacagaggccacagcagccaccccatgaagagtgggacggacactcagcactgacacggaggccacggcagccaccccacgaggagtgggacagacactcagcactgacacagaggccacggcagccaccccatgaagagtgggacagacactcagcactgacacagaggccacggcagccaccccatgaagagtgggacggacactcagcactgacacagaggccacggcagccaccccacgaagagtgggacggacactcagcactgacacagaggccacggcagccaccccacgaagagtgggacggacactcagcactgacacagaggccacggcagccgccccacgaagagtgggacggacactcagcactgacacggaggccacggcagccgccccacgaagagtgggacggacactcagcactgacacggaggccacggcagccgccccacgaagagtgggacggacactcagcactgacacggaggccacggcagccrccccacgaagagtgggacggacactcagcactgacacggaggccacggcagccgccccacgaagagtgggacggacactcagcactgacacggaggccacggcagccacctgcagcgagccgccgctgcgcacagctccacaagtgagtttaaagccgggttgcacaggtggagaggacgccctgggactccacagggtgctgttactgnnnnnnnnnnnnnnnnnnnngcctctgcctggttcccacgccggcgccggcagttttaccaccttgggcagcttttgccacatccgtgcaatgccagctccatgaaatcagtgaatatcaccttagtgtgctcgtcaatgtagatctcccctctcagactgccgcaggggtcccagggacccacagggggccacacgccaactccagaactgcccaaaacttggaagtatccccagtgcccatgaagagtgggacggacactcagcactgacacggaggccccggcagccgccccgtgaagagtgggacagacactcagcactgacacagaggccacagcagccacccgatgaagagtgggacrgacactcagcactgacacagaggccacagcagccacccgatgaagagtgggacggacactcagcactgacacggaggccacggcagccgccccgtgaagagtgggacagacactcagcactgacacagaggccacagcagccacccgatgaagagtgggacggacactcagcactgacacagaggccacggcagccgccccgtgaagagtggggcactcagcactgacacggaggccacggcagccaccccacgaggagtgggacagacactcagcactgacacagaggccacggcagccaccccatgaagagtgggacggacactcagcactgacacagaggccacagcagccacccgatgaagagtgggacggacactcagcactgacacagaggccccggcagccgccccatgaagagtgggacggacactcagcactgacacggaggccacggcagccrccccatgaagagtgggacggacactcagcactgacacggaggccccggcagccgccccacgaagagtgggacggacactcagcactgacacggaggccacggcagccgccccacgaagagtgggacggacactcagcactgacacggaggccacggcagccgccccrygaagagtgggacggacactcagcactgacacggaggccacggcagccacctgcagcgagccgccgctgcgcacagctccacaagtgagtttaaagccgggttgcacaggtrgagaggacgccctgggactccacagggtgctgttactgcaggcggggaatcacctcccaccgccctccccggtggaggcctctgggctgtgggccggcgcagggtgcggtgggctggtgaacacccatgtcccgtgtgcactcagccttgtgtgtgcctcactgtgaagtgaaatttactaaaataaatggaaaagtttagaagttctattgctacccgtcaaaacgtttcaaagtttttatcatacgcagagcaggtccagtgggaaaaaatcactccttcccaaagaaagactgactctcagaggtgggagagggatgttttcattgaacaattactgagcaagatcgagttttagcttctgaaaaacacaaaaatatacgcaacacaggaatgaactgcgcagacaagtccaaccagaggtcgtctctctttaatggacacatatatttttaaattagggattaggaggcccctttcaaactttccgtgggccataatttatgttctcctgtctttagatgtgtatttatagtgtaataattatctagcaaaatgaactctactgcctgcgagctgggtgctcaggagggagcgaggccgcccgtccgcctggtggtcaggaaccctgggtgcctgtggctcatacagactgtgggacctgtgccgagggggaggacagtgagggaacccgtcccacagaagaggcctgccaagggttctggtcacccggagagcttttgtccctsgagatacgggcgaggggagcacccaggacagcctcctgctctgttgcccgggctggagtgcagtggtgatctygcctcactgcagccccatcttctgggctcaagcgattttcccccctcagcctcccaagtagctgggactacaggtgtgcaccaccacacctggctaacttttttattttgtatagagacaggggtcttactatgttgtccaggctggtcttaaactcctgggctcaagtgatcctcccgcctcagcttctcaaaatgctgggatgacaggcgtgagcccccatgcccagccccccagaccctcttggaagtctgtgccgcttccttctcccgctcggtagcttcagcattgccacagctgtaatcrtttagttctttctctttggttttagggccttctccttttcaggaattccagtggcagctggtgtgtttggaagcgggtgtctgaagccagcattgccrgtggtgcctgcaggctgcacgggaaggcagagctttgatgaggtcctgcttgtgacgggggtgtgtcagaaccgttttctctgtagtgtgctgcaccctcctgctccgtgtacacaagagcggcgtggtaattggttaatattttaaccaggcgggagtcagaggaggggctttcaccctgacgcccacctggagaagtgaggctgcgctcctgccgcttcctctgagcacagctcggggagttggcgtgaactgtcgccgttcacttgtggttcagggcggctgagcactgtggcgaagccgtgggcccccacccagcctgccttctggggtcctcccaggcccgttggtctctcctgtgccgtcagccctgccccaagacctcgacatagccgggcttttaagcttgttgtctgcttctcgggcccgtggcgaccctacctacccagcccagcctgctcaggttctaaagctgggccttgtcagcagggccagtcagcctggccacagcaaacaatctgccgtgcagcctacacaggggctgctgcccgcatcctacagggaggagagaggggcagggaggagagaggggcacggaggagagaggggtagggagagacgggcagggaggaggggcagggaggagaggcagggaggaggggcagggaggagagaggggcacggaggagagaggggtagggagagacgggcagggaggaggggcagggaggagagagggacagggaggaggggcagggaggagagaggggcagagaggaggggcagggaggaggggcagggaggagggggggcagggaggagggattcacgtgaggaggagtagatggcagggaggaggggcaggggaggagagagggcaaggaggaggggcagggaggaggggcagggaggagagggggcagggggaggggcagggggaggggcagtgcctgcagaggctagcacaggagtacgattgttcgccctatcacagccgctcccacgctgtaggcgcaggtgcgcccctgtcctgtgtgcctccccccccacccagcaggtatgctttcagataagcccacatgcctggcactcccacgtcagtcactgctgggcagcgtccaggccccgcgtcctgctgctctgcagcgtggccccgccagcacctcccacctgtgggtacagcggttgtgtgcagtccacactggccttccccagacccagctggaaccagcccctcctgcatttctccctgggtgttgggggccacagggagcacccctggctgtggattaagggtgktgcccccaacagcctggccaggacacctctctcacccaggcttcttcctcctgttgagtcgtctgtgaacactcccagggaagcccttcctggagcagatgggctgaggaagccgctgccactctggcatccctgttctctcttgctcatccccagagcccagtctgtctgagcagcaatgcccatcagaccctgtcccatggacagagggcggctgtgcttcctgccacgccctggcttctctccgtgcccccaggggacgccaggtggcacgggctctccaagctccatggggtgcatgaggagggagaactggttcggttccagcttcctatttagaagtcacctattgtgtgctgtgtgcatgtgtgtccggggggcagtggacgtgtgtgcggatgcaatggacatgtgtccaggggcagtggacgtgtgtcaggggctgggcaggcccctgcctgcatccagtttccactcgtgtccgcggttgggatcagctgagaagctcctgaacaaagtggcccagcctctcaaacgtgtgaaatggggcaggccaccaggttgctggctctcctgaaagcatgtgcagctgttctctgctctgtgctcttcagagacatgcatgacacgcaggccctgcgtagctacgtttttaaccaagcagtgactgcccaaggccgggtggcagccgtggctcctgtgagtgtggctcccgctggagcgcgcggaggatgggagctcctgcgtcagggcagagcaagttcccagtccccggctgtttccaggtggttgggcacagggcccacaggcgcccctgtgggcagggtccggggggcatgggaggggctgcagaatccgcagctgaggtgccgggatggacccgaaacccaatcacagccaacagggaaatttcacagagaatcagatcccagtcgcgacaggtgctgtatgatattttggaattaactgaaaaaactcttgagactctggtgaaggccccagagatgttgagagtaagcagagacgctgcacttaggggcaggtggctgagctcagccacaggacccccggggttcgttcactccaagtggaattcgttaccacttcagtgcagtcccaagcaacatgcccatttgggggtgggtttgcagcctgatgggtgggtcgggccccctgagaacctgcaggcccggaagtgggggctgtgcttgcgtgttccagactcggcgggtagtgggggccatggccatgaggctccaggctggtgggggagtgatcagtccgtgtgtgcgtggactgctctgctgtgtgagggcgggggccaatggctcagagacacagcaaggccgcggaggagcccagatgagctgtgccctggccggcggtgggtggtggagacgcaaccagcagaccccaggcagtgtgggatgcgctcactgtgtgggtgaagggctccgccctcagggctactggcaccgccatgtggccagccccattcccagacccgcagagggcrtgggcaggcccaggaagcagtgagtcggggacagtcaccctccactgcagcagtgacccggggccacagcctgagcacctggatgctccccgaggtgggagcggygttggtcaaagcggagaccacgtgtgccacaccccagagctgcctgcacttacaggcgtttcgagctgatccgggccaggtcaccaggtggaggaacgtcctgggaccagatgacactggctgccattttgtttccatggaggttttcatcatactttagaccatgttcaaaaaaccaacaaaaaccaaagctcaacagacaatttcatgcagtaaaggaaggactgatgtgaagatactgtgctatagctaaaatttagtctcacataaaaacagtttgatatagaacttaaattgtgaatttggttttatattctagaaacttccatgtgtgtattcattccccaggtagtgctggccattctaaggtgtattgggagagaatyggcacagccgtccctttggggctgaggacggcccgagccggccggctgaccctctgccttcatgtctccccagctacccgtacagtgaggacgcccgccagggtgagcagtacatgaacacccggtgcccagcctggtgtgaccgcatcctcatgtccccgtctgccaaggagctggtgctgcgggtgagtgtgtgctgccccagccctgggcacagagggatgtggagcgctgggtctggtctggcccagccctggtgacagggccccaggggtgggggcacccagyctggggaatgctgccaggttgggccctgacctcgtgctgccatgagctgcaccccagcattgggtcacctctgagccagcacctgggctggggcagcagcagatggagccgagttcctgggccatgggcagccagcgtcatcctgagtttgaaacataacacaggcggttagcaggaagtgttttcaaatcgtggttcattgtatccttggaagtcaacgtgctcttgtgcgttccagcgctcatgggctgggccgtgaagcgcagtagaaatgtctgaggttgttttcctaagttgtaaattagagccagattcatttgagcctcgataagttaaaaataaataggcgacattttcagatggcctgggccttgggaaattttcagatttcctgtgattttttttttttaataataattttttttttttttttttttttttttttttacaaaagaggtgataggggcttgcttgctacattggccaggctggtctcaaattcctgggctccagcattccacccacctcggcctcccaaagtacccagactacaggcaggagccactgcacccggtcaatcctgtgatttttcaattcccacattttaacatacaaggagtgttttcagaagaatcaatatctgaattggttttgtcaaccccgtgaatgaaaattaaatgcagatagtaatgaaagcttgcgggtgtgcgtgggaactgcagctgtgcccaacacccagagccggggcctctgaacataacgtgggtgtgcaatcggaaggaggctggagactctggtggttccactgccagcctggtgggctctgccccctctccactgtcccaggcccagagcagggacaggagccccctactaaccccgacttcaacaccagctgtgtgaggctccagttgtccctcactgcccatctgtgtctgtgccagacggcaccagaccccaggcacagcaaacacctgggtrcaggtgtgccctcagcagggcggggacctctgcagccctggtccctgagatgcaccctgctggcctctgccatgtggctctgtctgccgggccgggttccttactgttccttcctacatcctggagcaccctgggtgcagcctgccctccgtccctggctgtgctgtgaggagcctgcctggtgggggcctgggctggaggcggggccccttggccagaagtccctggggtctgcagccagcctggctcctccgcagccccacctctggcctgtgggcagggcctgtgcccatcattgaggaaagtgtgctggccacaagcccaaaagcccaggagtgggctcggcctggagcctggctgtggacctgccactgcccctctggctgggctcactggtaggcacgccagtccctcggtgccacatggtgggtgctcccatctgccagtgctgagagcgggtcaggcatgtggagcccagggctgccaccagcggggcaggagcctcccggggactcgggcacagatgccatcccctgggaaaacgtcggaggtcacgcgagtgcagattggtgagcagcgcccaagggcagaaggctggcagggctgtggcctccccacattgtgctgccgctgccagggctccaccagctcagagcagggcagcgttgcagcccgttttccattcactcacagcctctcgggttctctggatccgggacttgacactttatgctcagggtgggggacagagcctcacaacacacacctggcggcctttgacagcccctgccttctggggctggagtttggacaggctctccccatggggccacccagtgggcagcgggtgtgcaggacaagcagacgggcgccgggcgcgctccgcagcctcatccatcatgacacgcgccgtcacctcgtcaccaagctccgttctgcctccggagccctaaaacaccaaaaggggctcgggacgcgggcggtgctgcttggggagcctcggtgacaagtgttcagtgaggtgtgccgcacgctgcctgtgcccgccgtaatttgtttatctgtccaaagattatgcagttgaaaatccacaattttatgctgcctttgtaaattaccacgctgcgtttgatgaatgtttctccacttctgcggaggcgccgcttcacccgcgagaggcgggaaggtgctcatgcatgcggtgccgaagcttgttttctcattctttctggcaggcgcccatgctggaaagtaaatctgaccttgagcttcccactgcattaaagataactcagttttacctggatagtctcagatgctccagctgtggatataaaattccagcccaaccagagccgagtgctgaccagcagcaaaccccttccggaggcgcccggaatacaggcacctgctgggaagtgcgcacacagccgtgaattactgtgcacagattgctttgtgtagtggtgtggaattcggtgtctgttctcgtttgaacactgagttctaggttaatagaacagtcaaaaacaaatcaaagtgggaagattggaactagatgggctgccgcactcagaggagcacacctgcacagaaagctggggcgcacacactcctgtgaacagggtcccctgcaactcccctgagagcccaggagcatgtccgggagaggggagcttgggagccgggccagcacccgcggctccccacgcgacccctcctagaggcagatacctgttgtccaaaagggccagggtcaaggtgctgaggcgctgccacatcaccagagcctttggtccatgagctggcctctctctcaggggccaggcagggcgggtggcagaggctggggaggtactggcaggggccgacatccccatctctctgcccccacaaaaccctgatgttcctgccagtcagctcccaactggacccagggtgccccrcctccccacactcacctgtctgtttcccctttccagtcggagagcgaggagaaggttgtcacctatgaccacattgggcccaacgtctgcatgggagaccacaaggtgacatagactgaggtccaggggccaggctgggggaccaaggggaagctagggggccggggggctggggccagtgggtgggcgggtgctggggctggcaggcaggtgggcgggggttggccagtctctcctctcctgttctcctgtcttcttagtctgactacagagtaggccaagttggtctgtttttatttaattttaataaaatatcataagctaggtgggtaagtaggaagaaggcagaaatgacgttacaatagaataaaatacataatttaatatttgtaaaaaaatgtccacagctgattgtttctgaaggctgttttgcaaatatgcagcttcagtgttttaatggccttcttggggcaggctcactgtcagccgaggagccggggtgagggcgctccccaccgtgtgccaaggggcagcactggcacagatcgtttattcaggcaactgcacctcgagagtgtgcacaggagacagatcaaatctcattttcagccaataaatgagttagcttcttccacgttggaggcccagagctgtgagccccaaacacacccggataagacgctggacctgccaggtgcggcagagccgaggacgggagagccttccttccccgcttcatttggggcctatttagccattcttttacatcagtttttccattaatttttttacctggaaataacaccttccttgcaaaacctctcatggccggcctggctccagttccacattcacggggcccccaacccctgcgctgccgtggctgtgcacaagggccgagctgcctctgctggccatcagctcctcccagcccggttcatggctgccctggtgagacgcagggtctgggggtgcaacgggaggcggcggcatgtgctgtgctgtcccgcgtgcgccgtgctgacaccgtcctctcttcctgctgcagcccgtgttcctggccttccgaatcatgcccggggcaggtaaacctcatgcccatgtgcacaagtgttgtgtcgtgcagtgacgtggtggtaaatatgactcctccctccagttcagcttttacgcagcttttcctggtgcgtttgttcctttaacaaattacgaattccgtgacagggaagagatgccagcgccacgagaggacacttcgtgagcctccctgtagccgtggaccgaatacgcactcttgaaagctgcatcgagaacccgcccaagcgccacctgctagacggccagccccacacttcgcttcagcctccggaccattccggagcagccycacatacctcactgtctcgtctgtctatgtgacattaagtagaaatattggtttttttttttttttttaaataagtcacagtcctgttgtcaaaactctaatagacagcaaagagggtctgtaccgtagacttcacagttttcagtttttaatgattgccagtggaggggcttcttcagcacagagaccccccactgtgtccagggaccccctctgccaggtggaggtgtgtccaggggctggggaagccgagacgggcactccctctgccggccggcagcgtggccctgagcatggcaagggggtctgtctctgccgatgctccttccgcggcactgactctgcgccgtgtcacatggtttttgaatcacactgcagctgctttccatttttatatatatataaatatatataaatatatactttttaaaaataatttataaatcttaccaaaacttatgctaaatatactttccagtatgaacgcacaggagagtcccatcagcaggcggcattggagtctaggagctcagctgtgtgtccatcaacacacaaattcgtaaaaaacacacatggcctcgccatcgtgggtaaaatcggccccacagcacgtctgcaccagcgggccgttactcccatgccgttcttctgtgtaatattaagaactgaatgtgaagtttatagctagcctgggtgtaccttttaagaattttgtaaaccgtttgtctgtcttttgttactgttttatggtgccaagtatcctacgttacaacaataatatcatgggagaaatagaaatagcctagtttgcttccaatagaaactgcttttaacatgggctgtatataaaaatattaaagagaaacaaaactgtacatttcctcattgctccgctacagacaacccatgtcataaccttgttgcaaatatttttctcctatagcagtaagtacagcattagaaggtgattagagagtctgttkatgaaacacaaatgtatgttttattgattttactttagaacactacagagttcctggaccgggtgaaggcattagctgggtgtttgtgtgggataaatactaccactgcaagtgactgctgtccgctgcggaatctgttcttggtggaagcacaggtccgtgtcgctgctgtggttgccgctgtccgcggttcaacacggagtccgccccgcgggtttcagctgttggtcgttctgaggggcctttggaagtgaccggtctggttcctaagcaataaaattgaccgtggtgaaaatagtcccgtgttgctttttcttcctttcccttctcctgccacctttgaaatgctaactcaggggagcggcctcctgtatagcctgttatttgagatcaagctcattagaaatcctggaatttcactgtatcacacgctgtcacaaaacactaagccgttcattgagaggagaaacacagccttttggactttctactgtaataaaggatttatccctcaacattttaaaacgggattatatcaacgctttgccttcctcaaaactttaagaagcccctctgctctgagctgagctgagaggggctccccacagaaaagcgttgcttctgcccttcgagttgcttccttgtaaagaaggctgctaagagcctaaaacaaaacgcgccgagtttaagccctttctatttccctttaacgcttccgcaaatgccaagagaaatcgtaccaccgcagtgatatcattatttacatttaatttttaaaaattaaaactcaacagccacgcccattaagatgcagcgatgggcagccccggccacagaggctgcgggaggctggaggggttttgtcagccgcagtcacagccccgcggagctggcggcatttcagggcaggagacgggtcccccgagcccccggctgggcgctgcgggccttgcccagggggcctccggctccctgaccccgcgtgacccacgggaggccccgccgctccgcgggcggaattatttcggatttctctttgcggtcctagttcggaagaaactgctttccaccgcgggaagatctggcgggatggtgaccgaagggcctccgtgcagcggatcagacccggttccaccggctgagcccagggcgggcctatgggatccgctgatgcgcagagggactttggaaataatcagagcgaagccctcggccgagcgggaacgggtgcccggtggcaacgagtacgtggccccaaagcgggaaaacggaagaagaaaaacctcccgcggggactcgaggcgggtacgcggctcacccgccctttcgggaacccccaagcgcgtccgaatccgccccgaggcgaggcgggccgggccgtacctgctgctccgtccccggctccgtcccgggctcctggcggctgtcgctgcggttccttcccgcgggccgggccccttccctgcgccttcgccgcctcctcgcgcctgcccggggcccgcagcctccgcaccgggaacccggaggacccgaggcgggcgcaggggcgaagccggggccggggaggggccgcctcgctccgggttcgagacggaagaaacacgcggcgcaggctccggagcgacggctccgacggggacccgttaaataatttattgatgatacaaagcgactcgcgcccacccggggccgcccccggattctgcaaaaatagattcgcccccaccccgcgggtcctcacaaggcgtcccccgcgccgccgccgcacgggctgaccagcgccaagttcgagggtttgtgcttcttgagcagccgcgtgatcttctcgtcgtccgagttggggtccaggggccggttgtattcgtcgtcgtcctccgcgtccgagccgcccaccttcagcttctcggcgtccgagtcctgcttcttcttggccgacgccatctccrccgcgtgccgcttgcgccacttggtccggcggttctggaaccagacctgggagtggacggggcggtcaggcggccgcggggcccggggctggcgctggggccgttcgcaggacgcgggcccccggctctgctctcccgagccccgccgcgctcaccttcacctggctctcggtcatgcccagcgagtaggcgagacgcgcgcgctccgggcccgccaggtacttggtctgctcgaaggttttctccagcgcgaagatctgctggcccgagaaggtcgggcgcgagtgcttcttcttcccgtccttgtccaggacgccgccggccggggctgcaagggaggggaagggagggaggtcagcggccggcggggtccccctccgcgcccacccgccccgcaccccccgcgcgggccactcacccgggccagccagacgcgggtccctccagggcgcgccctgcaccacgccgggccagaagatgggcgggcgccccggcagctcggccaggggcttggggtagccgcgcgccacagcggccgcgggcccgaagtaaacgccggcggacgacgcgagcccgttgagccggggcagcccccccaggaggcccccgcccgccgcgcccacgggccggcccaggatgtcgctgatgccgtgcggggtcccgagcgggagctgcgcgcccaggccccccagcgcgggcgccttgaagccggccggaccctgcagcgcgtaggggaacagcgacgtcttcatctcggccatgttgtgcagcgcggccagcggggcactgctcagcacgaacgcgcccgggcggttagtgtccatgggcgccgccgccgccggcccgggctcccatccgggccccgccgccgccgcccctgcccgccggcccgggaagtttgcgcgcggcccgggcgggcgtcggctgcagcgcggggcgcggggcgcggggggcgggcgggcggctccggcgcggggcgggcgggcgggcggcggcggcggcggctccggggccggtcggagcggcgccgcgcgggacggacgcgctgataacgggggctccccggggcgcggcgcgcgcgctgattggctgcggaccccgcggtccggccattggccggcgccccccccccgcccgcgcgcccccgccggccgcgcactccatgaagggcccattagcgcggcaggtgcctcccgggctgtaaattcgccccgatttatctccccggggacgaaataaatcymgcttggatgggagtgtagttaggcaaaggttttcatgcgaaatcaggaaaaaatacgagaacgtattttattaacggaaagaatgcagatttgaggacccgcccgcgcgctcggagcgccccmctcggggaagagtcccggcccgcgtcccagtcgcgactgctccgccgcccgtggctggggtgggtgtgagcggcagcggacgccggcggggaacgcgctccgggcaggtcggggccacaggagggcggaggacgcgggcctcgagtccacggaatccacgggcctcacggccgggcgaggctcgcacggagctgcctctggtttcgccgacacgcggccggcgcggtggaggagtgaggcaggcgggagcggggcggggaggcgggtcccgggaccacacgcgcggctcggcacttccccgtcatcggcctccaggtctcccgctgggggtcccccaggatgtgacctgggcccacgacttcgcccacgggccgcctctcgcgaatccccggccgggagaacagagaccaggacggcctcagcgcggaagccctgtccagggcccgaacgtgggtgcgggctgggggcgcagcggcagaaacgcggccttagacgcgcgcggggggccggtgtcccccccgcccccacggcaccgggagccgctcgctcatccatcccgcagaccgggcggtgagatgactccgagccccgcgcacggcggccgcgagcaaacgctccgacgtctgtggtgacgtctcgtattgatttagggacacggggcggctgtggctgtggcccacggctcgtggggagcccgagtctgtgcgcagggaacgccgctgcgtggcctctctcgggcctgtgccgcggaggaaggcggcgcccggggttcggggccggggtctcacgtccgccccctcgcccccctccagcgtccgttttcgttttgtgcaggtcgaggcggggacttggcgccgtcggccgctcctggatggcggcttggaaaagccacctgcggccaaactccggggcagtggtgcggccgccgggtgtgtgcgcgctcggggctgccccggcggcttccggctccactgaggtgcagccccgcgttcacggggggttcgcttcccccgtcgactccgcactcgattcgactgggattgggattcgattgggcgcggccgccccaccggtgatcggcccccgcggagcctggcccgggaacccccagcgcccgtccggccccgagacccgccccggcctgtcctgcgccccgctccctcggaggagacacgaggaagggccctcccgggtcgggttcgggcccctcccagcaccccaaggcgacggcgcccgcgcccaaggctcgggctctgagctgagacgcgggaactgcggggccggggggggcgggcagggggagttgggggcgggggctgctgtcgccctgggatcccccactctgcgcggccgggcagaccctgggcgggccgggaggggtgcgggtckcccgaactgaggcccaggaggcgcgcgcgggcggaacggcgggaggaagccgcgctcgggacaggctctggctcttctcacagcctggaggggcggggcagggggcgtcgctagcgctgttttatggctgaggaaacatggacctggaggcgctgcgctgcggcccgataaaccctgggtctgtctgcgccccccggtcctccctgggctgccgagggaacgcgtggggtcgcgggtggggctggcgtgtcactggctgcggagcgcgcggctctccagggctcaggggcgcgggatgaggggccagggtgagttgggggcgcagaggagccgggtaagggggggtccctctcccacgttcttgtaagccgtggaagtcttggcgcgctccgcaggtgccgcgtcctacccggctccccggcctgcgccccacgcgctttcccgccctcctcctcgccgagctgcgcgtgggtccggtggcttcacctcctacgcttcccggcgcccactccgggccccgtcccctctccggcccccgcccgcaccttttctcctgcgtcccccggtgccgccctctcggaaaccaccgaggcaactccccctcctcccgggaaggtccgagcgcctccgaccgcgatgtctttgcctgggctccgccgcccggcggccccgctgcctggagaggtccgcgatgccacctcctggcccgcgagcagatgtcccgcgaggaaggctgccggcatcggcgccgacgctccgcgctggaaaaccgagagcgcggggtttggcagaggccattcaagtttgttttactcgttcagcctgtatttgtggggctcctaccgcgcccgggctgtccggggggtgcaccgtgaacgcagcgggctccggcccgggcgcgggcgggtcagagcagcaaacgcgctcccccggcacccccgcggcgtctgcaggggagcgggcgacggggaggacggcgggggtgtcggcccggaaggagagccggcctaggccccggtgtccccgcgctgggggctgaggggcgacgggggaactccacagagggaaggagcctgcgttcgccttcggccgcccaggccatagagttcacaaactctgatttatcactgaggtgacttgtcccgcgcagccctaggcgagttgccaagctgcccgccctgaccgcgcccccaggccgggggtctcctagcagttcccggcaaaggccctgcattgtcttttttcccgaagtgagcgcattcccggcctctccaggcttgacaaggtaaccgcaccaggcattccagacacagacggggcctccctggggtcctcatgaccaaagaaccaaaaaaggcccaagatgactcaagggacccctctgtgggccccacccacggaagcagcggcgtggggttaccaggacccccaggagcccgggcccaggcggggtgccttctgttgcttggaaacagaggagcccaccaggacgctctggaattgctggaaggggaaggggggctagagaaaaccccaccccacaacacaactcgaaggggccctgcctcccacgcaggacagaccccaaccccatctcccgtgccctctgggggcagccctgccagggcagcgggaaagggctgggaggcaggcgcagatcccagccaggcagccccggcgtcccactgggctcatggacccagccgggtctgaaaggccatgagcgctgag

SEQ ID NO: 93809 - DNA, 70533 bp, Homo sapiens
  misc_feature (1)...(70533): n = A,T,C or G
aggctttttatgggctcagaatggagaaggggcaggctgtaggtaatattggaaaaggcaacatttgattagttaaaaggcataattcagaaagaatcaattgggaaaggatgggcaaaaaggaacagaagttctcactctgggttgcagacttcatccgggaccggcaatccggtctttcagctttcaggctgtttttggcctgaaggtggcgtttcactggggacctgccctacctgcctaggcatttggctgcctcctgtcactatcagtagttgtccttgctttggttaatttctcctctatgaaataagattggactaacccaggagtcttcaaaaatacctagatgctttatccttttttaaaaaaacatgaactcttatagagaagtccactggaagaagttataaacttatgcaaatcctcatcaaaatctgttgtgaaatatcataatgtttgaaatgccaacacccgcatggaaataaagtattttgaaggtttctagtcctgatatggcctgatcagttaaaaaggtatctcagactgaaaaagtaaacttctgccccctgccatccatcaggctgagatagcacagataacgacagcagcagagggagcgggaaatacgtcctccaaggacacacggatgtcatatcaggtcaaatcacccccgtccttgggtgcttgctgctttcttactcactgagaggcttccttctggaaaagcattgactatcagaaggtttgctgtttgaaatcatcaggacggaaccatctcaacttacccgggggatccgagtctccttgaaacaaacaagcagcctctatttccaacctgggtgcagaacttcccttaaagggtttctgggtgtgccagtctgcatctatattaactctagtctccaaggaygtagacccccagactccagacctgatgttgatctgtactcacagctctgtctgccttgaacctgtcaaaacactctttcctttaaatttcacctacacgccacccctcccctaagtcttcaaactttacctttgctgaggcatcccaggattcctctggcctcagtcttctctccttgcaatgagccaataaatctgactttatccaactacagttttgcacctggtggtctttgattgggcccagacaggccacgtgccaatcaaagcagaagaaattctccctggtctttactatttcatgcaagaataaggatcaaatggatcgtgtgtgtgaaagtgcttcactgagagaactacatgtataggattacttactggaactaataattttaacaaagaggttcaaatataaatgataagtcctgataatatacagttcagggtatattacccagcttccccgtttaaacctcatggtaagagaacaggttttcggctcagctgggtgtgagttcaagccattgcacgcttatttacagtgtacctttgagtgagttattttacctctcagagccatttcacaggtagaatggggataataatatctggttcatactattgttcaaaggatgacacgagaagagtcatgtcgtgcctggcatatgaggcccactcaatatgccttaattccccacattgaccactcaaagagaacccagctacatttcattttgtaatgtctacatttctagacaccagattagcattatttccttttaaaagttactgcttgaatagcagggcagtgacttgattggcagcaaggtgatagggttagagaggctgtggcctgcctacagctctttcaatgtcattagctttgagcatggtggatagtatatttggctggtcagattacttctgagaattcttattctcctattcatgattggggatttattcaacaaagctaaggaaataacctcatatagtgctttcttccggtctttgcttgttgttcctgaaattacagaagatggcaagaatagcataaaccatctcaactgcaattgcttggaaaatttcatacactttttaaaaaagatactgcatatcttttgtggagaaaaggtcaatgccttattcacaaaaacctgccggcaacccacatcatctttaaaacattaattctagaaatactgggattgaatttaaagtgagcgaacttagcttcgtgaggttggttttctctgctcgttaatttgtcatggaaattgtttagcagtgagacctgttgtaacaagtaaaataatcacacagaaagaaataataatcctgctgttttcaaatttaacaactttttagagccgggtttagaagtggaagtaaggaatccaatggtttgcagaatatacactatttgctatcttttgcacacgcattttctaaattagcctactaatcctatgctgaaatttgaaagtcttcttgttaagttcatactggtttacacagggaaatgatcagaaagtaaacctcacggcacgaggtgcttgaaacatacacacaaagcatgaaggtctgtgctcgtgaaactgggttcagtagggagacagttacagaaaggagaggaaggtgttgaaacagaggcaagagcaagaaacacagtttgcagcgtgggcaaactttctgtaaaagaagatgttaagtattttaggctttacaggccatatggtctcagtggcagctactcaatgctgccgctgtcctgtgaaagcagtcacagacagtgtcaacaaacaaaattctatatacagacactgaaacttaaatctcatgaactattatgaatttttttccaaatatttaaaaatgtaaaactctttattagtttgaaggccatagacaaccaggttggatttagtctgcaggctctttaggcccaaagatgattattaaatggtttactgaaataatttggtaatatttcagtagattttatggtgttattcagttggacttcaagctccttatatagccctccttttggttgtttacctcacattatagctagagtttcaagagacttaggggatatcttcccctctattggacgttacttgcaatgctggaggcacgcaggagagaaacacccagaggaggctggcctcgtttgcataatattaagtagtaatgtatttagttaaataggaatataaattagacatctattacacccaggtctggaaaacagagctcagcaattacctgctctgatttaggcaaatacaaatgccaaactggttaattctggttaaagacaatttgctggtttaaatccttgtagttgataaggaaaatgtttgctgagctttgaacaggtgctgatatgatttgggtctgtgtccccacctgaatctcacgctgaattgtaatcccgggtgtcagggaagggcctggtgggaagtgattgaatcatgggggcagatttccccctggctgttctcgtgatagtgagtgagatctcacaagatctggctgtttaaaactctgtggcacctcctcctttgctctctctttctccttctctggctgtttaagaatttaagatgtgactctttcctcttcaccttctgccataatcgtaagtttcytgaggcttccccagccatgcttcctgtacagcctgtggaactgtgagtcaaacctcttttctttataaattaccaagtctcaggtagctctttatagcaatgcaagaacagactaatacaggtgcatagtgatttgctgactgcatgaccctaagcctagaggatgtgagagtttgtaaaaaggcagagcaaaggggccagaatgagcagctgaaccctttgcagtgaatgactcaattgtaccatttggacacaaccaaacagacttggtgagtcgacccagttcytaaaagctaccagagcagttggcttgccaagggatcctgaataactgaccaaccctaaactgacaagcccgggacctgcttagattgaccagtctatttccttgaggcactttgtgagttttatctctatgagacccaagctttgctgtggagctgtcttcacagtgacagcaccctggagtgtgtctatacacaagaaaatcttcacttagcaccctctgtccacctgcagaatcttagaccctactcctggctagctgaaccagaatctacattttaaaacaagaccctgggttgactgacgtgcacgttaaagtttgagaagcaccgaggtacatcctcaaaagacgatggttttcaaacttgaactggcatcactcattagaatgtccatctctgggccccacccccagacttgctgacactgagttgacccccagagtcaggacacctccagtgtggctggagattgtgcatttctaaatacccaggtgctgccaatgctgctggactgggaccacatttcaaaaactgctcttcaaactgtgagttgttttccaagaagttaaactgaaggcttcatcccacagagcctattctatgttagattgggcttccccagccttatctgggatgcaacttaacacttgtcttggctaggcactgtggctcatacctgtaatcccatcgctttgggaggccaaggcgggtggatcgcctgagctcaggagttcaagaccaccctgggcaacatggtgaaatcctgtctctaccaaaaaatacaagaaactagccgggcgtggtggtgggtgcctgaggtcccagctactcagaaggctgaggtgggaggatcactcgagcctgggaaacaggggttgcaatgagccaataacatgctactgtactccaacctaggtgacagagtgagaacccatctcaaaacaaacaaaaaattcgtctagtctgcgtcatctttaattttcctttatcagaagaattatttatctatttgtctcactttcctttgctgacatgattttcccccctcaaaaaagagatgaaagtggaatcattctttcgcttcaaaaagttaagaattactgctgtctttaaaaatattaatatgagctagacaaggttttttaatacatttcaatttaattatgaagtgtccaagacaagaaaaaactgtgaaaaccaacgacttatgtacctgatggtttagatttcttttggaattgtacatctgttcaaaatacaattacatctgcattgttggaaacgtttggataaaaaccagtttatataaaggtttcaatcagtccacatccatgagaaagtagaaagggcaggaaatgattaagggggattattgctaatctgataaacacagatttgtgtctttcggagagacagaagtgtcactctctccatagctgtaccattcctaccacctggcccccaagtggcattgctttaacccattgtctctagggaaaatgttctctttcgattttggttctcagtcctataatttctggggcttaaattagtcctggagctagggaagaggtgatgtcatccttccattgtctccttcggccacagtttcattttaagagtattggtaagtaagtgggcagtgtgactagatggcggtctggactcggtatcagggctgtgtgcatgcccagctggggggccttggtggtgtgtgatgtgatagatacacacatggttggcatccccaagtgtgtctgcgcttgggttcatttgtgtgtgcatgtgtgtccatttgatgtggcgtgtccccaagcttgtggagtcgtctgtgagtctgttttgtggggtgtggcccaggtgtgtcagggtccaccatgcagtcggggcttgagcctgagtgcccaggtgtgttagggtggatgtgacttctgtggggcgtccccaggtgtgtgaagctggttgcgctgtgtctgcggcggggcgtctccggcgggcatcggcgtgggtgggtctggctgttaggcggccagttgtgcgagcggccacgtgtgtgcgagggcgccgcaggggctggcgggcctcgcgttccgcctgcagggggcgccgccgggggcggcctgggagcagaggcgcgggcccggccctgcatttccgccctggccctgccctccccgacagccccggctgccggcaggtgagkcgctgagcccgggcgggggtcggggctgcgcctgctccgccccccaggcggggtgtcctggcgcccgcgggaacctggggcgtcgctccctgcgcggcgtccgggtcgaggccgcagcactcgrcgtccccgcgggtgagggaggaggcctggggcgccgccggccggcgaggccagccggagggaggggacggtggaccccgaaacgcgtcctccattgccccgcgcgggggccacgggcgcgattgccagaacgggcagagggcggtaaaagccaggaaccgcctcacgcacgggcgctgcttccctgtaaaggaagcgtgacagcccacacgctggctttcagaggacctcagctgaaccgggctaacacttctcagaaattgtttttcattttaaagatttcctgtttgtaaggagactagaagctgcaaaagaaatctaaaaacgtctcctggcacttgtgaatttctgatctaaggtttctttggagccattagtgaaacttctgaaattttgaagaaatttactgccttgattattaattatggttatcattgctgttttactctgtgggccaaggacaacgccacaagctcaaaagcagacttaagtgttttttgaacacagcttcttaactccacgcttagttgatttaatatttaagtgataagaaaatgcagtcgatttctggccctttttattgtttgggatgaagtcttgccctgttgcccaggctggagtgcagtggcgcgatctcggctcactgcaacctctgccttccgggttcaagcgattctcctgcctcagtctcccgggtagctgggattacaggcgcctgctatcacgcccagcttatttttgtgtttttagtagagacagggtttcaccatgttggccaggctggtctcgaactcctgaccccgtgatccgcccgccttggcctcccaaaatgttgggattacaggcatgagccactgcacccgggatttgtggccttttttaaaagcaagttattcgttttgctaaatgtcccaggagaaatgattaatgaaaaactaaaggtgacctatttaaagtgtaggtcttacacacacgtaggtgtccttatgtacatttacctgtaagtgaagacttttccctggcctcattcaatttattgaaatgctcagatgaagagcacctgcagtttgcccgtattttcccaaaatgccttgttttcctgaaactattcccagaagaagccagacttccctgaataagcagaccactgtgctctagcagagattcgtattgtaaaagctgagtttgcaaagttaaattaatttctaattggtggatttttgtacggaaatactttgggctagttgattttactaaccaggccctaactactrctagttaggagagggtggttgtttgtggtgatctggatagtaggtagcagtaagcagaatagaagagggattttaaaatgatctgttcatttctctctttactagtaagatttccaatctgtgtccattcttgaagtgaagtcattgggaggctttgtatccacctcgagccagggcccttaccagtgattaggacaccagcaggctggtgtggaagtgtagtgcagccatgcttgaagaggggacaggacccaaggaaaggtgacagtaagaggacagaaacacgaaatattcgcagccctctttagaacatcctccatctaggcaaactctattaggaattttaagagttctcaattaaacatgactgcccagtgtcctgctgaacaggaattcattcttcagttgaagctctattgtcagtaaaactactcaggataaggcagccgtgtttaggccgtgaggacctgcccctggactgcggagcttgctccgtaaaaggcatcgtgatacccccttaaatggatttacagaaaagacttagctattggaagtctctgggattgtatggcatcatgaggtaacagacctggtaaatagctagaacgtagcgaagaatgaaaccagaggcagtgtgctgttggaactgagaggtgagtgctcactggagggccaggagaaggtcacagttggggagaccttaagcagagaacagatttttataggcacaggaatggaaagggtggccaacaccatgagcaaaaataagaagctgaaaatgacagtgtgttcagacaaaggtgaacaactggcgtgctgaggctggactccgcgagaggaggggtggggtcgggggtgggggtgcctggaaagcaaggctctccagtgataacctctacattttgatcaaggttctgattttgtttgtttgtttgttttgcttattgggaaaattttaagcaaacataaaagcccagcaaagtagaatgaatttccatatatccatcaaatggacttcacaagtcttgtttggccatatccacttcatctttttttttctttttttggttgtggctgaagcagtttaaagcagtttattccagacaacataacacttcacccctaaattgttcagtatgtttctccagagaaagggcatttgcttgtgtaaccataatacaattatcacctcctgatgaaattgacaataattccttaacattttctaaaacctagtccatgatcagatttccctgatcacctcaaaaatgaacttatttttactgttggtttgtttgaatccacatccagacaagaatttgttgactgttacctttttattttattttattttttgagacaggaaccagctctgctgagatcatggctcactgtaacctcgaactcctggattcaagccatcctcccacctcagcctcctgagtagttgggattacaggcatgtgccacaatgcccagctatttttttttttttttttttttttttttttttttggtggagacaggtattgcccaggctggtcttttttttttttttccttcctgagacggagtctcactcactcttgtcacccaggctggagtgcagtggcacaatcttggctcactgcaacctccgcctcctgggttcaagtgattctcatgcctcagcctcccaagtagctgggactacaggcgcatgccaccacacccaactaatttttgtatttttagtagagacggggtttcaccatgttggccacactggtctggagctcctgaactcaagtgatccacctgcctctgcctcccaaagtgctgcgattacagccgtgagccaccgtgctcagctgttgcccctttcaatctagggcaggggtggcagatgtctctgtgaagagccagataccagctctttcaggctttgcaggccctatggtctctgccacaactgctcagctctgccatcgtcatgcagaagtagccaggggtgatagtaaatggataagcatggctgtgttccaatamtacttaatttccaaagcttttgtgttttaaaatccacccacaggctggacttacccgcaggctgtggtttgccgacccaagtctagagcagccttggcgggtttcctcaataccaatgactgtcgatgttacttggttgattgcctgtagggtgcctcacactctggatctgttgggctgcttttcgtggagtgtggtttggcttgcttctctatcccctatatttcctgtaaactagaagttagatctagaggcttaattaggttcatgcttgccatttttggcaagtctacttcagaagtggtttgactttttttaaatctaaatttatctgactttaaagacttggaaaccctcatcaaagaatcaaagaagctcaacattaccaaaataggagctcagcattactaaaattggctttgcctgatggctgagaagacattttttctttttctttttacttktcttatttgtaggagagtatatagagctgttatttctcaaatagttcttttttgatagttaatttttgtgggtacctagtaataggtgtatatgagatacaatgtgtaataataaaccctcattacaaggtatatgagatacaatgtgtaataatcacatcagggtaaatggggtatccatcacctcaagcatttatcttttgtgttacaatctaacgatactcttagttatttttaaatgtatagttacattattactgactatagtcaccctgttgtgctatcaaatactagatcttattcctgctttctgtgtttttgtacccattaaccatctctgctttcccccaacccccctactacccttcctagcctctggtaaccatcattctgatctctatctcagtcagttcaattgttttaatttttggctcccacaaatgagtaagaacatgcaaagtttgtctttctgtgtctgggttatttcacgtcacataacgacctccggctgcaccatattgttgcaaatgacaggatctcctttttaatggctgaatagtacttcattgtgtatatgtaccacattttgtcaaggaggtcttgagaactttgaaccctttctctaggtcactgggaaggttcctctattcaaggcattctttggcccctcaagcatgtggactgcatttttgcactgaatataagtatattccttccctgggtatgtgcccagggtctgagattgccttctaatggtagttaggtcatttatgtttgtttgtaagccccttattgcttaaatgtttaactttcttcagttgacttcctcttatctcacctcccaacaggactgaaaactggatatttggtccccatggactttctggtcaccctgtgaagtggacttaactttttcttgaatcatgtggaaggattctgaagtcaaaagtttttaagactctcaggcttactgtggatctggattctaaggcaacacttccttgaagaaacaagcttacaggtgagaactgttagcctctgttctagagtgttcattgctcaaattctagagcaccacaagaagtatgctgacaaatagtgccagttggaagcccttgtctctttgtcatttaagaatagtagtggtggggagccaggtacggtggcttgtactgtaattccagcactttaggaggctgaggcaggaggattgtttgatcccaggagattgaggctgcagtgagctgtgattacactgattatgccattgtgctccagcctgggcaacagagtgagaccctgtctcaaaaaattaaaggaggagggaaagggaaggaaagaatagtagagaaagtgtatattcatttcttcatctgtttttctctggggttgtcttttgatttataagaattatttatacattgagaatactaatcttttgtcatacrtactataactatttccaccctattttttgtactttgtgtaatacagtctctaggctttgcaaaaaattttaattttatgtacttaaaaatatcgatctcccctttatagtgtctttgttttgtgttttgcttagaaagacttgcccattttaaggtttcttttaaaaattcgtgttaacacagataaatgaaaatgtaatgagagctaggaacatgtgattctgaaaaagattattgaagggggagtatttccagacaataaataccaaactaatgttggcattaagattggccgtatgttgctaagtgttgaagttgggagatgagtatttgagagttccttctatcattaccctagttttgtacatattttactttccataacacagttttttttaccaagaaaaaaatagcagggggaagttatatctttgtcccattcattcatattcagcagctatttattaagctattctgaacactggagggtatcatgttaatgaatgaaaaaggtgttggaatttctattatgtgggagacaaatattagcatcatggttaagggcaccaacttctgtgtcagaccgcctggcttctcgtcctgacactgccacttactagctgggtgattttggactttttaattaaaaatatgtgtataataacagctgtctggaggctctarggagaatctgttttcttcctttttgcagctgctagaggccacctgcattccttggcttattggccctttcctccatattcaaagctaacaatattacccttctctgaccctgcttttgtcgtcacatctgtctgatctgatccagggcaggttttccagttttaaggattcctcatttrattagattgggcccacttggataatccagattgatctctgcacctcaaggtcctcacatctgtgaagtcccttttggcataggagttaacatattcataggttccagggattaggatgtaaacatctttgggtggccattattctgccaaccacagatttgaggagacaaaagaaggtgaatgtggctgagtccttggcagggaggagatgggactggagagggagccagggagagaggattctgtaggtcatcataagttttgaagttcctcccaacagtaagaggaagttatggtcagatttattgccccaaatctgaaatcagctgtttctccaaggagccctggttagctgttttaaagtgaaaaatggtacttaaaggccataatctggccctaataaggtgctcattgctgttggattggcagttgtttttaagccatttcaacagacagagacagggaaaaccattgttcaagataaaatrtttcatgagcgcatactggtaacatccaagtctttttctggactacaacgtttttgcttaatgtcatagaacttatatccatacccctttcttccactccagaaatctcagttcagaacaacccagcataatttattatttgctttagccctcaccccacagagtcactgccacaggggtgtggggattgggaggaagaccatggagataaagtgtcatttttgctacatcgtatcaagcacacatactgtctacatgacttctctcttttgctgttgatcttgattacctgactgaaatagtgattggcaggtttctccactgtaaagtcacactttccccctcccttcatactgtgctctgaawggaagtcacagtgagcagcctgcacttctgaagggaggagttatttaggcttcatctccttaaggggaaagtgtctacatatgttatttggaattcttccgtgcaggagggttatctgttttcttgcatktatttactcagccatttatatcattatggacycacagatacttatattatactttaggttctaatccaatactccttattttgttctccagttgttcctgctttggccattgggagcctgttccattgtctcttgtgtcctttcaacttgtcccatctttgtgggctggtgggtttgtttatttttgagcacttccttgctttccaatattgctagatgccctagattgatcttgtgtatttcctgcttcagtcttaggttcagccgtttctctggggaaccctggtcccctctgttggagatggtgttagaaaccacaagctggatgctggtgtgctcatttcgactgtggtggcattgcttttaggtcctctcagctgatggagcaaggaaatgtctgtgtgtactgacctgtgtatatacacatatcactaaatacttctgtatggaaccatttgtttctgtgagtccacactggtgtctccagccctaatcctttaccccgtggatcactcttgcgttttccctgctgtctctcacctcccattccaacagtgasaaacgtggctcccgttgcctgtggcacatttgcctacttgttcagtacatatgtgtgtatcacagtgttggaattgccatctcgccctatgggaaccactgaaacaacgagagcccggtttttatgaatatacacagttccttttgcctttagtcttgtaactgtagactgggccaacaggtgaaagtttctttgggcaggctgaaatgagatcctactaccttgagaacatcttaacagtcagatctacagggtgcagatttcatagcttccccctggcagttcttccatcacttgtgagccctggctgttttattctgcctaagccaaggcagcctttgctatcctgacttgacacagaagagttacttagtaactgtgttsatttgctagggcttccatagcaaattaccacaaactgggaagcttaagacaacaaaaatttattctctgctcacagaatccaaaaccagaaatcaaggtgctgtcagggctgccctccctccaaaggctgtatggaaagtccttccctacctttttcagcttctggcggctccaggcgttctgcggcaagtggtcgcacacctcccggctctgctgtgtcttcacatggccccctcctcggtgtctgtcttctgtccctcataaggatatttgccattggattsagggcccgtgtagattgcccaggatgatctcatctcagcttccctaattaatcacatgtgcaaagtccctttgccgtgcgaggtgccatagtcaaaagttccagggattagggcatggacatgtttgctggggacctttgttctgtcagcctcactttgtgatgcagcagcagtcgcaggatcagagcagatccccaggcatttttggcagagtaagaccaggtgccaatccccgaggtgtgtttctgctgctcttatacaccgaggcagacccatcaggtctagacccagcaggcccctctttcctcagcgctgaagggagggggctttgggctgacaggagacctaagttccacgtgtgaattccatcagcagaacggtgctcagaaccttctgattcactctgtaggggcagaaagggggtgatccctctctaccctgtcataagggtcatggctgacaccccaatgacaaagattaacaatagaaaagcaaaacgtgttcaatcatagttttaaatgacataggagctttcagaatgaagacccagagacccagggtgaactctccagattttgcttagatgtgaagaagcacagaccgccatgtggaaattcatttggaaaaaagggtgtgagctgatggaaatagaccgagtagggaagcccagcaaggcctgtctcctcaggttcttcttggcctctctgttgtagcatttcttccttccaggaatggggtaggaccctctggaatgagggtctcattgtccaaggtctttatggccagctgttatacagaaaggcatggggaaggctagagagtagtatttttaggttttatggctggctttggggaaaggggttctggttcctgtcacctgcactggggaagagaagttctggatcctgtggtttgtcttgggggaggatgagaggggcaagacacacgcaggagaaagtcagagagactgagctgctgaacccctcaactcctaggccctcctctccccacagctgtgggtactcctgcctccgtaccctgggggtggttttgctgcagttgctcttttatttgaatttcatgttattttgtcttgcataattaattgtttttgcatgctagcctaaacactgcagggctgtgagctctgattgggtgagaaccatgccttcctcattcggagtcygccatcatgccttccacatagtgggcacccagtaagaaagaactcatttccagctagtcgagagtgtttttacagaactgatgttctgagtcaggccagagtaaattagagtaaggaagagtatatgcgggaatactccccatattatgctgtgttcctgtccatttttcaaatgaccacatttacttttcaagcttttgagtgttaattacctcttcctgctgttgtcatctgtacttgggagtacgaggcaggtaagttaaagaaaattaatatttttacatctcatgatggttttattaactttccagcattaaatgaggtttgaaaagtgttctttgagccattattgaaaataatcataactgcctgctttgaattactcttcctcccttgatttagttttctgcaaagttagatccagattataaaagcctaataaaaacttataagaggagattagtatatctcataaatgaacaaagaatggtttgacggcattggagggaacattgacgaagtctaagtcatggttaacgtggtaattttaggaagaattgtgaacagcaggatcttttacaacagaagtcaagtagactcacaggtaagccagcagaaccagggttccggggcttaagatcagctgggatataaatgaatgtactgactgtgggagcttgccagaagctcggttacctgcctctcactggttttctcgagcctctgtgtcacttyccatctgggctaactggcagatatcttacgcaaatgcgacacattctggactctcaggttgcggtgtagtggtggcataagtggatgttttcattatgtagaataaaaacaatattggcagaatatctataacaaagacatcttgaacaaacttgtgtccagggaggtgctctctccattggcagtgtttgagattagagctgtagaggtgaaggtagccactaccgtgggaggaaaagaggagtgcacttggtgttcggacatttccctgtggacgcccagatgccagtatcgccttatcaaatgaatggttttcagagtcaactttgtgatcagggctctcttagaaaacatccatttcccttttctatctttcccttctgatattttagttgtgcctgagtaaataacgaacccctggtgaagaaaggcaagtgaaaatatcattcccaccctttattcataacaattaggtacaaattggccttgaatttggttcctgcagggatagagacacatcccagttgatgaacccttcttccctccctgctgccctccctcctttccttctccccttcatccctccctactttccttctcccctttctctcttytttttcccttttcagcattttactgtgaacatttccagacatactcaaaagtacagtatagtaaccctcatgtgccacccacccgggatcagagatcactgcaccatactggctttgccatgcttgttccacgtgccctcctccctttgtgttttggacttttgtttgcttgtttctagagttttgaagcaaatgccagaaatcatgtcatttcacccccaaatattttattatgaattttgagggttttttacataaatataattctgtccaacaatgaaaaaatattccttaacatcttttaatattttatcccaatttcctttctttttctttttatttatttatttatttatttatttatttattwtatttatttttgagatggagtctcgctcttgtcacccaggatggggtgcaatggcgtgatcctggctcactgcaacctctgcctcttgggttcaagtgattctcctgccttagcctcccgagtagctgggattacaggcacccaccaccacgcctggctaatttttgtatttatagtagagatggggtttcaccatgttggccaggctggtcttgaactcctgacctcagatgatccgccgtcctcagcctcccaaagtgctgggattacaggtgtgagscactgcccggcctatttttctaaaacaaggtctgtacagttggtttattcaagtcagaatttttaaatcccatctattgtatttggtttatgtatctcttgtctcttttaaaaataattttgtatgccaggcattaatttgattcagagtgttcttattcttttacctttcatttttaaactgttttagagtagttgcatgctctcatgctttcattcattattattaagtttacagtaaaaccaacttgtttgtacaatgtgaatagctttaaaatgtgtggattcttgtactggccatcaccaacggtatacagagcagtcccatcaccaaaaagccaggaaacaaaacaaaccctccctcattctgcccctttgtagtctaacccaccccttcctcaaaccctgacagctttgatttgttcatcttcgtatgttgtgccttttccagaatgtcatgtaaatgaaatgatataatatgcaacctttgaggctgayttttcacttcgacgacaactttgagatttgtttgtgtgtatgtcctttcttatcgccatcgtctggatgtactgcattgtatgtatccattcacagtggagggccatttggattatttacagtttttggtgattttgaatacagctgctgtaagcacttatatacaggtttttatctgaagaaaagttttcatctttctagggtagattcctaggagtgcaattgctgggtcataattttgtaagaaagttctagatttaattttataagacactttccaccatgcctgtactgctttgcattcccacccgcaatggtgagagttccagttgtttcacatccttctcagcatctcatgttatcaatttggtgtttctttatttgagccatcctaatagatgtgttatttttattaggtttttgagattacaaaaatttgtttttaataattctcttacaagttattggattaaattcatatasctgttttcaaaataaatattggttttctgattttttacattgaaatatggtaagtatactgaaaaagccaggatattatatagataagagtcattctcaaatctcactaattaagagattatatttggcaaagtattacaaaataataactgaattcacaatgcattttgcaatgcaagatccattcattatatgcatttcattcctgagcatctcattcctgtttgaccattagtagtagtaactagtagtgccatgtttgcttttgccatcagttttatgctagattggatcggtcgatgaatagttgattacatgagaacaaactggatgtcagcagagagtaatttgtttgaatgccctttaactgtagcaaacaccattgtagygtttgtttgtttgtttagacagggtctcactatgtcacccaggctggagtgcaatggcatagtcacagctcacagcagcctcgacctcctgggctcaagtgatcctcctgcctcagcctcccaagtagctgggaccacagttgtgcaccacctacatcctgctaacttaaattttttgtagagatggagccttgctatgttgcctgrgctgatcccatcatagtttttttaatgggctgctccrgtgtgtctgaagcagtagtcaaagtttgcatttgaatacctttttccttattaaaacatggtgagctcaaagaagaaaacaagtcgaaatttgtgaaacaaaaatcatgcatctatctctttgtctgatttaggaacagtagtctctgatcactattggttgaaagtctggagttgactcctagattagttactaaaatgccactgttaatgtttgtcatctctcactcctcccctacgatgaaactgggaaagtctctgggtacacaggtcattgctaatggaggtccttctgtaaattcaarcctcacccgttaactgctatggtataggctctcagttggtggtagtatttaaaagacacagaacgaagattcctgtcatctacttggaagaacgttagcatataggttttattttgtgactggaatctccctgtttttccttctgaaaagttgctggagggttcgacctattggcagaccttcctttctaatatagggacatcacaaaggaaaaactgagctgacaaaggaagactgaggacagacatcagatgggctcttgaggttgctgtggctgaaacctcagaggccaagtgtagggaagatttggtttcaagtgttaaattggatagatttctgtctcttttttttttaatacacataagtatgatttatatattatatgatattctggaggaagcagttctgttaatttctttttattagttcagcttttattttagatacaggaggtacctgtgcaggttttttacagagcatattgtacccaggtagtgaacatagtactcagtgggtcattttcaacccctgcctccctccgttctctgctctagtatcttcactggctcttgctcccaggtttatgtccatgtgtgctcagtgtttagctcccatttataagtgagaacgtggtatttggttttctttcttttttgagatggggtctcgctctgttgcccatgctggagtgcagtggtgcaatctcagctcactgcaacctctgcctcccaggttcaatcgattcttctgcctcagcctcttgagtagctagaactacaggtgtgcaccaccacacccagctaatttttgtatttttagtagagacagggttttgccatgttgtccaggctggtctcaaactcctgacatcaagtgattccaccggcctcagcctcccaaaaagtgctgggattacaggtatgagccaccacgcccggccaggttttctgctcccgtgttaattcagttaagcttatggcttccagctgtatccatgttgctgcaaaggacatgatttctttctgttttatgactgtagtagtccatggtgtatatgtgccacattttttgtccaatccattgttgatggacacctatgttggttccatgtctttgctgttgtgaatagtacagcaatgaacatatgagtgcatgtgtctttttggtagaatgatctattttcctttggatgtgtacccagtaatgggattgctaggtaggtctgttttaagttctctgaaaactccaaactgctttccacagtagctgaactaattgacatttccacagtgtataatcattcccttttctccacagcctcgccagcatgtttttttttttttttttgactttttgataatgccatcttgacaggtgtgagatggtatctcattgtggttttgattttcatttctctgattagtgaagatgagcttttttgggtatgtttgttggccacttgtgtgtcttcttttcagaagtgtctgttcatgtcctttgcccatttttaatgggtttatttgttttttgcttgttgatcctgtgttcgagtagtttttgttttaaaactaacatattaggccaagcacagtggccctcacctgtaatcctagcattttaggaggctgaggcgtgtggattgcttgagcccaggagtttgagaccagcctaggaaacatactgagaccccatctctcaaaacaaacaaataaagaacctaacatattaattgaccattacatctgttgggattggaataaatcagaaatagtaaaggattagtaagggtgttacatccattggactcaagtctttgttttgtttaaaaagttatatatgggtctcttttaaacttctggcttattgagattgtttcaatgaagtcacatatatgcacatatatgcacatatttcatgggatgggggaaggggtaatggaagagtattgggccttagtccagggtgtttagaataccagactaatatagctgctgccccctggtggcagtgtagtaaacagtgacgttcaaaggtaaggacttgtggagagctaagtccagtggactgtgggtgtcaagaggattgtagaggaaactgggaagatgccgcttctctcccactcttcttgtgattgctacctatatggtcttagaaaaatcttttagttggattgaagtgtagatttcatattcaactttaaaatgtactttctaaactttttccagccttaataccctatgcttctccaagggtattaataaaagatgccattatatagcaaaagatgtcaagttctatttttttcctttagcagctgtatcctaagaaaccccagatattcgttcaggaaagcaagttctagagtacaccctgaagctagatacagctacagctctgggcagcaaaatgcataaatgtacctgcagcacagttcatcattaatcagtttgaggactctgcattcttatgaaaagcttacatcatctgaaaaatgttttttatcctggtgtggtggtgcacgcctgtagtcccagctactctggaggctgaggcaggaggataccttgaggcaaggagtttgaggctgcagtgcactatgatcacacctgtgaatagccactgcaccccagcctgggcaacatagcaagaccctgtctacaaaaataaataaatgttttaaacattaacacataaattttaccatcttaaccatttttaagtgtacagttcagtagtattaagtatattcacattgttgtgcaaccaaccttgagaacattttcatcttttaaaactaaaattctatatccattaaacaactccccattttccccgtcccccagctcctggtaatcaccattctgtttcctgtctgtatgaatttgactactctaggtatgtcataaaagtggaatcttacagcatttgtctttttgtggactggcttattttgcttcgcatagtgttctcaaggcttatccttgttgtaggatgggtcagaatttccttcctttcagtcttttcaaggctctgtaatattccattgtgtgtataccccacattttgtttattccttcctctgtcagtggacacttgggttgcgtccaacccttggctgatgctgggaacgtgcatgagctatgtcatttttagtatactgtgcagaccaatgcagagaagggcttatacaggtttttcctgcacacaaaaggttaaatttcataataaagaacaccagtcaaccataccagataactagtgtatggctttttgtatgtttgagtaagttaaaaaaggttaagacttattggatacaagatatatgcaaggcattattatatctgtgatatattctatttagtccttgtagttctgtgatttatccttctctcagagggagtaagaattattgagatcatgtgtgggccagaatgtatatatacatacattatctccatacatcaatgtttgaggtgggcattattatccccatttgtagggaattggaactgaggttcacagagatgaaacaccctgaacaaggtcacacagctgaaacacggcagggttttacatgactttgaaatgaagtacatctagttgtaaagtgtgtcctctgggccgcgtgcagtggctcatgcctataatcctagcacttggggaggctgaagtggcaggattgcttgaggctagaagcttgaaaccagcctggccaaatgagaccccgtctctacaaaaattaaaattaaaactaaaaaaagaaagtatgttctctgtctacaccacactttcttctgctgcacagcatacacatctgtgttctgaaggatattagagcaatatcaaagaatggcacttctatatgatcattagaaaaactgtaatatctttgcattaaatacagtcttttcaattttccttgcaaagacacagcatcagtttggatgagttcatctgaaatgtattgccaaggcttgcctgctgggggattttgcaaaataaatctccctacttacaaaagtgtgcktctcatgtgccagttcccatgtatctgaggttatcctcctcgacactgttatcttcccttttttcccttctttcctttggattggcagagagctaggactgttgtcactgctctctgcttccctgtctctttaatgccatggtgttttgggctggagctttgatccattctggcactgtgttttcacacagctcaagggctataaactgtcctcatagggggtcgttttcttggagactgagcaatctctcggggaggccaatcacaacattttcttacatatggaattattagatgagcaaataagtagcgatacatcatctgagcaggcatttaagcctaagattccrcgtttttgggtatccttatagcagcaccccagtctctgtggtacaaatttactgtattagtcttttctcatactgctaataaagacatacctgagactgggtaatttataaaggaaagaggtttaattgactcatgttcagaatggatgatgaggcctcaggaagcttataatcatggcagaaggagacattccttgggattttataaacctagaggatgggtaaggacccagactgcttccagagattcatttgaggtctgatataatttggctgtgtctccacccaaatctcatcttgaattgtagttcccataatccccacatgttgtgggagggcaggtggacataactgaatcatggcagcggttcccccccatcctgttcttgtgatagtgagttctcatgagatctgatggttttataaggggcttcccccttcatggggcactcattttccttgatgccaccatgtgaaaaaggacatgtttgcttccccttccgccatgattataagattcctgaggcctcctcagctatgctgaacacgagtcgattaaacctcttccttttataaattacccagtctcaggtatgtctttattagcagtatgagaatggactaatacagtaaatttgtaccacagagagtggggtgctgctataaggatacccaaaaatgtggaaaccactttggaactgggtaacaggcagaggctggagcaatttggagggctcagaagaagacagtaaaatgtgggaaagtttggaacttcttagagacttggagggctcagaagacaggaaggtgtgggaaagtgtggaacttcctagagacttgttgaatgactttgtccaaaatgctgatagcagcatggacaataaagtccaggctgaggtggtctcagatggaaacgaggaacttgttgggaactggagcaaaagtcactcttgttaygctttatcaaagagactggcggcattttgcccctgccctagagatctgtggaactttgaacttgagagaggtgatttagggtatctggtggtagaagtttctaagcagcaaagcattcaagaggaagcagaccataaaagtttggaaaatgtgcagcctgacaatgtgatagaaaagaaaaacttattttctggggagaaattcaagcccactgcagaaatttgcataagtaacaaagagccaaatgttaatcaccaagacagtggcgaaaatgtctccagggcatatcagagacattctcagcagcccctcccatcacaggcctggagacctaggagggaaaaatgcttttgtgggctaggcccagggcccacatgcrctatgcagcctcgggacatggtgcccccctgcctcccagttgctgcagctccagctgtggctaaaagggtccagtgtaaaggtcaggccattgcttcagagagtacaagccccaagccttggcagcttacacgtggtgttgggcctgtgggtacatagcggtcaagaattgaggtttgggaacctctgcctagatttcagaggatgtacagaggcacctggatgtccaggcagaacgatgctgcaggggcagagccctcatagagaacctctgctagggcagtgcagaagggaaatttggggttgaagcccccacacagagtccccactggggcactgcctagtagagctgtgggaaaagggtccttcacactccagagtggtggaaccaccaatggcttgcaccgtgcacctggaaaagcagcagacactcaatgccagtctgtgaaggcagctgggagggaggctgtaccctgcaaagccataggggcggagctgcccaaggccatgagagcccacctcttgcatcagcatgccctggatgtgaaacatggagtcaaaggagatcattttggaactttaagatttaatgattgccctattggatttcagacttgcatggggcctgtagcccctttgttttggccaatttatcccatttggaatgggtttatttatccaatggctgtaccttcattgtatgtaagaagtaactaacttgattttgattttgtgggctcatgggcagaggggacttgctttgtatcagatgagactttggacttcacttttgagctaacgctggaatgagttaagactgagggactgttgggagggcatgattgtgttttgaattgtgaagacatatgatttgggaggggccagcagtgggatgttatggtttggctcatcttaaattgtagttccaaatctcatcttgaattgtagttcccataatcctgacgtgtcatgggaggcacctggtggagataattgaatcatgggggatggtttctcctatcctgttctcgtgatagtgagttagttctcacaaaatctgatgcttttataaggggcttgccccttcactgggcactcattcttctccttgatgccactgccttgtgaagaaggacatgtttggttccccttctgccatggttgtaagtttcctgaggcctcctcagctatgctgaatgtaaatcaattaaacctctttcttttataaattacccagtcttgggtgtctttattagcagcatgagaacagactaatacaaggtcttcagtaacccctgacagcaggatgttggccaataaatataaaaagtgggattggtagaaattgctgattgcaaccaaatatccattctcttctttcttaattactggtcctgttttattcagtgacccatgtgcctagttatggtgaatgagaggtaagcagaaatgtgtggggcttccagggaggttttgaaaaggaacccgattcaattggaagtagggccctggttcttcacctgccctgcctcatgccacctcctttgaatgtgacattatggctagagctccaccagccttttttgtcttgtgagggaagatggtggtacctgagattagaaattagttaacacatagaaggatcagtcagatacataactgcattcaggctagtgggagccaggtttcccagtgtcaaagaagagagttattaatacagaaatgcagaaaactggaatgaatcctgtgatatgctttgggttgtgtgtgtttgtgtgaattcatggttttcaataagtgtagacagatatagaagtgaacatagatgtaaaggtgtaaagaagtgaatgtaagtgtgcgtgtgtgtatgtttatatgtggatacaggcatatattctgctggcgcaggggttgtggacagatgcagcccaaagacagcacaccctgcacccagatcttggcatctaaataccatttgctacaagagaacaagagctccttggagagagggctgatgccagggctgggacagggaaagtctaagatgagcctggaacatcttgaaccagaaagcaatggaataatgaggaagatgggccaaggggacagagaagcttgctggaattcaccccatctgtccaaaaggggacaatgtaagcatcaaaagaaataatgatagcattgaatataataggaaaccataagtccatgtagatacaaataaataaatgaacaagtggcaggtttgatggtgaatgagatgttgcatggtttcaaaatccctcttcataaaatgcttaactataaagggcaaaagagtaacttctctgtggagaagcctggcagtcaccaccttaagtgatcagagtgaatgtcatcaataatggagcaagttgaaatcatatggtgtctgataggaggcagtgagaagaacatagcatcatttcggaaagattcctgctcaagatataccatccgaatctaatcaggagacagcatcagacaaaaccaaattcagggacattcaaccaaatcaatggcctgcaatctttaaaggatcgtgaatgccaaagacaggcaggaattgttccagatggaaggaggctaaaggacatagctacatgcaattgggattgtgcactgggcccttttgctgtaaagcacgttatcaggacagttggaaaaagttcaaactgtctgcgagaaggtggtaaacttagtcacaaatgctgatgccctgatgtcacaggttgtagtgtagtgagatcagatgtctttgtgggaaacagacatgactgtgttcagggataaagggcatcaggttggcaactaaccagtggtttactccctgagcagacacttcttaaatacctaccacacccagttaccagggctgagagccgaggagcatgagttgctggtgcccgggcccccagggatctggtaaaggggacctcggcagccgcaaggccaggggcaaagggcagcagtgtcccagggtcagttctgcctctagggctcacggtgagagacatggtaccagaaggatggtgtttgaagtaacctggaagcacaaggaggattttgccaggcagagtgctgaggagtgaagagtgtgaagggcctgaaaggcagtagcaaccgagaaagcaaagaaagtaccacaggcagtgtgaggcatggctgagcggcaactggcctttgtgagcacgtgaagacatttggattggccctctggacttatccactgctgaggaacaaatcacccccaaaattagtgactgaaaacaacaaaaattatcccacagtttctgtggctcaggatctaagagtggcttagctgtgtgattctgacttgggtctgtcacaggctgcactcaggtgctggctgcactgtggccttctccaggcttgacttggggagacctggagctcacttccctgacagctggcatgccttgrtcctttctgactgttggtggagacctcacttcttctctacgtggcatctccatggaaatgctcatagcatggcagctggcttccttcacagtaggggatctgagagcggmagagagctcccaggacagaagccgcagtctttttataactgaatcccatcacttcctctggattgtgtttgttggctgtcagtcactaaacccatgcttggaggggcaggaatcacacagggacagggatgccaggcatgggcttggtgggtgccatgtgagagtctgcttgccacacagaagtccccacagctggacaggcaggggcacatccaggcatgcatgttggaggtatcactctagctctgagggggagcagcagtgaaactatttgggagaggatcacagaggacagaattgagtggggaagaagaaatgggcgtcatcatcaacgtaaaacactgctcaagcagctggggaggaaaggggggttaacctgagtggttagaaaccagcttctgcagagatgcttttgcagaatccytttgctgtgaaagctacaaggcagcgacctcgtttcaaacacctggtgtcaccagcaccacgttttaaagttgtgaaatatcagggctgttattttttcagttatgtctcgtaagcactactttgccttgactgtcaggagtcagatgtgcaaatgaaagctgttaacgttgtcaggtaggttgactggaccaggctttaaaataccaactaatcccttttgacactctgatctttcagcatgatggttaaaggattgtgtctttccttttgaaatctcccagttttttgaactctgatctgagcacaaattattttaaagaatgaagttttccctgagattttagatttttcatctcaccaagccgctctaaacaagacgaaccgtgaattcttagagtagagccacatacgcagtgggaacaaggtcaaagattgggaaggaggcggcggccatcccctgtgaaatactacagggagagcataccaggtctgtatcacaacaggcttttccttgcatcattgtgcttgaagttaaaaacaaacatcacaacctccctttaaacctgtatgttccctgggaatagtagcggtctggagtgtggttaaaatgctgtttctggaagggtgacctgggccttgggcttccctcccccataaaggcctggcttctgctgggttcaggcccagcccccccgccccctgcccggggcatagagcactcagagctgggtactgcatgatgctggtgacaccaggtgttgaaagtaaaaaatgtaatttatttccacacttttcaaatggccattcctgtggcttaatatttgtacttcggtcgaccttgaatcatgaaagtaaaaacataatgctcttagaaaatgtgtactcagcgttatttaggcaacagtctcgtagttaaatagaatgataagaaatttaaagggtgaatgtgtactaaacttggaagggctacctgttagttattctaaggctttttgtattatcttcattttcacatattttgttttcctttttgtataacttggataatttttttaaaaaagatgtttatacaaatcttcaatctttaatacttggaaaattagctcttctggttctttgaacttgccatgtaggtgaaggttgaatgtaagtcttttttaggaaaacctgtgaaaatgaaggagtgccccttctctgtttttaaagtatacagagcatcatgaatcctctttaatctaaaagttagtagttcgagagcatcactgtaaaacagatagacccttcccacaatcaatgattttcccaaagggtaatcaccagaatcgcctggagagctttgaaaaatactgtattttatttgaaatgtagattcctgcccccagctcctaaattactaaatccaactctcttgcgagggacctagaacatcagcgttgaagcttcacatgcattttgggaactcaacaggcgtggggagccccagccgcaggtccagcccagggtggccacaggcaccgagactgccccaggcttccctccacccagtccctgtcttttggttcccagtagcccacaggcccccaggggttccaaatctctgttccctgcacacgcctgggctcacgctccttgcctggaaggcacccacctcctcctttcccctctttccagcatggtttttaccctcctccaggggcagtgcccaacctgttgggggctgcatccaagtcacccacacaaaattcattcttctctttcctgttccttatgacatgctgaacaaacccttcactgtggcattccacacatcatattctaatagtagattttatctgtatcatcttttaaagtttagtttaattaattaatgtaaagacagggtcttaactgtgttgctcaggctggactcaaactcctaggctcaagtgatcctcctaccttggcctcccgagtagccaggactacaagcatgtgccaccatgcccagcttggaccactttaaaagatttatttacttttaatttagaggtttttttattgagataaaattcacagaacagaaaaccatttaaaagtgaaggattccatgattatttagtacataatgttatgtgattacaacttctgtctagttccagaacattttcctcaccccaaaagaaagaaacctcttccacactaagcatccctcccattcttccatcccgagcccctggcagcccccatccccctacctgtcactgtggctttacccgtgctgggtgttctggatcagtggatgcatgtcacatgtgccccatgtgtctggcccctctgagtgaggataatatttgcagattgatcgtggggcagcatccatcagtgcattcattcactagggttgctacaaccaagtgccacagaccgggtggcttcaacaacagaactttctcacagttctagtggttcagaagtccaagatcaggggccggcagggttggtttctctggaagcctctgcttggcttgatttatataagtaagattgtgtggagtctgcttgcaattcaaggcaagtaacgctttgacttgctttcttttttagcacatggcagtgggggcccaggcaggggaacgggagctctttttttggggttgttaggagtttgaactctggagtcaagaaaccacccaagtttaaggctgtgccttttcttttttcttttcttttttttctttttttttttttgagacattgtctcgctgtgttgcccaggctggagtgcagtcgcgtgatctcagctcactgcaacctccgcctcctgggttcaagtgattctcgtgcctcagcctcccaagtagctgggattaccggcatgcaccaccatgcctggctaatttttgtatttttagtagagacggggttttactatgttggctgggctggtctcaaactcgtgacctcaggtgatctgcctgccttggcctcccaaagtgttggaattacaggcgtgagccaccacacctggcctcatgtgcctctcttaccagtggtgtgactttgggtgagttgcctgtgctgtctgtcccagtgtcctctgagtgctgtgaaggtgggtgaagtatatttrgtgaatcacaggtactgcgtgaggtgccaggcatgatccttgctggtgccaggtttgaagaaaatggtgtttgtgcaaggaaaaatttttttttctgtgcaaaactaaggtgtatttatgaaaatggaaatcaagtcttagcccttcaccgagcttagttgtagagaatatctagggtagtttctgtcggggtccacacaggcagtggacaggggcttgccgttttatagaagaataaaatttcacaacttctgtgtacttccagtaatttgagctttaggttgaagcttgcraggtaggcaaggtaagagtttctgtccctatttagaggcacctaaaccccagtgaggcaaagtgagtcacccaggagctgcctggaatctggtcctttcgaacccactgttgggcacagcctcctccggggcatgcagactctgcygcatgacctttgagcagagttaatgatttcctatttgttttatttcattcaaaacaactgtcattgcttgaacccacccatgctgggcacttgtatactcccaggggatcccactcccccactctgggaagtgccagggtctcactggacagagaaggagatccaggatgagaggttcagtcatttgccaaggtcgtgagccccagccccccactgagcagcacctctgcccctccagggtcctgggttggaggtgtgaagggcatcccrggccctcccactgctgggttcttctaagtacaggaatgtctgctgcacacatcttctgaagatagcattctcttgatctgagaagggaaccagtaccacttgctgggtgtttagccagcactgcacatttcagaatctcatcctggtgttaatagccccaggtaagacaaggccacatgtccaggaaagccttctgtgggaagacactgcattaagatagctcaaaatcggggtgaagaggcaggaggcagggcttaccatcttcatccatcaactattaactttatgatagaaaccatttcagtgttatttttgtttgctatggatctatacagaattgcattattttaatgctttattgagaaataattcacataccatacagttcaccaccattaccaagtcagatgtaagcagctctctggggctgttcctaatatggaagtgttgcttataccagaaaatgataaccaaaatgaaatataacacaacgttcaaggaaagcttgtagataatcattggtaaaataatagcaatggagctggaaatactgaaatggagaggttaaaatgcccggggcgggggtattgctgcttgatgagacttaggagggcgtagccacaagcttcaccatgaatgtagtcaggagccgggggaagaggcacgtgttcctgggctgtgtggatgagtggtctaggaggcgtgcttgtgatgaaatgacagcccaccagccmactatcccaggccctggaggagatgcggggtgcgcagcctgggctgtcagagatgttcacaattgcaaagattctgacccatattttgccccacacatccgtcttgctagagcatgtgtcctggttctttagaaaatcactccgttgtactttaggacaccatgtcctaggaacacactgacaccaaaaaccttggccaagagtcagaaaaacaaagctagattatgtgagggaatggaaatgtccagaataaaacctggggaggctaaagggatcgcgtggagctcagtgacagcagagctgcaaagctgcaaccctcctcagccaggagtggccccagtgaaagcaatggatacaagcccacagggcacgttcccagcgcagccctcagggcctgggagggccacacagctcccacggatgctcactccctgtccattccctgttggccctggaagtagacttgagttaagctcctgggtaaagggctaagaagggagaatatgaagagacttctagccatattcactcaaataggagagaggaacagacgggcctgtgtggcaaagaagaaaaggcttaatgtttatggagcagcaacacgctgcagaaaagcgagtcagatcctgggggatcaaaggactttgttcagatgctgctgttgaggaagggcttctccccaaaataattcagcttttttgatttacagacaaaatttactcacttactgtttaaagttcagtgcgtttttttaaagggtcaacgaatcttgataaatatatatactcatgtaatcacgaccgcattcaagatacaggcctgtccatctccccaaaagcttcctgcggcctctttgcagtcagtctccctccccagtaacagccctttgcagcctctgctctgcccccatggcttggcttttcctggatctacccggatctaatggaatcatacgggatgtagtctttggcgtctggcttctttgactcagctcatgtgtttgagatttatgcatgttattgtatctgtacacctcagtttgtttaagcattctcaagttgatggacatttgggttctttctagttattggctgttaaactggtatacataactgaattacatgtaacacaaaatctttttaacagctagatttctttttttaagactttcctatcagccggctgtggtatctcatgcctgtaatcccagcagtttgggaggccaaggcaggtggatcacttgaggtcaggagttggagaccagcctggccaacatggtgaaaccccatctctactaaaaatacaaaaattagccaggtgtggtggcacacacctgtaattccagctactcaggaggctgaggcaggagaattgcttgaacccaggaggcagaggttgcagtgagccgagatgttgccactgcaccccagcctcggcgaccgagcaagactctgtctcaaaaataaataaaaataaaatgtacaggtcgggcacggtggctcacgcctgtaatcccagcacattgggaggccgaggggggtagatcacctgaggtcaggagatgaagaccagcctgggmaacatggtgaaaccctattctactaaaaatacaaaaattagctggacatggtggcacatgcctgtaatcccagctrctcgagaggctgaggcaggagaatcgcttgagccagggaggcggaggttgcagtgagccaagattgtgtcattgcactccagcctgggcaacagatgagactccgtctcaaaaatgaattaatgaatgaataaattaataagtaaaataaaatgtatagtccagtggttttttgggatgttgtgcagagctgcatttaccatcatcagagctgtgctctgactcataaaatggatcaccgtggtgggtttagaacactttcatcatccattaaagaaactccataaccattagtggtcattccctatttctctcctcctccatcctccacacccaccacccctacaccccaattccaggcaattacttgtttttgtttctgtatgtttgcctattctggagatttttcttttatttttttaactcctctcatctaactgtgaatgtgtgctctctgaccaacctctctccatcccctctccccctagctacctcagcctctgataaccaccattctgctcctaggaggtcaggtttttcagattccatatgtgagcaggaacatgcagtatctgtctttctaygcctggcttatttcatttcacatagcatcctccagtcatgtacaggtctttatgtggatatatgagttcatttatcttgggtctattccccaaagtgaaattgctgggttgtatggtaaatgtatgtttaactttaaagacactgtcaaactgctttccagagttgctgtaccattttgaattcccagaagcaatgtatgagcatttcagttactctacatcttgccaacacttggtattaatagtcttcaatgttagccactctaatggtatctctttgtggtttttatttgcatttccctaataactaatgatagtgagcatccatctgttcatgtgcttacatgagattcataggtctttggtaaagtgtcagtttaaatcttttgcacattttgtttgtttggttttggtttttttggagaggtagtcttgctgtgtttcccaggctggtctctaactcctgggctcaagcagtcctcctgcctcagcctcccaaagaggactgcagcacctggctgttttgcccacttttttttttttttttttgagatggagtttttcgttcctcttgcccaggctggagcgcagtggcacaatctcagctcactgcaacctccgcctcctgggttcaagtgattctcctgcctcagcctcgagagtagctgggattacaggcatgtgccaccatatccggctaattttgtatttctagtagagactgggtttctccatgttggtcaggctggtctcaaactcccgacaggtgatccgccygcctcggcctcccaaagtgctgggattacaggtatgagccaccgtgcccagcctttgttttgcctacttttaattggattgtttttcttcttcttgaggtgtgagagttctttgtatattctggataacagtcctttatcagatagctattttgtagatattttctctgtctacatttgccttttcatttactcacccgagtcttttgagagtaggtgttttaaattctgaagtcaaaacttattcatgttttcttttattatttgtgctttttgtgtcctatcaaaagatttctagaaagtttaactcttatatttggatacattttgagttaattagtgtatagggagtgagataagaggtttttaaaaatctattttttttgcatatggatatgcagttgttccagcaccattcgtttaaaagtctatagattccccattgaattactttggcatctttattgaaaacagttgaccctacaagtaggggtctacttctggactctgttctgtaccattgatttttttaactagtttttgttttttaattgaagtaattcacacaacataaaagtcaccactttaaagtatacaagtaagtgggtcttagtatattcacaaagttgtgcagcccgcaccactaattccatatcacgttatctcaaaaagaatgttccatcaaccttaatgcatatcttttctctaattccacactgtctygtttattgtaactttgtagttaagtattgaaatagaaacttcgggctgggcatggtggctaaagcctgtaatcccagcactttaggaggccaagtctggcagatcacttaaggctaggagtttgagaccagtctggccaacatggcaaaaccccatctctactaaaaatagaaaaacattaccaggcgtggtggtgtatgcttgtagtcccagctgcttgggaggctgaggcatgagaatcgcttgaacctgggaggtggaggttgcagtgagccaagattgcagtgagccaagattgcatcactgcactccagcctgggcaacagagcaagactccacctcaaaaaaaagagaaactttgttcagctttttcagtgttgttttggctattctagatccttcaaatgtttatataagttttattttttaatttttgtgggtacatattagatgtgtatatttatgggttacatgagatgctttgatacaagcatgcaatatgaaatacgcacatcatggagaatgggttatccatgccctcaagcatttatcctttgagttataaacaatccagttacactctttaagttaccttttatataaattttagaattagctcatcaatttctacaaaaaaaaaacccctgggattttcattaagattgtgttgaatgtctamctcaatttggggagaattaacatttttactgtgaaaattatccatcaaaacatggtatatctctccayttatttagatactaaaattctctcatcagtgtttggaattttcagtgcacaggtcttgcacatattttgttcaaacaattggaccctaagtatttcagattttttggtgatactataaatgataatggatttttaaatttcaagttccagttttcccctgytagaatatacaaatacaattgatttttgtatattggccttatatcctaaaaccttgctaacctcattagttctagtaaccttttggtagattttcttaggattttctgtactgacagttatgttaactgcaaaaaagatagttttctttctktctgaagtgtatgccttttatttctttttcttcctttattagcctggctagaacctcgaggatttagaagtaggaagagtggacrtccttgccttgcatccagtctcaagggaaagtacttgattattcactacaaagagaaggatgttagccataggtttttcagagacttaacctttttagtagatcgaggatgtcctctttgatttccagtttgctaggaatttttatctcaaatttgctgaattttatcaagtgcttaccctgtatttattgagatcgtcatgtggtttttccattttaatctgtttctatggcatggcaattcattgactgatttttaaatattaaactacgttgcattcctaggatgaaacattagtaatgatgtattatccttttaacatattgttgaattttgttagtatttgttcaagactcttacatttatgtttatgatggacagtggcctgtaattttttcttttctttttctttttttattttttgagacagcgtctctctctcttgcccgggctggtctttaactgctggcagatgatcctcctgcctctgtctcccaaagtgctaggattacaggtgtgagccaccatacccagatttttttctttttaaaaaaaacctgagatggggtctcactctgtcacgcaggctggagtacaatggcacaatcacagctcactgcagcctcgacctcctgggctcaggtgatcctaccacctcagcctcccaagtagctgagactgactacaggcatgcaccaccatgcccacctaattttttgtattttttgtacagacagggttttgctgtgttgcccaggctggtctgaaactcctggactccagcagtccacctgctttggcctcccaaagtgctgggattacaggcatgagttaccatgcctggctgtaattttcttttctaccaatgtctttgatttggtatcaggtactactggcttcataaaaggagttgagaagtgctcctccctctttgattttctggaaaattgtttggtatttattggaaaacattggtattatttcttccttaagtgttcaatagatttcaccaatgaagccatctgcctctgggcaagggtttttaactgtgagtagatacagggctttgcaggttatctacttcttcttgagtgagctttgatacttgagaccttttgaggaatttttccatttcagttaagttgtagaatttattggtataatgttgttcattatgttcccttattatccttttaacgtttgttttatagtgatgttccctccttgatttcttatactgatgatttcttttctctctctctcgtttacctataaaagtaatagagcagtacaatgattctcatatatccatcacccagtttcaataactatcgagcctttgcacacatgccttatcaattccctcttttctttgatatgctgacatattttaaagtatgttccagacgtgatattttcaaatgctagatacttccatatgcgtctctgaaaaaataaggatattttcttacaggaccacaatgccattaccataccttaaaatattaatcgtgattccttggtagactcttattacctagatttacctgtaagattttcctaagtgtctcaaaaatgtcattgtgtataggtcatatcttcaaatcagaatccaaacaaggtctgtacatttacccatggctgtacctgaaatcgttaatgtaagggaaatcaccctcactttttctaatgcaataaactgtcttataatcatttctcccctaaaatgcctcacattctggatctgtctgcttctagttggtatcatttaacttttctgcaataggagttttttcaatctgagaggactaaatgatgacttggaactttctgaacccctgagaaatgtaccttggctttcatcccctgggggaacataaaggaagggtgggcaactgtccatctcaagacctgggaaatatctggtttctgtgtccagttcargccaggcaatgtccatgaagcctttgawctccatcacctctgaattccacttaattatgtgtagtactaactatatgtagtaattaattatgtatctttgttcattgtgtttcctttgtgtagctctggcccttgaaaaatctgtcctctactgttaatctttgtttttaargcttagtgtacattttatgaaagtataccatacgttagaagagtgcaagattcctgtggacacactgtgtacctggcccctggcacagaggttcattttggctgttactaccttttttttttttttttttgagatggagtctcgcttcgtcacccccgctggagtgcagtggcgcgatcttggctcactgcaacctctgcttcactggtgcaagcgattcttctgcctcaacttcccaagtagctgggactacaggtgcacaccaccacgcctagctaatttttgtatttttagtagagatgagctttcacattattggccaggctggtcccgaactcctgacctcatgatccagctggctaagcctcccaaagtgccaggattacaggcgtgagccaccatgcccggcctgctacttctttaccttcaggtaaacttgtcctgcagtgtgtgcccttgtctggccgctctcaggtggtgctgctcatggtgaatgccatcgtgttgctgcccctattcattcttgttgccatagagtatcccaggtataccacagttgactggcccatttgactgttggtggacatttcagttgtgtctgctttggggatatgacacctggtgctgaccagcacattcccattcttgccattttggtgaacctgcattcacatttttgcctgcatctgcctgggagtggaattgccggtccttggggacacacagkctcagctttcctaaaactgccacgcagtcttccctggggattcactgcacaatattttaaaacccagatcttrccatgcacctcccaggcgtagtgccctcgaacggctctcatcacacagaagccgaaatctgactccataagataccatggaaggcccttggaggcccgggccctgcctcgccctgcctgctggcatgctttctgttcccccaacagcccaccgtcccctctgctcaggtccccctcccctccccagccacccgccacctggcctgcctgctcctgggtatccccagaggctctactgcttgcctgggtcgccctctcctgcaggacacttgacacctggtcctgatgcgggactcattgtccccactctagagtgtcctctcatcagcagcactcagcatctctgccaccccaccaggctgcagctttttacgaacaaggactgttgctttttctgtctttggatgcctggcccgtcctagatgctcagtacctcctgaatgagtgaatgaatgaatggcctgtcagccagcctggacgtcctgagcactgggcagatgatcttaacagaaacattaagtggctggcaggcactcctggccttagaaaacctttacatctagctttggtttttaaagttggaaagaaaaggactcaaagcacagccccttgcacaggaacaataggtggggattgataacaaggctcacgacaggtcaccgtcttgacatctcagaatggttgtgtttgctgggagaaccagctagagcttcagtctcttcttcaacagagaacttccccgtctgtttctcctagttgaccacagagtatgttggggggtggcgtgtagattttggatcaatccctggcttaaatccagcccataacagctttgctgtgtcagttaaataactcttctgagcctcagtttcccatgtgtgggatgggacagtaacacctgcctcgtcacggggctgttggaggcccagtttgtgaattcctcatttccccaggagagaacaaaatcagttcctggagagcccctgacagcccccatccattgaattttcttcttctctcctggggaaattagaaattcacagggcaagtttccaccaggctttgccttcctgagagatctggcctggaccacactcaaagcttgccctgcacatggctgggagaagggtcaagggcccctcaggtgcgggtggctgtagagccagcatggtctggagggagtgtgcccacagggagctaccccagccaggcagcacctcctttccttctggggtgctaggccaggggaggaggtatagcctacctctttgtactggtcttgccccctctgagagacagagacctgctccctagggaattgcctttagatgggggcaaagggaagggagagaaattccttaacctgaaaataagtataatcattgttatattaaaacaacgccaaatttgcatgaattttaaagaaaaaccctgtacatcgaagggatgggagcaccttctttgggcagctgtgccccgttcctcagcccttctctgcctgggcacaggtgccccctggacagcacagcctgggggtcctggattttaggggacccactcaaagggccaataaagggttgaacacttttaaggtgcttcaactaggagtttagctaccccttagctattttgtggttactgaagcatggcccccaggagaaatccctttttccttcttttctgkgaagttcctgggagccgaggggaagtctgttaataccagttctggcaggtgggaagaggctagtggcctcctcaccttgccacgggcgctggtccctccctggggaaaaggttttcttggcttggacagcttaggggcagagaggagaacatccttggttttatcctgtctgtgtatatatacattatgggtttttgttttttttttgagacagagtctcgctctgtcgcccaggctggagtgcagtggcgtgatctcggctcactgcaagctccacctcccggattcatgccmttctcctgcctcagcctcccgagtagctgggaccacaggcgcccgccaccacacccggctaattttttgtacttttagtagagatggggtttcactatgttagccaggatgatctcaatctcctgatctcatgatccacccgcctcggcctcccaaagtgctggaattacaggcatgagccaccgcgcycggccttgttgttttttaattargaaagtagttttggatgagagaaatgataaaacttttatatactcctcccaaaaaagttaaatgcctcacatgtgtgagctgttcaattcagaaaatggctgagtaaacatgattttaacttcatgactgaaagaacactgtaaatttggggagaaaaaacaacaactccataatgaaaaacaaagcggctgttctgctgtttctgaagcgagtggattggagaaagcgcctcagtgggaggagccgcctctctccctaataaccacacagcaacagctggggctttgcacgttctctcggggcattccactgtctcgggagtggcctgtgcgtgggcctttaagtgctttttcaaaagccaagtatatacccaaatgtgcttttaaataatgtctagggtcctgggttccacccccaacactggggaggccaaggagttgtaaacccaaasactggcgtgtttggctgcagcctggcctggcttttgtcrgcggtttctggctataatggtgcttttaaaagtggtgtgtgtgtgtgtgtgtgtgtgtgtgtgtgtgtgtgtgtgtagagtataatcggctcggatttaattcattcagcgcatccagtttccttagaagggccagtggtgtgtgtgtgtgtgtgtgtgtgtgtgtgtgtgtgtgtgtgtgtgtgtgtgtgtgtagagtataatcggctcggatttaattcattcagcgcatccagtttccttagaagggccagtccctccagctcaatgcctttttctggaagttttggcctcagaattcaggctgtccggccagcacacagtggccggccgtgcgttcacgttcaggactcacaggaatgtggcagatggacccactctgtgcaggggctgtagaagctcgctcagggacacatgccgaattgccttccccgctcccttcttccttgtagttgagtcttaacttcgctctcagccattttaattgaatttaacttggggtaattatacaagcactgaaaggatttgaatgctttgggaacaagataatttatacaaaaaaacttaatcaggcttaattttgaattctatgcttttatctttaaaaatgtttatttttttcaaatgtgtgaaaatggcattgtgtgtatgtgctcatgtgtgttggggatgaggtctcatctccttgggtgcactgacgtaagcaatggacttttctagagttgctttcctttcttttatctgccacctctggctatatgatctccaggtagttagcatctttttggagggtttaaactggttttaataatattcttagcgaaaggtgatgctgaaggcaaacctgttattactaccaaaacgagtcctgccttacagagcccactggaggcggagtctggctgggccctgacccagctccctgccgctggcacaagagaccagctagctatgatacaacttgttgcccagttttcaatggccagttgggttccttttagctcctgatttcatgtttctgggcagtgggatatagggccctgcctggcagtgccaaccagcagcgagccctggattagaatggcgctgtgctggtttgaagtggacagacgagcaggtagggccacatgggtggctgttgatttatttatttattgagacggagtttcactcgttgcccaggctggagtgcaatggcacaatctcggctcactgcaacctccgcctcccaggttcaagtgatcttcctgcctcagcctcctggtgtagctaggattacaggcacccaccacatctggctaattttgtttttagtagagacagggcttcaccatgtttggctggtctcgaactcctgacctcaggtgaaccacccgcctcagcctgccaaagtgctaggattacagccgcgagcccttgctcctggtccatgggtggtggtttctaagctgcgctcagcctccacgcgtagtggaggtggcattcctagggattttaaatttgacatcttgcagttgtatttggtggttatctttgaaagtattctctgaaatactttgactaattcatgctgatgcatttattctgctccacaatgttgggtggtggcctccctggttggctctcctgtggaccctgtgtcccctggatgtgcctgcagtctatcccaccctgttgtggctttgccttgcttggcctgggccaggaaggcctcttcccagatgtttgacaggagtgtggctttgacctctgtttatcagctctcggttcttacatttttttaattttaaactttaagggcacaagataattgttcctgtttatggggatctcactatttttgtacccactgtgtgcagtccctctccaggggacttgatcctcccaaagcaaccagatggctaagctgctaaatacagggcgcgctggcccaagcctcgccaggggcctcacctgtatctttaatttgtatttcttcacttttaagtaggtttaacttcctattcttacatattctcatccttctagaatattctgtcagcaaaccacctagagaagagaatgactgtgatattttgtaattgttttgtgcttcttctaacttaaagttggattctctatttctcacttaagaaggcaaaacagtaatataaaactatgttcatcaatacaaccttaagatgtttctaaaaaacaaaacactaatatatattttattcctgtttcaaactcaaagtatttctagcccaaaggttccaaatgaaaagcagccatgctctagaaaaatgaacagcagaaaggcacaggtggcattcccaggcctcccttgccttctgccggagttgaaacaatccagacctttgggagcacacaaggtagacgagaagttgcctgccatcagccagacctgggtgtcctatttaacaagtggagagcgggctgggacaagccacagattcttggcttttcccggctgcccggggttttgctgccccaggcagaataaacatattttgagcaactgccagcgtgtgattgctgcaccgtcttccagcaggcctggaaaaatactctaaaaggcaaaccgtttgctgtgtttcttcgtgggaactcactgcttagtcaacagctggtgtgcatggggcctgggtgggcagagaaggccctggtctccaccccagtgcccaggcctgcagggattacggccatctcatgcctctgggcctgctcgaccttgaccctgctgccaagagatgtctcgttcttgtcctgttttattgaatgtctccagaaagcaagtgagtgtaagggaagccagcacaaatctgtagaaatgctttggacagacttgggtacttgtggaaaccctaaagaaaagatgaggagcttcagcttctgattcggggctatgaagcctgctgagctccgacaagaacgcacacgagtgacagtaagcgcagaycaggcctgcgcggggcctgcctgcctcccgtgagctcattcagtcttgtttttagattaccttttttgaggtataatttacatacaacaaaatccacagattaagtgcacagataggtcaatgattttgacaaatgtatcccccatggaaccgctgcccaatcagtataaggagcatttccatctccccagagggccctgtgtctgcggcagcaagtaccccaccccctctggtctgggtgctgtcccgggaggtgagttttgcaggttcattgtcagtggctgtgatgggggctgattacatcccgcctggctactctgcacgtcctgcttctgccctgctcccgggcctggtctgagggtctggagacctggttgtcttgtgggaaggaagaggtggcagagccggcactgaatccagggcctatgaatgtgcccccagggctatgtttgaacctgtagggtttgagagacaaggagaacttgaaggattcccaacagcctgaaggcccatcgtgcctctttgggaatctgggctgagtgggatggccccttggcttcctgcagtatttatgaagtgcctactgcatgcgccgggccgtgccagatgacgtaggggggtgaaaggaagagaaggcgagacctcgccctcgaggagctgtggtttagaggcatgaggatgggccatgcgactcccttgctcgaaaagcaagaaaaggtgcagtcgagagacctagaagaggcggcagccctttcctctgctgactcgcagctcagcctcgcaacttggcatggagggttttagttgttaaaaactaaacattattttattacatattccatatttgttattatttattcagagacagggtctcactmtgaggcccatgctgcagtggtgagatcatggcttattgtggccttgacttcctgggctcaagcgatccccccacctcagcctcccaaaatgctgggattacaggcatgagccaccgcacccagtctatttccttattacaaaattctcagcatggagtttttcattcatctttatgttgtacaatatcagttttaagtttcagtgcatttaactcgtggaatcacagaaatgacagttttcataacttacacatgcgtatttctttttttttttttttttttttttgagacagagtcttgccctgtcgcccaggctggagtgcagtggcgccatctcggcttactgcaagctccgcctaccgggttcacgccattcccctgcctcagcctcccgagtagctgggactataggcgcccgccaccatgcccggctaattttttttgtatttttagtagagatgcggtttcaccatgttagctaggatagtctcgatctcctgtcctcgtgatccacccgcctcggcctcccaaagtgctggcattacaggcgtgagccactgtgcccggccatctatttcattcttatcagaaagttaactgagctgtttttcacctcttgaggtgcacatattctatcaacactgtctgccttcacctactgatgatggaggaaaagagggggaaaggcactctgggtggcccagcaggttgccctggctttctgtgtcattttccgagtatgtggttggctgacgcatgtgtaggaagggacatgatggggcctttggtgtctgaattctccgaacccttacttccttctgtagggggaacaggttctgcttgcaatgggaagtgcagcagctcacccaagcttcaccctaatgccagaaagccccacaccctgggtctaccacgatcccacactcctgggctctccactcacaggagtgctgtgttattccagcaggcttcgctttgcttacaaaatacaaagacaaaatcgggaatttcaggatagtggcagcttctgagtgccagttccatggcacatgccaggcaggcaggcagcccagggtgtgcttaataaaccctgagggcaccttctagattcaggaggccacggcagatgtgactggagcctggtatgagggcagcccaggccactggctgcctggggccctggagtgcttgggggcagtgagggggtgccctcctccaggggccctgggacgtggaggtcaggaaggaggtcaggaagggacgtgaaggctctgctgcccttgcctgggtcgccttgtgtgtgagtcacttcacctctgccccagcttccccatctgcaaaaggggggagaagctgggagtgaagcggcctcaccatgtggtttggagcaccaggtgaagaatgtaagtaaagcacttggcatggggtgggcatggagtcagggctctcccttgggggtggcgttgatcccccgtgagccacaggtaggtccggcaagtggagccaggttcctgaggccgtgcctgcaggttggccctgtgtgacgaggttgacggcatctccagtgttgggccgctggccgcctgcccagcatgtgttcctggctctgcctcctgctgccgcctccgctgcgccttctgagtgtcacaccaggaggcagcaggggctggcagcacctccgctcctgctgccgtgcctggaatttggggccatggccctggccggttctccatcctgcctgtttgcatagagctcgttccctggcctggcatcttgggattttccagtgattcctttccatacttgaagcagacatggggatgcaggggatggtcatgtctgcgttgttggtcactgaacattttaaaggtggcaacacaattgcctttaaagtgatatggcatgaaaaaaatcgttatttatatttggcatggccaaagagtaaaaactcaagggatggttgctgaggagcattcaggaggcctggggtggcatcagggaccaagtgtccgtttgatttcacagacccgtaagtgttcagtgtcttgagcraactgtgaagaggagaccctggcctctgatttcaaaggcgccagcgttttaccggggccggtgcagataatggaagaaaggtgttttgccagggacttttccggggtatgcagtggggctggtgaggggtctgccttagcaggaagcccttgcctttgctgtaaagaaactagcaagcgacaaaacgaaagcatcaaagagccaacaggatgcggcccgagccctccctggcacgtygccccgagccgcgcggggaagagtgaccttagggcccgcctcgcgcacacaggccaggcacaggttgaaagttcaaggcattttgttttttcacctgtttcctacagttctaagaaacttctgaagaattaatgtgtaactatatcagacactcggcgttttctccagggaaaataatgttacagtgggggagggaggggaagtggctacttgatgagacacaagaaggtttccataaagtaagaaaaaccctctctaggggaaacgtgcacaacatcgcatgtgactcttactccatctccaccatgtagaatggctgygtttgctcagggctggcacagtgtggggctgctggtggtcacagaaggactagagcagcagttggtgtccttgaaaccagtgtacagccgtgatcaccatgcccttcgtgagtctggtgggcccaggatctgctggggccaattttgacacgaggtattgaatgacaaaagcaaattaatgcagcaaatgtaaagatagagataagctctttgccatgccaccttctggaccaggagtttatgattctgayactatttctccctggccagtggcagagcccctctggcaggggcctgagcttcatgctacccaagtctaaatcattttacttttttctaacaaagtcttaacttgccaactggcagtatgcattgttactggcttgatatatcatgtggagaaaacagatgctttgacatgatgacatacagattttactaacatttcctcctgtcatgaaattttcatataaagatgaatattttcttgaggcaccatttataaaggtggtttttatgttagaagctggtgttggccaggcgtgctggctcatgcctgcaatctagcactttgggaggccgaggtgggcggatcacaaggtcaagagtttgagaccagcctggccaatatggtgaaaccccatctctactaaaaatacaaaaattagccaggcgtggtggtgggcacctatagtcccagctactcaggaggctgaggcaggagaactgcttgaacctgggaggcggaggttgcagtgagccgagatcgygccactgcactccagcctgggtgacagagcgacactctgtctcaaaaaaaaaaaaaaaaaaaaaaaaaaaaaaaagctggtgtctttttaaaatccttttgtaaattagtttaagaagagttaaacactagccctttccttgttcggttcacctggtctgcgtatgcatgcttttaaacgtgtaccaggcatatgaagtggttgtgatttgtaaactatcatcataaactcttaaatcctgccttttacactcttgccaccaggtggctaagaaaaaagaaatcaagaaaaaaatctaacagttatgcaaaggactcgtaatcactttcaagttctgcttcagtggtgaaatatgaaactatagacggactgcgtttcaagaaggagaactgctgaataagtgacaggcatttcaggcagcgcccgaccagatggacagctcatgagtcttcttattttctcaaatattggcaatgggaaaccagattttgctgatctaaagcttttggagactctctgagcctgttccacctccatgctgtcccctggatgccgctattgtccggaccagttagctttgggacagaggttcagctttggcctcttggatttccagagtggaggatgcctgaatcctgaccacagcagcaggccgcccttatccttaacacatcagcatcagggaacgacatctgcagagatgttcagtgccctcagaattggctctaggaacccaaagtaaaattctccaaactgatgttaaggtctcatgcatgtcattctttgattctgtgtattaacagtaagatgctatgaggaaatccgtgcacgagggatgacagcgtggcaggctggaacacgctttttagatttactttcgtggactggatctgttaagagtaaggccagcgtcctagggcacaaaccgtgctctccccaacgtttccacagcgtcatgaaggacgatcttgtcccatgaaacaaaccctacccgtcttcttgctgggggggtcagcggctgctctgcttctcctgtgcacccggggttgctcttcagttctctaacttagtaagttggactggcagcctcttggttgtacaycattttattcttgattcgcttttctgattcaaagtgaacctgagtgccttaatcctctaaggggaattaattgcttgtttcagtgcttaactytgatcctggctcagtccccatgrggacaagtttcttcctgttaggatctgtgtgtgttgttcaaaacacaatcagaaaggtaatgaagtttttcttatgacagaagccagaaatgcaggctattttcttttctattgcataagtagtgttctcaaactaactttatgttatgaaggatgctattgaactcaatacataaaatgtagaaaattttagttggtcattctagcaggctggattatttcctagaaatgaaggttaacttttattgcctggttttattttacagaaataagctatcatcttctgcagaagacaattactgaactgattttccagagttggaattaaccttctgtggcctaatcaccttcatttctacgtaatatcaccctcccaagcatttttcttggttttggaaaatcattaaggccacaaccactactcgatatgcctgatgccctctcccacttataatgtgttcatttttatttttgagaagactatagctagtagatatttctagaagatgttgataaaggatggagttaagtggagacctgaggagggagcarggataaggaagggccaaggggaagagggaattcacattcatcaggtgctcaygcctgcacagtcggcagtcagtggagggtaactctttggggtaaataggaggaaatggaagctcaagaacttgaaatcacttgcccaaagtcccacaggtgctcagggatggaggcaggaactcaagtcaggcctgttatggcacagtggattgtttgatacttgccctgcactctgtccctaaatgcccatctacagaattctgaggttgcctttcctgatgctggccctgcaagggctgggctcacactgtgtctgatgcagcagggctgacttgggggcaattacttcacattaaggtagagaccaagagaaatacttgttttaatctgraaaaactcagatggcttgcctacagccgtttcttaccattactcattaaaccaagcccttayattttatctgagaccctgactctaaccctgtgccatggaaaaacaaacaaacaaacaaaaaactagcatggtgagagggggcagggttgaagacacagtaacatgtggctctcagaaggtggcatccccttctgcagtggcagtgtcacccctcccagcccggcccaggggcctggtgcacccaaagaggagcccgacattttctcagccagaatgaatcacaggcacattctgctgcggttctgagaggcatctggccagtgttatagacttttcatgtgtcctgttggttgtgatcctcacagcagcccttggagatgggctgaacatgagagacaaggaacaagagtacaaggagataagaagctcaaaaaacaacaaacaaaacccaaagctagcagaaggaaaggaacagtaatgattagagcagagataaacaaaaagagaattttaaacaacagagaaaaycagttaaaccaagagttggctgtttgagaagactaacaaaattgacagacctttaacttaaataaaaagagagaaaagatctaaataactaaaaccagaaatggacgagaaaacatcacgtcctacagaacaacacatcttgcagaaataaaaaggccaagagaataytatgaacaattatgccaacaaattgtctaacctagatgaaatggacaaattcctagaaagacacaacctactgagactgaacagacctacaactagtaaagagactgaagcagcagtcaaaaatctcccccaaaagaaaagcccactctctctccggtccgtgcctccaagatgacaaagaaaagaaggaacaatggtcgtgccaaaaagggccgcggccacgtgcagcctattcrctgcactaactgtgcccgatgcgtgcccaaggacaacgccattaagaaattcgtcattcgaaacatagtggaggccrcagcagtcagggacatttctgaagcgagcgtcttcgatgcctatgtgcttcccaagctgtatgtgaagctacattactgtgtgagttgtgcaattcacagcaaagtagtcaggaatcgatctcgtgaagcccgcaaggaccgaacacccccacctcgatttagaccttgckggtgctgccccacgtcccccaccaaagcccatgtaaggagctgagttcttaaagactgaagacaggctattctctggagaaaaataaaatggaaattgtacttaaaaaaaaaaaaaaaaaagcccaggaccagatggcttcactggtaaattctaccaaacatttacagaattcacaccagtcctcctgaaactcttctaaagaatgaagaagaaggaacatttcagtgttgagcatcaccctgatactaaggccaaagacactccaagaaagaaaactacagactaatattcttgatgaagatcgatgccaaaatcctaaacaacacactagcaaacagaattcaacaacacattaaaaggattatatgcaatggccaagtgggatttattcctggaatgcaaggatgtttcaatataagaaaatcaatcaatgtaatacactacattaacagaatgaaggaaaaaacacacaatcacttcaattgatacagaaaaagcatttgacaagattcaacacaacttcatgatttaaaaacastcaacaaaggaacagaaggaaattacctcaacatcataaaggcagtatatgaaaagcccacagctaacatgatactcagtgatgccagaatgaaagcttttcttctgagatcaggaacaagaaaaggatgctgctttcatcagttctgttgaacatagttctgggagtcctagctggagcaatcaggcaagaaaaagaaatttaaaaggcatccaagtcagaggtaagaagtaaaattaactctatttgtaaacaatatggtcctgtatagaaaatgtaaacatttcaccttaaaacttttagaactaataagcaaattcagtgaagttgcaggagacaaaattcacacaaataattattgcatttttatacactaacaataagcaatctgaaaagacaaactattccatttatgatagcatcaaaaagaataaaatacttaggaataaacttaaccaagcaggcaagatgtgtacactgaaaagtacaacacattgctgaaagcaattaaagaggacataaataaatggaaagacatcccatgttcatggattggaagacaatattgttcagatgtcaatayttcctaaagtgatctacagattaatgcagtcctttaatgcagaaagaggaaaacccaatccaaaaatgtatatggaaatatcaaaggaccttaaatagacaatgtgatcttggaaaagaacaatgttggaggtctcatacttcctgacttcaaaacttatcataaagttactgtaatcaaaatagcatagaacaggaattcctccttatctgtggttttgctttccrtggttattgtttaatgggtacaaagtttcagttttgcaagatgaaaaggttctggagacctttttcacaactcaaatatacttaacactactgaactgaacacttgaaaatagttatgataaattttatgttatgtgtattttatcacaatttttaaaactccacaaattaaaaaacaggaaatacagagaaggatttggtttatcagataaaatttaaaacaagtagggaacaaaaagcatagggaagtgtagggtgctttgcaaaccatctctgccattgcagagcctgagtcctccaccatacttgacagggtcacctcccttgggccttggggtcagtgcaagtgacagagccagagaggcttttggagtccagcaggcccaggctcagttcctgctgctgcctctcaccagcttcgggccagagccctcatcttagtttcttcatctgttaaatgaaggtaataccacctactttacagagttgagagcattaaataaactgagatkacacaggctacttagtgcggggcccagtacacccaggtgaacctcggtcgtcggtaagcaaggtcccagaagtcctccctgggaattagccttcttcagaaacactatcctccaactctcttctcctcttacctctgtcctaagcctgcttgtccactcttggatgaaatatttttcttcctttgcagttgaatccccggaatagtgaaaacaatgaccattgcgtgctgagtacctgctctgtcctggcatcttacaactctgttccaaagtctgtgctgcttccataggactgttctcacttctttccattttgcaagttctcagcctggcggcagtctccctgcccgagtggatggtgccaccacctcttactgaaggagcggtttctgagggagagtgcctgtgctgtgcagctgtctcccgcgaggcgccctttgacaagtgtgtcttctgtctcccctcaatgacactgtggcttcatggagtctcattgcatgcccagcacttagcacagggcatccctgcatggctgcgttgttccctgcatggctgcatttaggctttccttttcctgcaagtgctgcctcgtctttcctttctctcgtctcagcagcaggaagarcaagttctttctctgcctccccgctgcctggctccttcagctatcaccagccatcccctctacccagccctcactctggtgccacaattgctactttcctggcttcttcacggggacctgacatacccttgagtctcctgtacctgaagaaaacctccttgccatccttctaagcaagcagtttctgtcttgtcgcttcctttctggctcacatcaagtctctcagaggaaggggctagggctggcggtgcagcaagggagaagacagggaggacaggccctgtgtccagcttcctcctaatgctactcaaacgacccacaaggacagtggaggaaagcgggcgacacgcttctggaagacggaaaacagaagtgagtgacagcagacttaacctagagacacccaaaacttaagctcctgcacagtgagaggctgacaagtagtcagctgagcagtgtctgcaacgctggaggagtccagaaccgcaggccacagaggcaaggacaggccaagacacggaaaggctgggagtgtgcacaaggtgcagggagaccccactgcttcccctcacacctggcagaggatggcgggttcctttctggagagcctgwcaagaacacctccgctggggacacaggcctagctgagtggtggtgaggtggcaccctgaaaacaagcattgggggaaagtgcagagctcccagcgccgctccccagagtcccgtgtgaggcctgccacctgacagctcagcctcacttccaaagagtggctcagctttcccagccaagatcacatgtgaagaaaatctcttgaaacacagataccaaaacagagagaaaagagggagttaggagaaatggaggcaatgaagggaatgaagaaaacttaaaaaatatatatatattgagcctgtgaatgaacaagaagttgaaaaaaaaaacacacaacaagaaaaatatattggaaataaatatcatggcaaaaaaatttttaatagaagaaatgcaagataaagcagaatataatatagacctggaggaaaggagaaaatataaaaacattggaggctgaagtcaggacctccactgccggaatattgggagagccagaaagagaacagagaggaaggaggggtaagaaaatgcccccgtgatccaggataaggagcattcagatcaaaattccagcacaatcaatgaaaacagagtctacatcatcagaaaattctagaatctgagggataaaaggaagcccttaagagcctccagggaagagctcgagtcacacacacaggggacctggatcacagcacactgacttctctgcaagaactcggaaagttagaagacaatgaagaaatgtctttaaagttctgagggaaatgatttctagaatcctctacgcagccatgttattaaccaaaagtgggagagaatacacttcagcaaaatgtggccaacatcccagccagaggacgggacaggaatgagggtggcctggatggcagcgacacagagagcccagactagagctggcagggaggaccttccagcggatggtcaggacccgggttctggccatgctctcagaaactgcgaggctgaattacaatcctagaaactaagcgaaatgcaaaacaaacaaaaaaaacaaacttgaagcaatttttaatttcaaggaaaacataaagttgtccaagaaaggaaatgtaatcatagtatgctctgtgtcttagccaagagccgtgtttgcatggttctaatgccgaaatagatctgggtctgacccaaaactatgatgagtctgttgggaggatggcgggatgtggtaggagagccaagggtcaggcttctacagtgatgacagcagcggcacacgctacatgtcagcagatcacacaggaccacgtgtgttggtacccaccgcggtctctgaggcaggctgctactgtgacttcagtttacagttgaggaagctgaggcacagagaggttatatgatctgcctaaagtcacacagttaaagtctgtgctttagaaccactatgctcacccactttttgagtagaagggcaagatatgatttaagacatcaagaagtagcagcgtaagtaacaatatggagataaatgctgaacacaacagttaaaagccttaaaagtgttgcctccagggagtggaaaggggtaggaaacttcatttttcttacaaagcaatctattgacattttggacacatgccattttaaaaaactgcatcagggaaagccaggcaggcacctggcagtggagagctggtctgcagtgtgactacggccctgcccggctggctggtcctagatcgccaccagcctgggactcggcttcctcacctgcaggtgctggaccaaacagtttccaagttctcttctggcccttcatgttccagcaacaaacaagaccagtgatttagagagcacgtgtgctataacgacaaccagacagagtgatgtgacagactgagtaggccctgcctactactcctgcaccctccaggtcaggcgctggtcggggcaggagccacctggatgaggggagagagggtgcaggagatgaggtgggagagttaagtctgcagcaggagattgacaaggaccctctgggtggtgcactgggggcaggatccaggggaacaaagacaacagggatgcaggcaggcattggaggaggagagcaggttgggagacgtggcaggggaagtgctgatgggtctcgctgggggctgggatgcaggtgtggggagggacatgaatccttccaaatgctgagtccccaaggcagctgcacagcaggatccaaaccatcatcgccccccaggtgctcgtcttttgggatagctccttgcccgctgttgtagacagctgcttccatccagtgccctctccagacaccagcgctgctctcagctggtgccttttgtcattttcacgtacaccccagcagccgagtcctggcaattttaggcctgrgcacttgcctcttctcttcctcagtaccgtcctaccccaggttctccttaattcacatctcaactttcctatcccagcatgccccccaggtctaatctgtgtccccacactgggaagggtgtcccagggctatcacatggccaggcccacagggcgcacgtatctggctagccttgtgtttttcccacggccacacctttcctagtgcaatgtgcctgaaatctggggaatactgttgttgcacaggctggtgatagaaccaagaggcagcagacgtgcctcttgagcaaaatgaggcctagaaccccccagagcagctcttgtttgctgagaagaaaacagaagtcccatgagttcagtgtgacttcttcagtttcttcagggtccacttgtccacatgattggtggcaagtgtggtgtccggggccatttctggcgggtcacgagccgstgctgtttcctggatagccgcatttgttttcctgcacctgcagtcccgtctgcaaagcccatctcaacgagtcgccccacaggctgtcacctcatggcgggggcacacagggcagcggagcgaggggccggggagagcggcccccacccctttaatgttcatttccatttttgtttgagtcactttcacncaaatcacttctgtctttatgtaacagtctgtggcccagacccaggcaagtggtaaatatttaccttcacgctggagccaagatcgctgcggggagtcccgtgaagcaccactgccctctaagaccttggaaggggaaacaccagaaggtgtgggtgctgagctccgctgcgtcagactgccaggacctgagtggarctcagtgctgaaacctgggttctcactgcagctggatagcaggyggttacaaaattatatgtatttttagggttatttctaatttttctntaatagttattggcaattttcaaagtcctttaagaaacactgaaaactgctcaagaaaatggcagttctgcagggctcaggtagcagggcaggctgttgggacaggtttgacagactgtcctaatacaaggagcrccttttcccagatcagcagctctagagggtggcggccttgcctggaacctccgcaacctccgcgcccaccacacaagggctgagaacagtaaggtatgggctgtgctgggctcaggagcaggggtagttgctcacctggacagggtgtgtctgggagggccatactagggcctggacagggcgtcttctggccttgagctgctacgatgggggtaggagttgggaagggtggaaggctggtgccctcagggagtcggggaggctgcgcagtcagcaggtcaggactgtgttcctcagagaagggtggcctgtgcaggcgaggcagggctgcccctgcagggctgaggaacattagtccatccaggtggtgtggggaggctgagggcacggtcctcctgcccagaacgcaggtgtcctgtctgctacagacacatcaaggaagtcaccaatgtgtgcccctttctctagcctagggactggcaaacccaaaaacaccatgcccacaggttagagccgacctggtgcccgtttgtgaacagcccacaagctaggaatggctttcacatgtttaaatggccgaaagtcaaaatatctcatgatgtgtgaaaactgtaggtcattctcatctgcgtyggtaagtaacgccttatctgagcacagccaggcgcattcaggtggtgcggccccagtggaggctctgtgggccgggagccacgtcccaggtgcagacacagagctcccactgcgggctgacctgtgacttcccctctccctgcagctctgcccggatggccctagtcttcgtgtacggcaccctgaagcggggtcagcccaaccacagggtcctgcgggacggcgcccacggctccgcagcctttcgggcgcgcggccgcacgctggagccctacccgttggtgatcgcgggggagcacaacatcccgtggctgctgcacctgcccggctcggggcgcctcgtggagggcgaggtctacgcggtagacgagcggatgctgcgctttctggatgacttcgagagttgcccggccctgtaccagcgcacggtgctgcgggtacagctgctggaggaccgggccccgggcgcagaggagccgccagcgcccaccgcggtgcagtgcttcgtgtacagcagggccaccttcccgccggagtgggcccagctcccgcaccatgacagctacgactccgaggggcygcacgggctgcgctacaacccccgggagaacagataagggggacgggcagggtgggcctaggtttgagagccctggggctccaagatgcgcccagcccatgctgggtgaaggcggaagccgaacagggccctttccaatgaatctgccggaaaggaaccaatctttcagtggcagctgattttacaaataatgttgagatacgaatagcaaggtgcttccctcccatctttctacctggtaagaaaaatttaggattttaactcccctaaatgacatttagagaactcgtgttatgcctaattcttcttcctcctcgtgttgtttctgctgttggctctgctttgagctcaagataaatatttaggatcagtgtaaagacttggtgttgccgctagattttagcagccctactatactgattctggcctgtaacccctgagaaagccgattttacacggctgggtagaatttgtagaaaagatccacagggcaagcatgctgtatatcagagtgcgtatagcaccattcttcctaattttcagatcaagcttcacagcaaatattaaagattatttaaatttgaagtcgatgttttgggaaatcagatataaaagtgttggtactgtgtttgacccccacgttttttggtatacttatttggtagaaggttctttacattctgatctagcaaaataatgaacacccacttgctggtagacacagctgagcgcccggacttcaagtggaagtttatctgagcccagatctcagtagccagaccccgtccctgccccctgaagggagagcatttgggggtgagtcctttcaaagaagagccaatgcattagtaatttgttcttcaggcctgacagaagcttagcttccaaatacaaacagcacttaaaataattttagcaaggcacgaagtaccaattactacccacctccatctgataattgtcagcatcgattcaactcggtgcacggctcttgcttctgcttcccagcaaagtctgaaatgtattccaaggatttcagaaccaaatgaaaatgcagctgctgtgatctttagtaacctcattctctgttgggagagctcacttactcttcaacttaatggcagactgtgatcgctaactgcatctggcacaaaaacatgatcattatttttagcttcttttgcttaattggaaacttgcttcacaaaaaacacaaaaaggctacgctgggtctcagctgatgagctcgtggcggccctgtgcttgatgagggcggtgaggcagcccaagctccttgtgactgccctggcttgtgcaatggggaagggaccaggcagcgcgctcatcctcaaaacaaacaaaaacagtggagacagcacccccggccaaccaggaagcttcagggtgacctccaggggagtcagccaccaacagtacacccacatagagacacagcaggaaagggattgccaaaatctgcatttgcagtctctggtccttaggaagttttgaaaatcagcaccaggagtgagggcctcacttctagaagtagtaaggcaatcagatgaaaaaatggcaagtgctaatttaataaagcaaggcagagaactgactgacatttatatcaatctcttaaaaggatcacaaagaaatgctggtagtctactggcagagcctgtcgcctatgtgtacattgtcttcattcaaagaaagggcaaactaatatttagacaaatgctcagttttattgatttaattttgacactagggaatctcacagcagaagtacaaatcatatgtacaagtatttatatyaatgaaaatttccattggtgattttttggcagaatattggtcttgactctgtggaataaatgacracgtaaacgtagctgcacaggggtgttcctgtataatgcttgaatcaattgtgtgtgaaagcatcatgcaaatggctaattaaattgggtgatgactgaaaggttataaatccttcattccagctccacgagcagatccccttctccaactgtgtctccagcttgacagtgcacagatttcaccttgaattttgaaaaatgcagggggaggggagagtaagaattagtaaccagaaccaagaggcggcaggctcctaatccatttctaaaaatgcacagtcctgcaagctcagcagcacagggacaagccaccccaccggagcccatcgaagggaccctggtgaacagggaggcgccatggtggccgtggccgtggctcacccctcccctttcccgtctcctctgtcctcggcaccctcacagtggctggcctgagggctactctccggagcatttgcgctgtggcctgcgctctggcaccctcaggtctaggcaggctcttcactgccaggtgagttctaacccctagcctccctctctgtggttttgaggttgtggaaatgttctctgagaattaatggaatacttagtgtaaaagaaaaaaaggaacaaaacacacgacagtcagatcagctgctgagtaagaggaggacctccctggcctgacctccattttctgaagggaaatggagtccttggcaggtggggctgtgcggtcgccctttccagcaccatgggtgggtggaactgtgcctttttgtcctaccggtttcagtcaatctttatcaagttttgctttccgaaatttgtgttctgacttaaaattagcaaggaggggcttgaggtggggaagagacagtcatttgacttcttggaggctcttgcttgggcctgaaaatgaaaaatggattagaactcatcggccactgcagatgctgcttggactgaaaaggctgctttccacaatgctcctgcctccatttagcagccctactagaggacgcagtgttagtgatgcagcgatgaccagagtagaggatctgtttcctttgtgaactttttttctctgggaggaaaagtggcctcgcaggtaggaaccagggcctgctactttgcacgggggcttcgggccacttctgctcttcttggctgggttggaactgagaggcctggggatggggtgaggtgaacagaatgcacaggaagactccaactaggagggccgagggagacccaggccacgaggacaggaaacctactaccacatggcaccatgccccttcagggaactgatgaggccaaggtcatttctgcattagcacctcagacctgctgcacagggcccttggcatgcggcggacacacgttctcggtcccccacacctaggccaagttctcatcatggatggatgtcgtgatactagggcagcacaaatgttaaatcccaaagaacagataaaatttttacatgaacagaaaccaacattttcttgttcactttttaaagaagtaatttagaaagaattccttaaaaacgccacaaatcatgtcattctactcttcacaccataccagcacagtgcaactgtccacacccctccagaccggcgggctgggctcaggagcccctggcatacacctgggcctctgttctcccagccgggaccaggcatgacatccccgctgccccttctctgagaatccatttcattgccttctgcagtgacagagcatgagacagaggttgtgtgtctctctgatgcaaacctggttatgaactgatggatctctctttgcacctgatgtccccaaggcatggccacatgcagaacacggccagccttgcgcttcccatcatgctctcccatgcagacacttccaaaccacaacggccctcacaaaaggatcatttacctactaacggcatcttttcagtctttttagtcacaggaagaataatgaagttactgcttaaaaggacttttctatcttcaagaaaaaaatacacttaagtttcactatgaatgaatttcagtactaatatttttttctccctaaataattaagtcccacatgtacatggggttttggcttctcttgatctgcaactgaattgttccctttgtagagaaattgtcttgaagagttacattaatttttgcaatttgtaaaaccatttgctgctgtgtcacctaagtctcagataactaactgccttcaagacagatgtaaacattaaaaattaaagaccccttaatttgaaagaaagacattaaggtgaagaacaattgttctttgactacctgaacataaagcacagactttttggaaggcacgctctctacgaggcagggatgcatcagggcagaatggcaaaagctcccaatcctaacgtcctcctctgtagaagcgagggggagagggcgcctctgtggccctttccagccaaaccacccacgattcaaaggtgggcgttcctccatcacagggccggcctgggctgatggggacttagggactcaccgtgccagttttcccagctgtcatactattctgcattttcatggcttcaatcacacaaatttcttgaccttctgctacctggaaaacaaaaatgggcagaagttttaaaagcattctaattttgcattaacacttaggaatgaagccattaagaaattctttgtcaaatgccccaaaatatgtgtctatgaacagcagcaacaatctctaatgtttcctattccaagctcatctttaggaacagtagagaaaagccattctctctctcataaagtcctcgttggaaaaaaaaaaaatccctgaccctggagaagtggggaccctggcggcggggcctaccctggggatctctgagtctggctctgccactaacagaggtgttcggaaattggaatgttttccacttacctgaaatgtccagaataggcagatctctacagacagactcgaggttgcctggggttgaagagggaaggggagtcactgctgaagggtacagggtttcttttgagagtgataaaaatgttccaaaattgattgtggtgacaactacacaactctgaattgactgaaaccaccgaatcgtacacgttaaagggctaaattgtatgtgaattacatctcagtatagctgttaccaaaaaaaaaaaaccaccaccaaatatacatatttctgtctatagtcccggggaactgggaacagctcggccctggygccacgaggaccactgtcccatcctctgcaagacacagcgagtacccacaacaaggcacaaggcagcttccggaaaaccctccagacacaggaatgacttccagagctacatgcattccatgctaggagactgggagcgcccacgggcctttgctcagactgcgttcagaacttgcctttcatcctgaggggcagccaggctgagctgggttaagcccactggcgttaagcgcgaggcttccctgcaggagtgagctgcagctgaaaaccatgctgcgcgctcacttcgctctgccccgatgggtcagcgtcctgagccggccaggtttttctttggcctcccagtctttgaaacgggcaagtccaggttcctagggcaatggctatgtggtgtgggtgggtgtcctggcatggggctcctggcccctcacaccactgtggccatattcgtccaatgcctcagaagcgcctagagaatgttctttcctgaaatccccagatgatctccaagtccccctctggcccccccgtgtggcgcaagctgtcttgctggcactctggagcgcctgagccgatgtactcttttcctctgctgttcaggtggtgggctgcttcttcctggcatagaaatataggaagagagacgatgccaaggctttggcgctggcacggaggagagacaccgcgctgaggagctgggcctggaagcgctgcccgcgctgccctttttgattcattttcacgtggcatctgcattccagggagagcgaagaatcagcctcgagggctgtttgcagggggatgggaggggcagcgcagagacaatgcagaggcccccatcaggggtgtcagaacagtcactccctccagttggcattttacagccttttttctctcttcaaaggcaggcaaagaccagggaatccaggagcaggtccagttcactgcagcacacctgccagccagctccacacaggggaccctggaagcctggccgtgtcctcttagaagctggactcactgcgactgactctgacctaggactgagcactcaggcaacaggaccggggactctctgggaagtggatctgagactcaacagaacatagtagaaatgccatccaaaaatgaggaatccactctcccgctctgggcactgttctctctccaggtggaggagcttcctggggactgcatgccggcctcccaaacacccacccagcccttcctctgcaggcatctgagggcccaggactggccagagccccgtccccccgccaagtacattggcttcacatgggtggcacagcccctaccctctctgccagtaggtgtgcccttccaccacacgtcccctcccatccccttgctcagaatctgcgggccagacaggcaggcagctcctgcttctgttttacaggatcttcaagtgagtgcgttagcaactcaactgcaaatatgaagaaatgcggcctggggatttcccaaggtcacgctaggggcaaaggccagcctgacctggctacagctctactctgggccccgccagggcctgggagcaagtgggtggtggacaggagcttaaggggctctgctgtggctgccactgaccatctttctggctggctctgtgcttctaatgtgggtgatttgcaaagaggtaacgcacaggtaactgcaagtgctgggtccccagttgttcatcagaaaaaaacctcggatttagcccgagacaatcaggaaaagtggggaggcctgaaattcaaatagtccttctgtctgattgtgagagtccggcaattcaattcaaaggactttaaagaaggcgtgtccccactgaagcgatcccatcttctgccccatccaagcacagcactgaatcatagaattagatcctccctgctccatccgcctttcattcctgtttcccctccctagttcctctcgtggtgtctactagtctacttatttagctctatcctatctatcttatctgcctgtctgtctgtctatctatctatctatctatctatctatctatctatctatctatcatccatccttagagacagaatctcggtctatcctatctatcctatctaatctattttatctatctatctatcttatgtaatctaatctaatctatctaatctatctatctatcttagagacagaatctcggtctgttgcccaggctggagtgcagcggcacaatctcagctcactgcaacctctacctcccaagttcaagcgattcttctgcctcagcctcctgagtagctgggaatacaggtgtgcaccaccacgcccagctaatttttgtatttttagtacagatagggtattaccacattggccaggctggtctcaaactcctgacctcaagtgatccgcccaccttggcctcccaaagtgctggggttacagatgtgtgccactgtgcccagcctagattatttagctgtaaatgaaaaactaagtagcacacttctctattaattttgcaccatctgttttgtagaccgttttccctaattcatccctaagagatggtgtttaaaaacttccttcatgccttacaaaatagtgagatacatcttgctcaacagaaacatgttctaccacacacacacacacacacacacacacacacacacacacacacacacacacgagcttaattgaatttcaacatgtttcatcctttggaaaaaattgagctggagaaccaaatgtacaaaccaaatgtcaaagaatgcaatggaaacacaaac

SEQ ID NO: 93810 - DNA, 53816 bp, Homo sapiens
gggggcaaggggagggagagcattaggacaaatacctaatgcatgcaaggcttaaaatctagatgggccggcagggtgcggtggctcacgcctataatcccagcactttgggaggccgaggccggcgggtcacgaggtcaggagatcgagaccatcctggctaacaaggtgaaaccccatctctactaaaaatacaaaaaattagctgggcgtggtggcacgtgcctgtagtcccagctactcaggaggctgaggcaggagaatcgattgaacccagggggcagaggttgcagtgagtcgagatcatcatgcactgcattccagcctgggcgacagagcaagactccatctcaaaacaacaacaacaacaacaacaacaaaacaacctagatgatgagttgataggtacagcgaatcaccatgccacattaatacatatgtaacaaacctgcacattctgcacatgtatcccagaacttaaagaaaaaaaaaaaaaaattgcaagacaataaatttctgttgtttaagcctcccccccaaaaaaagcaccaatattttattgttaaatgtaaaatattttcttacataataataaaaatatcaaatatctcttgtgccttttataggggcacttttcattttttttttagtggtgtaaaaataagcattaaacattacagagaaacaaatgcagaaaactctgattacgtggtggctcatgcctgtaatcctagcactttgggaggccgaggtgggcagatcacttgagtacaggagtacgagaccagcccggccaacatggcgataccccgtctccactaaaaaatacaaaattagttgggtgtggtaacgcacacctgtagtcccagctactcaggagactgaggcttgaacccagggggcagagcttacggtgagctgagatggcgccactgcactccagcctgggcaacagagtgagactctgtctcaaaaaaaaaaaaaaatctgattcctcattatttcaaaccgtaatagtagtttctttcatgctttttgtgaattttaactttcaattttttgtgcaaaaaaactccgtctttaattgcaaagtcaattaagaaaatgatattttcttaaaatcatcaaatattagtcatgtcactattttaagttgtttttgtaggcacatgtaagaaaaaacctgatgtctcctagaagttggatgataaaggaaattataaatatatacattaaaacaaaattaattaagttacagatatgtctccttaaaaagacagcatagcttctataccacatcttgatatgaacctagcagatgaaatggcatatctaaaggcagaatagggcccttagagggaggattgttcaataatgaggcctagtttagggaaatctaatatttccctcaaataatgaatcttcagggctgcctccagaggcttgcctggcccagagcccctcctgccttttcttgtggttggtacatcctgataggctgactgatgcatcaagatctttgctgaatggcaacagcctctcctatcatgcagctagtttcccctgctctgaattcatgctaactaagcaatcttctcaactgtaatgtgacctccccccacgctttataggaagagaacatgctgactttcattcccatctgctttcttgtggtcaatgattacactggtattttgatattcaccagtctaactaaccctaaaaacaagtctcttcctgattatcttccttcagattagtttgtaagttgcagtggactactcaattgaattgtaacagtattaagtgtgctcttggcataattgatgagatcaggcagcagaaaatgcttaatctgatgaattttattgtatgtcaacatttttaaagggaaggataggaatgtaggaacacaggtgcatattgaatcctctgaaactggatcgtgtgctttataaatattactaacaataaaacaaatattagtgaatgaacctcttctctttccaatgtctcttcatttcccaccccttgtattgaggggaaatgggtctctttgttccttgcagtaatcaccaaggggagagctggcaacagagaggcagatggcctggatcatctggatcctatatatggtacctgactggggcttctactcagctactgctgctaacaggacatctgttcccagagctccctgtgcctttcacatgcacagggtcttcaaataatgatgtagggacccccaacaaaagtaccaagcccctaccccatcattcaataatgaagcttaacaataggcaaattctcctataaagagtaagtttccaatcagcattttattgctggaaaggaccattaaagatgattagatattggaggatcgcttctgacatcaaagtcagagaccaaaacagcaaacgtagagagaacctaaaaggaatagggttcaggaagcaaaaattacaagaaatacataaataaatgaaaactattattcacctaggagagatgagctcttacatgtatcagagcaggaggctagaaaacaaataaatgaacaaactgaaaaacaaagaaaaataggaaaatgtatgtaaccaaaaagatctcttcacttagaaacaataacattctagtagacaaaccttgtgctcagattttggattctttttttttccagttaggtcatcttgggttcagaacagatcttggattctaataacattttccaataaaaggaaccagggctccttggggaaatggatgattctagggctggggtgggaaagatgcaagatgagcctggagcatcttgtggtatagcatacctgtattcccagctactcagaaggctgagacaggaaggttgcttgagcccaggagtttgaggctgtagtgcactatgatcacacctatgaacagccactgcactccagcctgggcaatatagcgagacctcatctctaaaaaataaataaataaataaaaataaagtctatttaaagtgaaaacacttagaaattaaaaatataagccaggcacagtggctcatgcctgtaatcccagcactttgggaggcaaaccttgtgctcagtagacaaaaaaggaagaaaaagaagaatccaagatctgagcacaaggtttgtctacaattatatatgtatgtgcatgtatatgtgtgtatatatatatacatacacatacatacacacatgtacatatatataattgcagcaattaaaaatattagaaataatggagtattctaaaaatattagaaacaatgaagtattaagaatttcctagagagtagattagaaaggtaaattcttaaaaaataggagtgaaagaatagtaaaattaggaagtcagaccaggaatttctactgaaaaaagaaaggggctgggcacagtggctcacatctgtaattccagcactttgggaggctgaggcaggcagatcacttgagcccgagagtttgagaccagcatgggcaacatggaaaaaacccgtctctacaaaaaatacaaaaattagtcaggcttggtggtgcacgcctgtagtcccagttactcaggaggttgaggtgggaagattgcttgaacctgaggggttgaggctgtagtgagccgagattgtgccactgcactccaacctcagtgacacagtgagaccctgtctcaaaaataaataaataaaaataaaacaaaataaaaagaaaggagaaaggacaggagggaaataggaaagaagaaagatgagggagagaagagaggtgagaagaataaaaaaaatttttaaagggaaaaaagaaaaaggaagaaggaaaaagaacgaaacagtaattattacagaaataatacaagaaaatgtcccagaattgaaggacttatgttttcagattacagagctcaaaacactgggcagaaaaataaacaagaaagctaagttttattatgttgaaattttagaccattggagataaagagatccaaaaagcatcctgagaaagtagaagcgacacctaaagggaaatcggaatgccagcggatttctgaacaactgcattgaaagtcaggatatgtctctgggagctttcaaaatcctaattaaaattacagaattctagacctagccaaacttcccgtcaaggatttatgctccattcaccctttctcaggaagttaatacagaatatactacatcagaataaaacaatgcaagtaagtaaatcaagaaagataaaccacaggatctaaaaattcagcacaagtaaccaacacatttctcaggcccatggtgaggagagtcccaggataatatccattcagtaggctcagagaacacaagtgcaaactggagcaaaaggagaaaaggctcctagaagcatctggagacctctaaagagatgtctcgaggaaagataatggaactgagtgattgccagatttaaccataaggaatattctatctagtgcaagagtattcaactcaagagtcaaagaaacgtcatttaatattttgtctgttattttactttctttctgtaaagctaggtaattttctagcctatcatattaacataaatagaactttaatatggattttgagaagcaaatcaatgtaaaacagttgttaagaatacagactctgaagtcagcctgtctggctttataacatggatcttggctttatctgctatgtgatattgggcaagttacttcacttcattgtgtctcgcttgtctcatctctaaaataaggaaagcaatagcattttcctcagaatacccgtaaagcactcagtacatttggtcacctgacatcattatgattgcctctctgtgagaattggtaaagagaggacacaggaagtgaggagatgagaagagggaggataatctgtaggggaatggggaaggaggaagttgtaaattgggaggaaaatgatataaaaagttttgttaagaaagtcttgctgtatgctatacaattcacctctttctgttttctcaaaaagcaatcctcagtaaagacctacattacttttctctctctctctctatatatatatgtgtatatatatatatattatgtgtatatatatatatatgtgtatatatatatatattttttttttttctgagcaggatttgtggggttttttttcggggggagggggtggatgtgatactgtactaaggttggtttctaggtggtttaatgtaactcttattacatatttagcttagaggagtcagcaactccaccgcaaaggctgttgtgtttaataaccatctccattgctttggcaatctgtctgaaacatcgtaggcactcaaaacaaaacaaaccaagacaacttgaacaaaatgaaacaaataagtgaaacaaaatttttaattataaaagaaaatttagatgttaggcttttctaacaccaatcacagtatgaaagatgaagattacaaaccttaaccggcttagtacagaatacttacaaaacgtagagcagagtttctcggactctaactcctgacctcaagtgatccgcccgcctcagcctcccaaagttctgggattacaggcgtgaaccaccgcgcctggcatagagcagggtttctcaacctctgcactgttgtcatctgccggataattccctgtagttggggggttggtctggtgcctagtagggtgttcagcagccgacttgtgacttggcctccacccaccagttgccccccgccgccacccccccaccaccaccatttgagacaaccaaaaatatctccagatgttaccaaatgtcccccggggagaaaactcactccaggctgagaagtaccacattagacgtgttctaacaaaaattacctgtaaccctcacctagaaatgtaaactttttgtttacataaataaaaattacagagcacggctacattgaacttattgttccatagtcagttttttcttcactcagtaatgcagcattaacattttcgttatgtgatatccctctacaggatgagttttaatggatgctggtgctaacatcgtatgaaattgaggtaggaggcgggactctgacaccagaccagattgaggactagctaatcatcatactttacataaggaatccgtaggattggagagttgattgtttcaaataaggctggtttccttatttggttatttccttagaataataactccaaatctgattatttccttagaatacattcttatgagtagaactgcagctcaaactaaatttggtgctgtccagtggtatggcgatggacttcagaacatcctccactcttgccctcaccccacaagaaccctttactcgggatccattctcacgcagtcttyctccccgaccgccccgcgcgtccgctcggcgggatgacaaagaccgcctcgggtggggtggtgagcagtaccggcctcctccagcagggggcgctgtgggatccgccgctgtcygggacgaaccagcaagccgctctcggtccacacacgctctgtctgcctgccccgagtcccccgggaggccgcggggttyggggaagtgtttctaggagacggcgctcaccggctgcacctgcgccgttgacgccaccggggccggcagacagacccgcggcgctggctggtggagggagttcccgcttgctctctstcgctgtcaccgccctgtttctgtagccgtatggtacgcctgtgagaccggctgccggctgacgtctccttgcgatggagcatatccggacgaccaaggtagtcgggcgcgggatcgccagtcttcaggggccctgctctgacccggctgaggcaggaggagacgaaggctctgctggcctgactggggctgggagccggcccggcggagacccggcccggggcgggagggtctggccaggcctggtctgggagggcagggttagcttgggccaagcggggtgcagaggcctcctgtacctacaggagcaggggtcccactttcagcatcttggagtgcgtagggataagtctgggaaaactggtcaccgccctcctagctctacgttttctcgggcaaaattggggctcctttaactttggagtctttcagcctttcgttgcctcatcaaccggaaaaccgtcttcaaattaacattatgatgctgtgtaagcttgtccttgctcacatttcattgtcccgtgtcacagattsacagtacgagttttggaggaaccgagatcagcactccgctccacctccctttgctgtctcggtctccagtctttcgcatccggtgtttccgtgtctgtgcttcatacttcaggcattgtcctgtgtcagtagtcaagagttctggagaagggaaaaatgttattccatattttaaaaggtcggatgcagctttattcgattgaccttattgcactccatgcttaatttttgtgtgtggaagaccttcattttgagaacgaacaaatatttttatttcgttacaaatttaaaaacggaaggaaatgacatcagaatgttaccaaattacgtttccaacgacatttaagtttaactttgagagggagaaaaacataaatcgagacgagaagaataacattttaaaatcactgcgagcccactgcaaggcagcctcttgacgttttggcaaagctgaagccctttagttgctgcccatcttaaaattacggctcatttagggaaccacagatgttcgttatcttcattgttccaagaagaatttgtgtttttaaaaattttttaaatgtttcacaaaccttttaaaggtatacataaatttttattggagcttgtctttaacattgtgcataccgtatctagtaaaattgaagatgctgaaaactaaccccttaacatttttttttaagagaagaaagataaaataacttgagaattcaagttgtgggtacttaaattttgaaaatggaagggtgcttaagtctataaccaaactcgtagaaggtgcacagaggaaaagaggactagagtggacattggatcaggttcttgtattggttccagatatgtattatgtagtagctaagtgcacgtgacttccttctgcatcagttcgaacctcctctatttttcatatgctttctacggtgcatagcacacaatcgaaaaccggtaaaaggctgggcacggtggctcacgcctgtaatcccagcactgtgggaggccgaggtgggcggatcacttgaggtaaggagttcgagaccagcctggacaacctggcaaaaccccatatctactaaaaatacaaaaattagccgggcatggtggcaggcrcctgtaatcccagctactcagaggctgaggcaggagaattgcttcaaccggggaagtggagattgcagtgagccaagatggcaccagtgcactccagcctgggcaatagagcgrgactcagtctcaaaaaaaaaaaagaaagccgggtggggtggtatgtacctgtagtcccagctactcgggaggctgagatgggaggatggcttgagcccacgaagtggaggttgcagtgagccaagattgcgccattgccctccagcctgggtgacataattggggggggggggcggaaaagaataaaaaatcagtaaaagtaaactgaatctgatcaactagagcaaatcctattcttaggtggatgataagagtgaacagacttggaaaatatttaggatcccttggttattttaaatctttcctcattcaatttattatgaatatatatctttgtttttatttgtagagttgtagcccctcttattagctctttgaaagttgtcactggtgactttcattttgtctgatattcctccttatctaccaactgatgaacttttcttcaagtaatgctctgattttgacttatctttacacagtggtctcatgctagtggtttaataaggcctttttagagactaagaaatttctgatgaattgtctattaaaactacttttcaaatatgctcctttattactttgggttgtttttctagtattggatcactactctggagtaatattaagtgagtgtatgtagaccgcaaataaatatttgctaggtacctagtatgtgccagacactgtattgacactgggtatataacagcaagatagaggtggacctcagggtacattctgttaattgttgtggggactgtaacatgttcttaaattattaatgtattgggaaataacttacttttaaaagattggtttgaacatagccaaacttttgtttccattatgcatagccttcacctggatttagttagtttgctgcaaaaataagtgtaagtatttaaaaagcaaaagtggattgttttagatttattagctgttttgacctctatgtagtttagtcattaggatcaaaattgaccgtagagtgtcctttatgactatttagtgatttttgttgttcagtcagctctatttgaaaagtaataattaccatttattgagcaactatatgtcaatatagccaattatacaatattattactttataatatgtacaattgtataaatctgttaatttatacattatcatcactgatctcttaaataaccctgtcagttgggtagtattatctccatttataggtgaggaggaaataggcttagagaatttaagtaacctgctcaattagytcacaagagatagaattagtatttaaactaaggtgtgtttaactccaaagactatgtatgctctttccagtgcctctctagttttaatctaattgttaaatgtgcattagtattaattcagaaataaatgctgatgataattctaagagcttcccccccaaacctctttttgtcataaataaataatatttatgyggtattgtttttaaataatatttaggatcattattgcttgctaaccagagatttatcagattaagtattttagctgaatactaatgaacatatttatcattctgttttggtcacatttggtttactaactgtatagcatcaaagatgccaagtccctgaatctggatttctgaaagagcatttccaagctacacttatgaatcatgcagctactacctatcgctttgagctctcattttgccataatgacatagtcctgccaagaaacaatgagaaatatgcagagacagttctttatgcagtctttctcctttccctgccagtactttggctgacattatatattgatgtcaaatgatattgtcttacctgtgaatggaactttactgaatggaatggaagaaccttttttaagctataaatgaaaggctgattgctagcgtttgtaatcaaatggaatgtcccataaaaatctgatcctactaaggcccaaattgagttattccaaaagttatgcctaacatgttctttagcttgctccctctttttgtcattagaatgtgagatcatctatgtatgtatacaaatataccttccctctgaaagaagaaaggagatataaaaataagaatggatcaagaataaggagaaactgatattatttaaattgtctttgaaataaaagccaataggttttgaggagcacctgaatgcttttttccaagtaaagtgttgttttgattttcactaatactatcccattttacaggtgaggaaactgaaaccctgagagaattaataaaataacttgtcctggctcacacagttagttctaccaaagaagaggtggaggtgggaacttgaatgtaggtctttctgatagcaagcctattctcttaaccacactctcttgcctcacagaataataatctaatcaagagatttgattagtcagttggggcagtgtgagtaagaacagagaggaggggtggatagaagaagcttaggtggtcagatttttttctagtagctagctgaatgtgaggatctagtgtgagggaaaaggtctggccttgagtagatttgggagggagttgtttgtgtttaggtaaatcattgaaatttctattgtgaatgagtttatgcaaggagaatatgttgagactctgtggagaaaagtctaaacacttaaaaagggacaagcaggccgggcatggtggttcacacctgtaatcctagcactttgggaggtcgaggcagtaggatcacttgaggtcaggagtttgaaaccagcctggccaacatggtgaaaccctgtcttactaaaaatacaaaaaattagctgggcatggtggcgggcacctgtaatcccagctacttgggtggctgaggcatgataatcacttgaacccaggagatggagattgcagtgagccgagatcgtgccacggcatccagcctgggtcacagagcarcactctgtctcaaaaaaaaaaaaagaaaaaagaaaaaagaaaaaagaagagggcgagcaagcagaggaggagaagccggatgcatttggaagaggtgaagcacagatgggaaggtgacagtcttccgtgttctaatttccttctctgctccatcctctggctgcttcctcctccttgggccaggcactgttctaggttcagacaaaaactcctgcccttataacttatctagttggagaagaggtaacaataaacaaaattaagttcaatgtattgtatgttagatggtggtaaatgctgtggataaaaataaagcaagccagggctctgaagagtatgagggttgaggagggggtttaagggaggactgctataaattgagtggttagggaagctcttacagagaaggtgactcttgagtataaacctgaaactggtgagggagtaagccatccccacatgggggatggcggggagagtcccaacaaagggaacaacaggggcaaaaaccctttgagggcatgcctggttgctaagaacaagcaagacagctagagcagggtgagtgaagaagagcacagtagaagattaaagttgggggacaggggcaagttactgtagtcttgaaggccactgtaaaatctttgctttttttgagtgagataggaagccattgatggaataagcaaagtaagaaaaaactgaaaagtgcccactggatttacgatctgaggttactctctcccctcttgaggtccatgactgtttcatttgataatttatgcagccagacactgttctagaaattgggatacatgaacagaaaccataatctctgccctccacttcctgcacacaacttgatgtgctttctttttgaaagctaattcttggcaggatgtcagtgtgaaatgattctgagagtcctagatgagtgcctggctatagggaaggagtgcgacaagccagaggaacagtgatggtgcactttctgcttcagtagccacagygtctattgttatgtagttgtagaataagtacaactgttggtcacagaagtctgaagaaggccattggtcccttcctgtcccagaggccacttttcctcagggataaagaggtgtctgaattttctgaatgtgattctgtttgtgtgactccctgtgtttttcatttggaatcttttcttcttttttttcttttctcttcctttccttccttttcctttcctcttttctctttcccctttcctttctcctttcttctttgtcctttctcctgtctttctcctttcctttccaacaagatcttgctctgtcacctaggctggagtgcagtggtatgatcataactcattgcagcctctacctcctgggctcaaacgatcctcctgcctttacctcccaagtagctgggtctgcaggagcatgccaccatgcctggctaattagaaaataattttctttttctgtagagatgagggtgtcactatgttgctcagactggttctcagactcctggtctcaagcaatcctcctgccttggcctcccaaagtgttgggattacaagcgtaagctactacacctgtagtggccccaacattttctgagtgtgattctgtatgtgtggggttctctgtgttttccagttctaattttataattggctgaaatttgaactttctgcctggaccattagggtaccttttagtgcaggcccatagttggcaacaattcaactaaatagtccttaaagtaatgtgtgttggcatttaccattcctcaccaaagcgacatcttccaattcctttctccttgccacattttcgtttttcgtttgttctttcttttcccaaagtctttttttcttttttttcatttactttttggctgtgatgatacctataatttaaggatcctaatagtttcttagtacttcagtgttagtgaccrgaaagaattgtagttgcttcctaaacatctgacttaatacatttccaagaacagactggggaaaatctgtagcaacatctgtaaaatacttttagttccttgctgaaagggggaaatataaagaagcagttggtttttagaagttgactaagtctgtggtttgaaatttgtatgccaatgattttagcaaagaaaaacatttgatttcccctccttaggggtgaggggtgggatttgccacaaagagcaaaataatcagtgtattttctcagaaattctcttattttcttgagaactttagtgtaaatactaaataaatgttgtggaatgatttcagattaatttcactatctgtcacattcatatggagattacccattgaagcagttgtatgtaatgattttctgttatatagatttgaatataagttggtttatgctaagatagtcctcagtttgttatattaaagacattcctttcagacattttcttctctgtactactttatcttagtgaatggcaaccagtgtgacaagcttaaaacccttaaggaatctctgtttttcctcctttcttccttccgttatcagttttgttattatctcaagatggacttcctctctgtcacagcttactccaggccctaattatatcagccagtcacttagatggcttcattagcttcttacctggttgcccttaatcaactcagcattttctccacattcacactggaatgatcttacaagccatatttcctaatggactactgtgcttaaaaacctctgtatcttttttaatctacagcacagattttgtaccttaacatatggtttttttttcatcagataaacctctgctattgagacataaatgttatatttcctctgttgagaattttgtattttccctattcccattagtgaagaacattttgctgatctgtgctttcatcatttacagtagtttcttccaactatggagcaccttaaaatatggaatttgccttttaaactccatacgcatccttcttcctttctccatttgaacttatctggatagtagcttgacatagaggactgtcagggctctacctacttgactagattactaactacagtagttttgcaaatatttacttgagcacaaatattattgcttatatttattaggcaaataaagtacctgtattagtccattttcacactgctataaagaacaactcaagactgggtaatttatagaggaaagaggtttaattgactcaagttccacatggctggagaggcctcaggaaacttacaatcttggtggaaggtgaagggaagcaagacacgtcttctcatggtggcaggagagagagagagcaaagggggaaagtgtcccactttaaaaccattagaactcatgaggactcactgtgaagagagaacagcatgggggaaaccacccccatgatccaatcacctcccaccaggtcacttcctgcacacatggggattacaatccaagatgaaatttggacggggacacagagccaaaccatatcagtacctgacatttattatccaacctttcagtagctttctgaaaagagattattgtccttattttagagataaagaaatgagatacagatagattggcccttagttgatagccagtacatttttgttgagtgaattagtaaactctttcctgatagtatatatttatctacatgttcttcaaagatgtatgtgtgtttgagtgtgtgcgtgcatgtaatggagttgtgcatctgttttattttattttatgacagagtctcgctctgtcactcaagctggagtgcaatgactcagcctctgctctgtgcaacctctgcctccagggttcaagtgattctcatgcctcagcctcctaagtagctgggattacaggtgtgcaccacgatgcccagctgattttttttttttttttttttttttttgcagagtcttgctcttgtgcccaggctggagtgcagtgatgcaatttyggctcactgcaacctccacctcctgggttcaagcgattctcctgcctcagcctcccgagtagctgggattacaggtgcctgcccagctaatttttgtatttttagtagagacagggtttcaccatgttggccaggctggtttcgaactcctgacctgaggtgatccaccctccttggcctcccaaagtgctgggattgcaagctgcgcccggctgctaatttttatatgtttagtaaagcagggtttcgccatgttggccaggctggtctcaaactcttgggctcaagtgattgccttacctctgcctcccaaagtgctgagattacaggcgtgagccaccacacccggtagcagttgtgcattttaaaggatcaaagttgtaataagctcctttaaaatgtgggagaaatagataagctgaggctgttaatatttgggaaaagagcctaaaggtagagaaggaagctagcctcatgtgtgttaagagtcagaggaattaatttggagttaaagttagaagaaatgtcagttgcataagatgagcaggtgaacttatgaaaaatacggattcttagtctccatctcctcagataactgagtgaagttggggtgaggctttggatttgtacttttgcaaagttttagaggtgattcatatgaacagctaggatttgaatcctgtatagctgaccaaaattaaagatctaacaaagagaatttcagattattttgcatataaaactaaggggagtcaggaaataggcttagagtgttggaaagagcattttcaccacaaatttcccaccttgataagagacccagccagaaagaactatacagttctagaggagtgattttattctaatcgaatgatggagtggggatagaggattgaaagtccagacatgtactacacacagaaaaaaaacccaaaaccaaaaactgaactatacctatgtgttctactagtagttttctatttgcttttagtttgttgctggtttattcaagaattactgaatgaatacctactgttcacccactgtgtagggaaaagatagcagagagatgaggaaaagtataatgggataaagaagaatcttatttaataaatcaaatgatttcaacaaaagggatcactggtaaattgggcacaccttctggttttcacctgggggaataatttttctgtggccgttcatcttagttcaacaaacatttattgtgtcagacactctactaaccgttaggagatattcatgcataaatgaaagacagtctttgccctgggctatgttagtctttagtggaaaagacagatacatgaacagaggctttcattataatttaggaattactttaatagtggtgaaaggggcagatttaaaaatatttaggtgataaaaatggtaggaattggtgattgattgaatgttgggggttgagaagaagtcataggatcattcacggatttccagtgtgggtgacttgataaggatggaggagtaacattaactcacatccaaaatacagaattagaaatgtatttgtgaggggtgagaggggaaatcagttttgcgttcagtatgtataacacggctcaaacacatctaagtggaggcagtatagcatagtgggaaggtgttttggcttgggaatcagatcacataggtttatgactaagctataccactagctgcttctagctgtatgactttgagatgactaaccaacctcaccaagtcccagtttctgtggggacagtactagtacatactacacaggagttgtgaaaattaaaagaaataatgtatggtaagcacttatcacagcactaggcacatagtgagacctcactagtatgtcaggaaatattatctgtgtagcagacagtgtgaactcaggagacagcagagctggacatacagttttgggagtcattaaaatataggctaacataatgacagtaggtaagattcctatagagaatggacccctgaggaagagtaatagtgaacaggggatggacagaagaggaataaaatccaaatgaaaagcggtgtgattgttttgcatgtatagaagctttgtagatacttgtgcctcatagagaagttacaatttgaggtttataattggagcacaaccaggaatatttatgatcttcaaaaaatccacaaatttaaaatttcacatggatttctttttaaagcaaacttcctatttaaatagtaataaaatcagcccctccccacttttaaactacttgccagtagactttttaattttttctgagaagctatttgaaactctactgaatgatgtggacacaaattatttgcttgagtagtgttgatactttgtggtaacctttatttccatatatattcatcaactgtcttcttgttagagccttaaaaactttgttttaatagcttaggaaatgatatggtttggctctgtggctccacccaaaaagacaggtgagatctatattgcaataattgctcggtggtggttggccacagtgccctttccagccaagtcacgcacaatgaagaggagtaaacagtagttgatcccatttgtcttaaaaggtgtttaagtttggatttgcagtgtgttgtaaaatgaagctagatttttatttaagggagaaatagtcctaaacagtgaaataaatgttgacctctaagagaaatctttattcaggtttttaagtagaaagccttcctctcccctcccctcctctcccctcccctcctctcccctcccctcccctcccctcccttcttttttgagacggagtttcgctcttgttgcccaggcgggagtgcagtggtgcaatcttggctcaccgcaacctctgacccccagattcaagtgattctcctgcctcagcctcccgagtagctaggattataggcgcccgccactacacctagctaattttttgtatttttgatagagacggggtttcaccatgttgggcaggctggtcttgaactcctgacctcatgattcccctgccttagcctcccaaagtgctgggattacaggcgtgagccaccacacccggcggtaatgaaatatattaatatatgggagaaaattgtagaattaatgagctagtgtttagctatctagatgattttgaagatataaacgatttaaaaaactgtctgcaacctgctggtacacataaattaacttttktttgtttgtttgtttgtctttttgagatggagtctcactctgttgcccaggctggagtgcagtggcacaatcttggctcactgcaacctccaccgtctgggttcaagcaattctcctgcctcagcctcccaagtagctgggattacagacgtgtgccaccatgtccagctgatttttatatttttagtagaggtctcatcatgttggccaggctggtcttgaactcctgcccttaggtgatgcacccgtgttggcctcccaaagtgctgggattacaggcgtgagccaccgtgcctggcccaaattaacattttttaggttggtagtggttatttcactttttttcrtaaggatgaataacacaaagattcccagcagtagcctcctgcacattcctggttagccctagtcccactctccacgccagcagcaacatmgtgtgtgtgtgtgtgtgtgtgtgtgtgtgtgtgtgtgtgtgtgtgtatgtgtgtgtgtgtgtgtgtgtstgtctgtctactagtattcataaaaacatactatgtgccttatcagctcaggcagtagaggaggccaaagcagcataggacataatctatgccagggaattcagagctgcagaggaatgcaaagccaaaacataagtaatgaactgattttctaataaggattaatgttaggaggcaggatgttagtgagtcttgaagaatgcttgccacttagctaagcagaagagaccattttagaaacagagaacagtgtgagtaaaagcccagaggtggacaaaaaacaatcattgccctggtgtgggatagtgaagagaatatagagactaagttggagttggcaaccatttaaatgtttcctgatttaatttttctggtagtttactctaaaactagataataatatatttattttttgattttccaactttagataaaaatgttgactcttgggtatgaaaaatgtttttgcttatttgtactgtacccctgtttcttgctaccctcaatataagtgttactgttttttacaatgtggttctctattggttacatttgtaactgtaaataatctctatgttatttgtggcttatacattccccaaaaagatatatggaatttaacagtaagtattaaataagctcttatgattttaggaggaagaaaaaattgagaatgktgcatgtaagtcctgggctaacrgaaaaataatttatactacttttgaaatgagaaataatatctttttttcttttaggtcgaacaagtaaaattacttgaccgattcagtaccagcaacaagtcattaacaggaacactgtatcttacggctacacatctattatttatcgactctcatcaaaaagaaacctgggtaaggaggaccgcagctgtactatttatcataataataatggacttggtctgtcatgttttattttgaatgtgtataacacaatttttaatcattggttacctatctcaacyaaaatattttttggtctccagatcactcctgccctcccttctaataaatcagttatagaatatgtaacatggaattctataaaataccacactcttatctccataaataattatgaaatacctgttgttcctaggccggatgcggtggctcacgcctgtaatcccagcactttgggaggccgaggtgggtggatcacgaggtcaggagttcaagaccagcctggccaacatagtgaaaccccatctctactaaaaatacaaaaaattagctgggcatggcgatgggtgcctgtaatcccagctacttgggagggtgaggcaggagaattgcttgaacttgagaggcggaggttgcagtgagccgagatcgcgccattgcactccagcctgggtgacagtgtgagactctgtctcaaaaaaaaaaaaaaaaaatcctattgttccttttaatttttaaaaatctaaaaaatatgtacacattaacagatcaaacggattgtttggtatattccacagtgtttttatacaaattttaattagggtacttattttttttgctagtataaatgttgcaatgtacatatacatgtaaacaacattttgtgtatttatatgagacatatgtatatgtttctttctgtatatttgccagagtttctctgggatatttgtctgggagtaaaattattgggtcttgaataagtgcatatataaccttactaagtatgtcacctcttcaaaatggttgttccaatttattctcagtagtgtattacacaatgttgtacatcctcaacaacattgatattgtcaatttaaaattttttgcctatctagtagatgtccaattgtaatgttaatgagctgattataaagaatttacccttttcagataaagaaaaaggaaagagtttccttttctttttttattgggttgtttgtcttttattgattttataaaagttctgggctacaaatagaattaccattcaacccagcaatccttttactggatatatactcaaaggaaaataaatcaaccaaaaagacacgggcatttgcatgtttgttgcagcgctgttcacaatagcaaagctatggaatcaacctaggtgcccattagcagtggattggataaagaaaaagtggtgcatattcaccacagccataaaaagagaacaaaatcatggcctttacagcaacatggatgcaggtggaagccattattctaaatgaattaacacaaacaaaaaaccgtatactgcgtgttctcacttataagtgggagcttaacattgggtacatacgagcacaaagatgggaacaatagacattaatagactaatagaggtgggagggagggaagtagaggaacaagggttgaaaaactacctcttgggtactgtgttcactgtctgggctatgggttcagtcaaagctcaaacctcaggatcattcagtatattcatattacaaacctgcacatgtacccactgaattaaaaaaaaaagtattattcaagaaaacaaataaagagttctaggttataatgctttgtcagatgtgtgtgtcatagatagcttttcccagtgtgtggcttgtcttctctgttttttattttatatgtctttcagttgaagtttatatttttaatgttatagatttttcatttttttcttttattgtttgtgctctgttgtgacttaagaaatcctttcctatgtcaaagtcataaaggttcttctatattttcttctaaaagcttaagtttgatcctgtaagttgttaatacatctgggaaatattttggtgtatgatgtgactagggattcatttttatgttttcgtatagacgaccggcgccatttattgactgtttcattccattcgtctttggtaccagctctgtcataaaaacatcttccatgtatgtgaggctctgcttttgagttttcttttctattcrtttggtatactgactacactgtaccacactgttttattgactatagcttttaaataaattttgatatcaagtagagcataccctcccaacttgttcttcaaaattgccatggctattttggattctttgttcttccttttctgttttagaattcatttagcacacatttattgagcatatacagtgtgtttcatatcactattctagatattttggaaacaatagccaataataacaggtacaaattctatcctcatggagccaacattstagtgctgaaagatattgataacatcaccaataagtaggtagataagtaaaatacatagtgataagtgctaagcagaaaaagaagtaggaaaggtggttagaatatggggcttgtgtctctgtgcctgagaggaagagacttgggcatgtttctgtgccactagctctgccagcttttagaacctccactttatagatgaagaagctgaagctcaggcaagtggcaattcattcattgttacacaggcagtgtagagtagtaaaakgagctcacgtagactgtgttgtcaggtagctttgggttcaaatgtcagctctgctgttcactgcttgggtgactatgtcagggtgcttttggctgtaagtaaatgaatacctgactgaacatggtgccaaaccttgcaaagcaggagaggtgggtaggctttcctcagtagccccatcgcttatcagggaggagaagctctctcagaaggcccccagctaactttccctaacatctgattgtttgaaaatccggacacttggctactcctacctgaaaaggaggcagagaatgtagatcctagtattttttatctcttgagggaaaaggatgttgcaagtaaggaagggggggaggaatggcagaccaacagtgtctgccaaaaagtatgtaactttcgagcttagcacccacataaaatgggtatatagcatcagtcatcatgtagggcttttgtgagtcttagatgaaagaaaatatgaaaaacatctgtgcgtaaaacatagtagtggcgtaaatcatagctgctcatactatttttctaagcagttgaatcaagattagaggtcaattatgcctcccagtccagagattgatgttgctctgtggtacacccctgtactgcacatactgtcatactgttctcttctctttctctctttgattgtactcttctgatttccccaagaaggctaaccaattgatatatgattctatatcagctgttaaggaaactcacttgagatactgatcttggagaagttgtattccctagaggcactggatcccttcttcatccagtgtttgtccaagaattgccaggaattttacctagcagtaccttctgaaataattagtcatattatcatccactccatctacccctcctttgtccacttgcttcagtattttctctattatccatctcgtagagatataaatgaaggcttcccgtatagctattccctcagctgctgggaatgtagtttgaggggcaacaaaaagatatctgtgttattctctactctcctattgttgtcttttaaatgctttcttatcagtatattcccttatgtttgccctaaatgaagtttgtttaatatactagagccatagaaatgaacattttagatccagaaggggccgtatcaaccttatatcctttttctcactttacagttgattatgttttcaaaatcacataactagttagtggtaggaccaggtttcttcatcattttcttcctgcaaatacttttgggtttttataattaaaatcagaacagtgatgtacaggttgaatatccccaatccaaaaattcagcactgacatgatgttcaaaggaaatgctcattggagcatttcagatttcagattttcagattagggatgtcaattgataagtataatgcaaatataccaaaatctttaaaaatccaaaatttgaaatacttctagtcccaaacattttggataaagggttctcaacttgtaatattacagttagcttttattccttattctctgtttaaatgttattattagatcatttttagtaacttgtcacaggcgcattaatataagtgataatggtgctaaatcttagccgtaaggactatatatgtgtgtgtgtgtgttaattatttgttctctatgtagttttaatttccattgacaactgcttctctcattgtttttcaagcttttcttgattatttaaatgcatttaattttgcaggtgaactttagatttaagatgtataattaatattaacatataatgtaataattacataatatatgtgtattatataaataatcatccctcactacaaaacaaagcagattggaatttttaaactgaaatttatgttgaatttttagattaatttgggataaatggatctcttgcatgattaggagcctatgatcttttattctccagaaaagttttctataaatattttaataggagtgttattaagaaaaagtaggcatttttagtagcaaacaaaatattattggtagtaggtgagaacaataagcatatgtttaaaataccatcaagtattgagtttatagtaggactttttattcattcatttagtaaactcttattgtgataaaggaggtatcagggatgacatccatatttctggcttgggcattcacatttaaaaaattaaagttgaagtgtgtgatatataacatttgcaagctttttgatttgaggagggcaattataatgttccaggtactgtgttaggtgctggagatgtaatgttgatcaactctgcaccatgccacccccaaggtcctcagcctccctcctgtgctcatgggcacccaaagtttcagcctcagaagcagtttccagaggggccaaggcagctaggggctggtgtgtcagtaccgccccaagcacatgcacacccagctagatcacgacagtatctgggcttggctattgggacatgtccacaactttgctctaccacagaacaggcagtgggagttgggagaggccagggagtgggagcaggcacttctgaacctgcagggggagggggtttcctaggcccccaagagcacagggatgcctgggtccagagccatggctgggcggctgcagctgtgcccgggagtgtggctcctgccctgccaactcggtagggtatggggcttccactgggatcacctgttcccaggtcttgcctgctctgcagagcgcgcaaccctggctgcacctcccccactgcagctggcatcctcacagtggccttcactgtgaaggaaaagtatagcttgatctgcaggaagaaaagggagggggcctaacttacttggaaagggttgtggggcatgtcaggctacgcttttggtgttattatgagttttgagcaaagaccagaaatgtgtctagaagttcttagatgaagaggtagtgttaacagtattccagttagtgggagcatctgaccatgtgtaaaggagctcggtgcatttgaggagccaaaagaaggctgttgtcactagaacatagtcagtgatcgggagagggactggaaatgactagattcccttccttttcttaatctgcttttcaatgttcactactgtgttgtagaaaatggatcagagggtcaggggtaggtatggagagagcatttaggaggctgtttgtttatagtagttcaggtgagaaacagtggggacattacaactagggatgtgacagtagagatagagagaagtagatgggttacagaaacatgtaggagatgcagttcccagggtctgataatgtcttgagtatgtggactgatggaggagggatcaragtgacacccatatttctgacttgggcattcagtcattttaaaaaygtgaagtttgagtgagtatgtaacattttcaactttttttgaggaagacattcttaaacttatgcattctagaagagaatatttagtgctttccatgttgatgacctggatgttttttcatgctgtagatattacaccaccatattgcctcagtagagaaacttgctttgactacttctggatgcccccttgtgatacagtgcaagaacttcagaactgtgcatttcattgttcccagagaaagagattgccatgatatttacaactctttgctwcaactgtcaaaacaaggtattgttcttagagaccaaagcttacatgctcaatttgagatgggttatctaagatactttatttaatgttttwttattgttattttatccttttttgctctgacagtcaggttcttttgtactctatctcccccatattggcctgaaagtaattagaaactattgatctgatataagaatggtgtcatcagaaggggtaatggtaaggaaaaagtaaagcatttatagtagagacttacaaaaccacaggtttatattaatcttttaagtctattgatggcaagtagcacratgtattttttaagtgggtatttcacaatcaaagagaatgacttggaagttgatattacggaatgataaaaggaaggtcaaggtcctttggtggcagtgggactaaaatatttaatagatttgagtgggagatacagaagataagcagagaaacaagagagggtgaattctattttagtagaagtaaggttgagagggatagcagtcctaaagaagaacctttttttttttttttttttgagatggaatcttactctctcgcccagactggagtgcagtggcacaatctcagctcactgcaacctccgcctcccakgttcaagcagttccctgcctcagcttcctgagtagctgggattacaggcagccaccaccacasccggctaatttttgtatttttagtagagacggggtttcaccatcttggccaggctggtcttgaactcctgaccttgtgatccaccctcctcggcctcccaaagtgttgggattgcaggcatgagccactaaagaagaatcttatcgctacttatgccctgtggatctggtgacttccttccccaaacatgacttgaattatatgtcggactggattttggttgagcaatctggattgctgcctgcaagagtggtctcagagcaggtctttgttcattcttctctctgagcacatcagcctgtaacatcctattgtctcaaattaagccagagtttatagtaaggatgattctgaagcaccccaagagttctgtgcaacagttgccatttttagtcaacagtgtcctatagggatgtrtaatgcagtttcatgttctgtatctgtctctagcttctcattataacattagtctattttacatctcatttgggaaagtgattagtaggaaatgtctattagtgtctttatcattttacttttaagaaaaatactgcaatagaggatttaacatgtaagtctaactattctgactgtatttattagctttacttttgttgatgacaaatccaatctcagattgatatgtgtgctttttaggtataatmatttgcatactgaacatcaaatgtattcaggtattagccatctctttgaagattgtaaagagaaaaatgaaggaagaaaactgwaaaattacatttatttgtagtgtataagtcttataaattgcacttaacatttaaaattttgtattctgtagcaaaatatgaagatctctatgcattttcttataatcccaaacaaaatgattcagaacgactacaaggctggcagctcattgatctcrctgaggaatataagaggatgggagtgccaaactcacactggcagttgtctgatgccaaccgggactacaaggtaccttaacaacattttggagaaattcagaaagtgttagtaccagagggttagagagtgtcagcgtagcaagttgtctgtgtactgaaatgtgctgttcttgcatttaataaggtttaaaggtttttaaagtggttttgaactaagaatacaatgrttatgttttgtttgatatttacagatttgtgaaacttaccccagagaactttatgttccccggatagcaagcaaaccaataattgttggtagttccaagttccggagcaagggaagattcccagttctttcctactatcatcaagataaggaggtaggatgcttttcttttgattttagaaataaagtataactcatcttcaggtttaagtatctaaaataacactttttttttttttttgagatagggtctcgctctgttgccgaagctggagtgcagtggcaccatcttggctcactgcaacctccacctctcggttcaagcagttcttgtgcctcagcctcccgagcacctgggactgcaggcgcgtgccaccatgcctggctaattttagtagagacgaggttttgccacgttgaccaggctggtcttgaactcctgacctcaagtgatccacctgccttaacctcccaaaatactgggattacaggtgtgagccactgtgcctggatcaagaacactattttttacattaaaagattgctaatggagaagcactggctttttgtttaattacgtttttgcaaatttaaaacaaaactactcaaatacagaaattttcatacttcttgtcatcttttcttgaccctcccttccttccagcagtgacttgaaaataatagaattagttaacagataggatcctctttctttcctgtggttctcttttgattctgcttgtgtttgggaaaaccagatagttttgataagacaaccgctgagacaagggagagaaccaagggcatttcagggtcccattttaatagtaagctcaaatcaaaaggattttgcaacatgaaacagtggaggaggcatctttatagtgagatgctgtaataagggttgcttatattagtaaaacttacctttgtagcctactaatagaaggccaagaggtactgtatgttaaatggtttacatgtatgtcttcctaactttgtaaggtaggctttactaattacctgtaactttcaagtggggaaactgacattcaaagagggtaaattacttccttgtctcacagcaagtaagttgaggaattctgtgccatttctgactcccagtcctttgggacctgattttgttttctctgagaacttttagaatcctctttttccccagtgttctgaaatttcttttttttttttttttttttttgagatggagtttctcttgttgcccaggctggagttcaatggcgtgatctcggctcacagcaacctccacctcccgggttcaagcgattctcctgccccagcctcctgagtagctgggactacaggcgcctgccaccatgcccagccaatttttgtatttctagtagagacagggttttaccgtgttggctagtctggtcttgaactcctgacgtcaagtgatccacccgcctcggcctcccaaagtgctaagattacaggtgtgagccactgcgccctgcttgttctgaaatttcacagtaatgtctttttaaatctcatccagaaactcaggtctcaattttgggaatttgcttctctatttctttgataatttcctctgttctattaattttctttgtcctttttatttattagttgacaattgggctttgtagaataaacttctacttttttaaaaactttctcctttatttttcatttttttttttggattttctggaagatttcctcaacctcatctccagtctgtgtcttagatcctttttttgctgtggtgtttttaatatctgagagcttttcctattttctgaaatttttaaagatrgttttctattcctggatgtgatgttttagttctttgaggatgttaaagatttaaaaaaataattctcatgcttcccacattagttattgttttgctcagagttccatttttttctatttatttagtgtttttgtctttcatgtctttcaaatacctgtttcttggctgagttctcatattcaagctgttttgaagtttgtgtgcaggaatggtttgtatcttgggattctttctttgttttcttttttcttttttcttctttgagacaaggtctcgctttgtttcccaggctggagtgcagtggcacaatctcggctcactgcaacctccgcctcctgggttccagtgattctcctgcctcagactcccaagtagctgggattacaggcatgtgccaccatgcctggctaatttttatatttttagtagagattgggtttcaccatttggccaggatggtytcgaactcctgacctcaggtgatccaccggcctcggcctcccaaagtgctgggattgcaggtgtgagccaccgtgcctggctttgggattctttctgttgtataagttggtttccttaaagaacaaacctctaattttggtcccaatgtgtatagtaagtctggccatgatccaagggtgagaagagtgatgtcaggatttcacattttgttatgtagactttacttaatgctcctagtctttgtgagtatagggcttcacccctgcccacagctgtgtctattgtctatagagtcttcaggttcatccttatcatggaataaactttgtcttcaaggtaagggagaatctggtggtcttagctagttctcgtacaggcattcaagcagttctcctttttttcagttatatacctgctcaagccttcagaggttttgagccttttgagattttgctgcacaaaataccttgcttcttactgacttaagggagttagcagctttctttgtcctgtaaaattggttatcacttgctagtcagctatcatctccccaaattttattgacatctctatgtcttttttcccattctctttgtccctgtggttttatgcattttaactttctttattcgaacctgacttggattttgggaaggagcagaggcaaaggggtaagggtttagacagaagtttctaatctgcttttcacaactaaatcacagagagrttaaatggttatggcctctcttgacacagccatatgtgtaaacattgtttattggaaagttgggctgaaaatagttattctgtgaacaacttaacaaatcagaaagtaggtctgaaaagaatttaataaggcaatgttcattttctactgttttatcatattttcgtggttttattttgtgagtttaaaatatgcaattgtgtgaatttgcatgtatttttgttttccattggagaaaaagtatatggatctaaatcttttaaatctttttttaggactttaaacaatagtaggctgggcatgatggcttatgcctgtaatcccagcatgctgggaggtgaggtgggcagatcgcttgagcccaggagttgacaaccagcctgggcaacatggcaaaaacccatcttaacaaaaaatacaaaaattagtcaggcgtggtggtgtgttcctgtagtcccarctaccctggaggctgagttggaaggattgcttgagcccaggaggtcaaggctgcaatgagctgtgatcacgccactgcattccaaactgggtgacagagcaagaccttgtctcaaaaaccaaccagccaaacaaaaaacagtaaataatgaatccaaccactcactacttatagataattcttgctctattcgattgactgtattttaactcaaatttgaattgaaggtcatttttctcattttatattaagattgccgatttctaattagagatcttaaaacctttagaaagtaaaagttccagtgttgctacttaaaaattcttgttctatttttattgactaatcttttacttgaacttcagttggaaggatcctgtaatctaaatggagcgcagaatgaagataacagtaggttacttcacagagaattgactgggtgttatttcttaggacccaggtttcttcatcaaactagataaggaggtatttagttttcttatgagaatagaatattgggaaaacttaggaatgtcaaaatattgaaatagtatttaattcaaagaggatcttaaagttaatgcctcctaattatcatatttgattttaacacttttggcttttttttcttgtaagcatctttaaagacattttagagatctttgcataatctcttttctgtcctttaaaaaataggctgccatttgtcgatgtagtcagccactctctggattcagtgccaggtgcctggaggatgaacatttgcttcaagccattagtaaagccaatccagtcaatcgctatatgtacgtcatggataccaggccaaaagtatgtattttaaatacagtacagtctgctagtttaattatttttattactttacttaatgagagttaataaacttgcccatatttaaaatatctgaatcctagttttaaattaactaaggctaatgatactaaggaaatcaatcctttatttaaaggataccaatttagaaaaccaatttctgagtaactcatggtgatttcttacatcttctgatatatataaattcaggaaagctgaattgtatattgagaactcttgctagtatataagtcttatgttattgtgaagaaataataaaatgtgtgttatgaaaaataaattgttactattcttttttttttttttttttttttttttttttaagacagagttgcactctgtcaccctggagtgcagtggtgtgatctcggctcactgcaacctctgcctcccagttcaagcaattctcctgcttcagcctcctgagtagctggtattacaggcacgtaccaccatgcctggctaattttttgtatttttagtagagatggggtttcaccatgttgaccaggctggtctcgaactcctggcctcaagtgatccgcccacctcagttggcctcccaaagtgttgagattacaggcatgagccactgcgcccagcctaaattcttattattcttttttgaagaattttcaattgacaaaacatttttatgctaaaataatggattttagcttgaaattttcaagaaaataaggaaaacagttaacttaggaaacattgaactagagaattttaaatagtgaacaggaatttgggttatcttaggcatcttgtgtgctatggggccaaatttttatcattgggacaaatttcagagtcccttcttctttttattaacatagttaaacaaccagttcatataggrtcctgaaactaaaataattaaaatcctcagtggtaatagctaacgttacttttaatttttgttatagcgtcgcatgcagagctggtgggctacacaaaaggacattggcagaattatagtgaggatttcttcaaaaatccagaatgatgagaaaataagagaaagcaatgagaaaaagcgagtgagcaatatagaacgcaagtggtttttaggcagctttgtgaaaggaatggtcactattttagaagtgattctcatcattatgcaatttcacaaaagataatttagaaaccagaagaagagattaatttgagtaaattgtactttgggaggccacggcgggtggatcacctgaggtcaggagtttgagaccagtctgaccaacatggagaaactctgtctgtactaaaaatacataattagccgggcatggtggtgaatgcctgtaatcccagctactcgggaggctgaggcaggagaatcacttgaacctgggaggcggaggttgtggtgagccgagatcacgccatggcactccagcctgggcaataagagcgaaactccgtctcaaaaaaaaaaaaaagaattatctggctggacatggtggctcacacctgtaatcccagcactttggaaggctaaggtgggtrgatcacctgaggtcaggagtttgagaccagcctggccaacatggcaaaaccccgtctctactaaaaatacaaaaaattagctgggtgcgatggcaggcgcctgtaatcccagctacttgggaggctgaggcaggagaattgcttgaacccaggaggcagaggttgcagtgagccgagattgtgccattgcactccagactgggtgacaaaaaaaaaattaataattatttaaaaatagaaattgataacttgataatcttttattaaaaataaaagactttattaggagttgagagtgttggtgatatctcataagaaaaattctggaacacttttttgataatattagatataaaaggcgattgtaatatgagactttttgaagatgaggtctgatacagtgatttgtttttcaggacctcatagttcttatttgtataattatcttcttcacagaaaatatatcattctttgattgttttactagttaaatgtaactcaagtagtaataatgtggaagcattttttaacatctaactgtagattttactttaggtaccgaataactagtgagtcagtaggatacaatttaactgtacttgttaccaaactgaggtccaatccacaaaatgaagagctccttttcttctaatttaggcttcgttttatccacgttcataagaatttttaataaattgtgttaacatactatatgaaatcctagcctggaagaattaagcatgacaaatcctaagggaccactgacaacattttgatctaatagctaaagaccatgggcatatgagcaatctgttttttcctggagaccagtttatttttggcccaattctcagagatgtatcaggatagccgattatatgccatattatatgatgtatgggcctccaataatctctcatataatctccctcaagtaatctgaagcatatttcagatctgattttcaggtccctatggctctcagaatgatcaatgccctaggcttgttctgaagtaaactcataggttcattctgtaaaaggaaagtccccyagccagctctgctcaactgaatcatttagaaattagataggagacatttctttctttttaattttaaaatattacaaacatatggaaactgcctaaaatataaatgaattggtttcatgaacttatgggaactttgacctttccattatatagcaatcgtattactttattatctccttcattactatttaataatgtggcatttttacttactaaaagatgaatggtagcttattcagttttgatgagttcctttaaactgcctcctagctaaaatactgcttatttaatattttcatgacattttggtaaattaaaaaagtaatttgtctctaaatttctaaaacttttaattttagctgaatgcaatggccaacagagcagctggaaaaggttatgaaaatgaagacaactattccaatattagatttcagtttgttggaattgaaaatattcatgtcatgaggtccagccttcagaaattattggaaggtatattattgcttacttttttagacacccttgtccaaaagaaatctaatgctagtcacatgtaatttagaattttccagtggtcacattttaaaaagtaaaaagaaacaagtgaaattaattttaataatatccttacttaatatattataaacattattttaacatgtagtcaatataaaaaaaatcagtaatgagatatttttcttttcatcaactcttagaaatcaggcatgtattttacacttactacacatctgagtttggacaagccatatttcaaatgtttagtagccgtatttggttagtggctgctgtattagacagtacaattctaatggttttgcaaaaaaaatgttattagatagatattcttgagtagtcagtacaataaatactaatttgtartaatgttcatttaaatattccagtcatagtatagaatttaaaaaattaaaatataagatkatttttagttagatgcttgtgctacaatgttttttaagagattggagcatttttgtaagcacgggaataatagaaaaatatatccaagaatcagttattgagcttttaatagcatcttttcatttatagagtcttgcctgtttattttgtcttctttcttcattcacttatctagagagatcttgaaaaaagaaatgcagaaactctagccatattctaattgaaatatttttatacctctttcagtcaatggcactaaagggctttctgtcaatgatttctactccggtttggagagctcgggatggcttcgccatatcaaagctgttatggatgctgcartcttcttggccaaagtaatactttatctttcatatttggtcttggggtctataatgattgggaaggagtagatgtattctgttgggggctggtatctattcatcagataacttttattattttttacctctttaatgagcttcactttattttcagccttaaaaatatcatgtagcacttaatgtagaaacttaaaaagatgctcctaaatactttgaagtggcattttttctttgttttttttttgtttgtttgcttgtgtttttgttgttaccatattttgttgtgtattttggaaattatgctgtgacattatcattgcaggcatagcacttccttgtaacacaatacctgctagtatgattttcaagtagaatttattggtttaccttaaagtacgctagaatgtatgtgatctttcttttcaggcaataacagttgaaaatgcaagtgtgttggtgcattgttccgatggttgggataggacttcccaggtttgttccctgggttctcttttattggattcctactacaggacaatcaaaggattcatggtaaggatttatttggttagaccaatggttcttaagtaggagtaattttatgttcctccagaggacatttggcaatgttggagacagttttgcactaaaggaaatgatgagactggcatccgtgggagtggccagggatattgctaactaaacattttataatgcacaaaatttttgctggggggtcagcctcacagcaaagactgatctggcctgtaatgtcagtactgtcgaggttgaaaaaccttgaattagacttatttccatttgtgctaacactgacaataagctttagatttaaataattttttttcctaaaatgttgcaatggaaatattcagtattttctccctcatttttatctaacaaatgtaaataatgtrataaaacaatgcacaaataagagtacttaaaattaaattctgaaggaaaccttctatttaaaacacctgcattagtaagtgtaataacatattaggcatgttttatatctgaagataaaatttctagttgaatagattttctcctttgtgaagataaagacctagttccttttttttgtttctttgcttttaaaggtatgatcagatttttatttgcttgcttttaaacgtgtgagcagattaacttatgttttcaaaatttacatcttaactcatggtaaattaaatgaagagatgttagaaaattttcattagtcttgaattattaaatacagtgccatcttaaagcaaaggaagatttaaaatcaccagtcccttttcagcaccgctattttttgctgctaacataccgactctgggacaggccaagcgggagtgctgctaataagaaaataatgctcagcttaccttgagagtgtacgataaggaatattttctttgccatgtttggctttaattatttgttagacatccaaatgaaatcatgtaataaatggggatgatgtgagagcttcccaggcaataggaacagtgtaaatcaaagcataacctctttgggtgactgcaggtaatgtgtgatggatggagttcagagtgagtattagaatagggggcttggaggcagaggaatagagtggggtcagggcctgagaaagagaaggctggaatggggctttcccctctttggataatgggagctattaaagagttttaaacaagcaaacagtaacttgattagatgtgctttttaaaaaggtggcttggtatcttgaaggccaaagggagtgggaatggaggctaggaggcgagtgtagacactattatgataacttatgagacaaaagtttttaattttaccaaactaaaatagtaacacacaagtgaagggggaggtgatgggttccagggatgtttagagagtagagtcagtggctgggcgcagtggctcacgcctgtaatcccagcactttgggaggccaaggcgggtggatcatgaggtcaggaattcgagaccagcctggccaatatggtgaaaccctgtctctgctaaaaatacaaaaattagccgggcatggtgatgtgtacctataatcccagctactcaggaggctgaggcagaagaattacttgaacccaggaggcggaggttgcagtgagccaagattgcgccactgcactccagcctgggcaacagagtgagaccctgtctcaaaaaaaaaagaaagtagagtcaggaagaattgatcatggattggatgtgggatagaagagaggagtcttcctctgggatgatttccaagtttctgaattaggtgccaggatggatggtgctgctctctggctcttcactgagataagccaaagaatacatttagtgagaaagatattgagttatgctttaaacatggttttgtagaagaatggcagagagaccagaataaaatctgtggctccagccacaaggtcacacaaagtggtgaagctgggattggagcctgtgcctgagctccagcgactacatcctcagccacatcagtgtatagccttctgcggaaagcagaggcttgagacaaaatcagagaagctaaaaccagcagttttgacactatgaaaataatgtgcttggtgactgtatagttaagtgataaagtgtactaaatactacaaatatgtgtttagattagactgaaaaagttagaaatctgtttttacagtggagtgggtaagtagagaagctgtggcaaggaaaacataaagtcagtccattcaagaggatagatgttaacacttggatctgaacatgaactcaagtaagatgatttgattaaaataattggtctttttatcattagtttttttttcttaaaaaaagtagtatataaataatataaaaaatgtacaagtaagccaaaagttttaaaatatccacctcagtctaccacctagagttatcctttgttagcagttttggtttacatttttctagcctttttcctatgatatatcatcttcatacatacaaaaacttaaatgtaatactgctttataacatgtacttttcacttaaaatgtaataaattcaacggaaataatttaagtcacgaaactactctatttctttttatgcatttttattcttctttaaccccacctcgaatcaaggttttggcattcttttgcctgtggttttttgtgctgttttgtttataagttaaaagtgtacagtaaatactgtttttaaactaataagatttaatccagcctaaacaaaataattgaaagtagtcagaaagtgaattttactttttctcattaaggttttaatagaaaaggattggatctcttttggacataaattttcagagaggtgagtcacagttacacagtcatatattttataaaattagtaaaccaagtttagaatgccaaaatgtttctgttccttatgaactcacatgcgtgatgggaggtaagagtgtcatggtttttactgtattttacgtaaagacatttaatttttttctgtaatttctttcaattctagtacgcttgttaattttcatgactatttattaccttccttttgggctgcattttatttagagatggtaacagatcctttaaagctgtggtttaaaaactcataaatggtttcaataaaaattctagttttgcatgctaatgtaacagtgctttaggaatatttttgtatgtttaagattaacaatacctgaacaatggacctttcagaggtgtttttaaaagcttatactttctgtggggttaggtgtggccagttggatggtgacccaaaggaagtctcaccagtgtttactcagttcttggaatgtgtgtggcatttgaccgaacagtttccacaagcctttgaattcagtgaagcatttcttcttcagatccatgagcatattcattcatgccagtttggaaacttccttggaaattgtcagaaggaaagagaagagctcaagtaagatgattcaattaaaagagtctccttttccccctacttagccgaggtctaacaaaaatcatgtttgaaacttaataaaatatcttgacaatttgaaagtttattgtaaagattttattttttgtatttctaaagctgagtacccttctaatattcccccacctttcagctaatagtaaaagcacattataaaatgtgttttgaagtgtagcatacatacagaaaagtacatagagcgttaagtgtgaagctcagtaaatcttaccaaactcacacacctatgtaaccagcacccagaatatgaaatgttgtcaacaccctggaaagtctcctcatgcttcttttcggtctgcatttatatattttagaacagagaaatccttatgctgtttaatttcccagaatgtatcagtcgctagttttaaagtgtaaaatattttaaactgttggtttgttttaagataggatggagccttatagctctccccacatttctaaacagacagttctttggggaaaataaatctagctatgttggctgcagcgtgtccgtccttgagtagggtctcagaaaagccctgagacactacttgaccctagttcatgttatttcctgaccagtcttcggggataggggtttttgcctaaattttgctgtaaggaagatctctggagtaggtcttagaggtcctatgtatattgttttaggttgggcttctgagtttggatttctttattgcctcttacagtaggcaataaagagcacttaacagacttttgaacatccaagggacatattaaggaagctaaatctggtagtatttgaagatagccacatgctcacactcccaacagagtaaacagcagaactgagagcatgtggaaaattctaaaaatgcgtaaagggaataaaaagtgaatagagaatggtggagatgaacaatcaaagaacattgaggctttagctctatgttacagtgattcaaaatagtttattataatttggagcacagaggtaactcttttcctggagtacagagctattttaggaaaaactattcttaattagtgccaaacattctcaaaaatggaaagatggaagtaaaagtagatatttcctagtagtttttctccaagacacacctatgggtcatcttaggagttatggaaaaatcaggagattttccactttccccctggatacctacattatgtttacttggtaaatgtccagtctaaaaccattcttacctttgcccagctactcttagatttgcaaaataattggcttttaaaattcttgcataacatcctgattttgcctgttccctttttgtacccactcacacttacgtgtgctcctgccctatgatactcgccactacggcccagacgtggggttaagagaaggccagacagaaagatgcattagtgtcttgttctatgtgtatgtttgtggtgatttgaagtaggtggaacagagaccaagtttttgaaattgtgtgagttgagaggaatcccttaaaatatatggttgtgagagaaaatgttatacctgtgttgtgttcaagaaacatgactttattacctaattatgaatgaaaaaggagaatagagataatacagaattctgagacaaggttagactgtgaatacaagaaaaaactaaaatttaaatctgcttcggaagccatcgcctgatttataaaaatgaatattaccattactactttgcatctataggaaagatctctgtgtttttctcattatattaaggttgaaggagaagacttattccctgtggccatttcttttggaagaccaaaagaagtacttaaatcctctctacagttccgaatctcacagatttacagttttggagccaaatacagtatctttcaattttaagtaagttgacatcattggagtatttatacttgaattttctcaaacacaatttattgaaacttttttttgtcataaaggttttggaggaacatgtaccatcartttgatcgaacactgcatcctaggcagtctgtatttaatataattatgaatatgaatgagcaaaataaacaattagagaaagatattaaagacctagaatctgtaagtattctgaagtatctaatatatttggaatgtgaaattagtttacgattagactaatatttgtattgttggtgtaaatcagcacataaacttctgaagtaagcagtttcttcaaaatcaggtcatccctactttgattgaatacgttagttcgaatcactttctttgtattttaaaatacattaaaataccggaagtatatagcataaygtatagataaacataataactatctgtgtacccaccagctagcttttgtgggattttaacatttactatatatgcctcagatctttcttgttcttgttttaagaaataaaacataggccgggcgcagtggctcacgcctgtaatcccagcactttgggaggccgaggcgggtggatcaccaggtcaggagagtttgagaccagcctggtcagcacagtgaaaccccatctctactaaaaaaataacaaaaaagtagccgggcatggtggcgcatgcctgtaatcccagctacttgggaggctgaagcaggagaattgcttgaacctgggaggcggaggttgcagtgagccaagatcatgcctctgcactccagcctgggtgacagagcaagactccatctcaaaacaaaaacaaacaaaaaaaaagaaataaaacatagatctatttgaagaccctctatactcttacccagtcttcacccatgtatcacaatttataatactgtttttcttgacttaaaatatttttactgtgtattgaaaaaataccaaagactatctataatgtttgtatgagttgtaaagggaaacagacaatgtataggccaatatacccttcactctgcttaagaaactgatgttttaaaactatataaaagttaccataytgtttatgtgcttcattttgctcaacagtgttttgacatttatccatgttgatacatgtagcttttattcatctttttattagtaactactatataactttatattatatgaatatatcacagtctatccattcagctatggatgaatatttaaattgttttcagttttggatttccatgattacaaatgaagttaaatgactttccatatttgttggccatttggttttccttttctgtgaatggactgttcaaacctttgctcatttttctgttggcatatttgcctttttcttagtgatttgtaagagttgtttatatgccaggcactaattctttgttagttatatatattacaaatggttttgtccagcctattgtcttttccactttatttatggtatgctatatatagatgttttgaattttcatgtcaaattgctcaatgttttatgctttctgtgtgtgtcttgtttaacaaatccctctctaccctaagactttcctataatcttttttctgccatcctatataagcaaaaaggatcagtaagtatatatatattttttaaatcctagacagttataacagtaagactgtctcatctacctctcaggcaggagtctcccttagtcatcttttagataaagaggtaatgactgcttgagtaaattgtagaaggatatggtcaagagaggcaagtccaggataataggtaatacaagattatcgggacagtccaagaatttggagagcatgatactctgccacaggacactttaaaaatcttctgttaaaaaagtaaagttctgttgtgtttaaagtctgttatttttacctaacaaaccactgtaggaaaaccatgtaagaaaaactctatatagtcagtgagccctttagctacacaagtttgtttgttgtgttttcagggtgaatgtttcatacacatttcttttattataaatgtttacctgttatgctttctaagtaatatatgtccattttaagtgtggaagcctagtgatcgcctgcagtcaagtcttgctggattgtttgtttaataaatataaaaactaacaattttccacagcaaaaaattgtacacaattaggattttcaaccatgtcatatgcattaaatgtttctacttttttgagatttagttttgcattatacatacagagaacatattttgcaaaagcatgttttcttttttcatgtaacatattgtggcttatgcaattagtaattttttcaaatttgtgtttgttctagaaaattaaacaacgcaaaaataagcaaacagatggcatcctcaccaaggaattgttacattcagttcatcctgaatcacctaacctcaaaacttccctgtgttttaaagagcagactctgctacccgtaaatgatgctcttcgaactatagagggcagcagcccggcagataatcgttayagtgaatatrcagaagagttttctaaatcagaacctgctgtggtcagcttagagtatggtgtggcaagaatgacttgttagactcatagagttttttctgcaatgattgcagtacaagaaaaggattattgtgaggatggtctgtaagcataaccaaaaggaatttgtctaataacaattttagggtttaacagtaggctaatagttgaaggaaggataataactrcccttgtgagagaaatawgtcattttaattgcatttccagcaaggaatgacattcagttctgtaagaaatgagtggtatttgatgtatttactcaaaacacaatttgcactgtacactagtgaattgacgtttatgatttatgttaattcagccaaacataaataaccttccttaagtacaatttaacttcaagaaaacaaaatttgacaacatagtttcttaataaatgatatggcatgtactttcaattatgtagctttgtaactatgaatatttacatattttgccttttagtgatatttaatgttaaagtgccatgaaaaatatttctaagaaagccttaaattcccagtggattctttacccttaagttttacagcctacaacaagattttttgttttgtttttcttctggtcagccttgttttgtttgtaaagaattgtgctctcattactgctgggggtgcatgctacaatacttctatataaacacttgtagaagtacactgttcacgtttagcctgccccacttttgtattcaaaattaatgaaactgaaggtttattctgatcataatttgtttagtgctacatttgataatttattatttacagcttagaatattgatttcttgaatacgtataagcacatttgactgtcttttatatatggattactgcattccattgattcttattttgtggttggctttatttctttcacaactgtgtaagtttaaagagctaaagctctaaaactgttctgagaaacaatgaatagtacatgtatatgtatatttttaaactgccttattgctcaatgagttgctgttcctggagtatctaactttcagtttactcaaaaacttttgggtaaataaaaaagggaagtacagatagtttaggttgtgcatggttgcatgaattttgaagtcattyctatgtggagcattatttttcttcttgttaaatatagaaaaaaaaagagattctagtacaaagttactgtttaacaaaagcaacataaactctgggaaagatttcattttgccatgttatatttactgtttattctgtgtactagtacatatctttaaattaccaaaaaacaagaaacaaaacataaaaaccccaaaactatcacttggaattagcaatatcacccaactggctttaaaattgaaaatttaaataacatggtggcatgaagtacaattcgagtattaggcaatttgcatagtgttcctcatgctactttctgttacacctctattatattagttttgaatataaacatctttttcagaccaaaaaaaactttattgtatgagagcttatcttatcctgtttatttttccaatgcttttctgtaatacattatgtaatttaaaaaatattcctttttaaacagcaacagaaatgcactataaaatatagtatgtgattaaccaatcctgcttccatatttaagcactgggaatggaaacttaatctctgtgactacaaagggaagtttttgtgccttggtgttccagtcactgattgtggttttagaatcttctgtggctgacttcttgtattcaactctggtttattatcttaatcttcaacttcagacatayatttgtgtgtttatatgctcacaggtggactgagaaatcagttacatcttaagtgacctacagggtatatgttggcaaaagcagactgtgtatatgtcttataaagttgaatttatgttcagtgtgtttggaagtgtatagcatgtaaattatttcatatatgatttaaaggtaattaaatgttcacattttactttgaatgtttttcttctggataaaacaaatggaatcaagttgtagttgttttttttttcttctcacctaggcaagtagacttgcccattacattaacataacagcataaggtttgaggagtttattttccaaaagtttgttgataaataatacctgtttcatacaaaaataatttccagaatatttaaaataggtatagtgggctaaaaggcccatcagatgtaggtaataatgtcattaagttttcattttgttcctgtcacttgcttatattacaatcactatttttttgtgcccttgccaacttgatggaaggcagggtccattgagtacaaacattcgaggtgaaatgtctctccaaaggcagatctggatgtaaatatgaggaagaaaataactggctgacaagaggataattttattgagggtgttttgaaaaggtcagctaggctagaagtagctcagggaatcttgagtaaagatgaagggaactcttttaaaacaaattcaatttatttggtcgggtagcagagcagggaggtggtgtcagtcaagcctgttttgaaacattttttgcagaaggtcagctttaaaatattgaaaaatttccagttgacatgctaagttggattaaatgctgatcatttataaaactatatagttgctgcaaaagtaattggggcttttgccattgaaagtgatgacaaaaaccgcaattacttttgcaccaacctaatactacagttgcagacttttattagtgacgctgatcttcattagtcaagttttagttattttgttggcttttccatgtagaattccaagtgacattaacatactttgattaattaaagaaaatttggagactgtttaagatatatgtctagatatcaatgtaaactataagctttaggaacttacatctagaagaaagcctggaatctagaataattatctcaaaaaaaagtatatataccattgtacttgatataagaaaatgtaaacatgaaaccttgacattttaataaacagtatttgtgctactctagttatttctaggaaagtaaaatatccatttaaatggcaacttttataaaatagtggcctgcataactgaaaggaactttcagaagctagtagtagactctatagccctggtgttcagtttctgattcagtagttaggggttgggactctggagttaaaatcatttgcataccaataaattgtttgcacttagcaatattttggatattgtgatgcaaatggttggggaatcatactttgagaaacactgctgtaaaccgcccatcatggtcagtaaacatcttgtttgttcttaaagggatgccgaattattcttttttttttttttttttttgagacggagtttcactcttgtttcccaggacagagttaaagtggcacaatcttgtctcaccacaacctccgcctctgggttcaagtgattctcctgcctcagcctccggagtagctgggataacaggcatgcaccaccacaccgggctaattttgttgttttagtagagacggggtttctccatgttagtcagggtggtctcaaactcctgacctcaggtgatccactggctttggcctcccaaagtgctgggattacaggcgtgagccaccacgccccacctcagaattactcttgtataaagagcaacaggctagggagcatcacacttctgaaacattgtgatacaagtgggagtgagaaataaacctttgttttaagccactgagaatttgggctctttgttactgtggtgtaagcgtgcccctcctgagggatgaaaccatttgtacaaatttctgtttttccattagttcccaaatggcctttgtcctgctattttgcgtcagtagccagctgaggtttgtgcattgcatttggttgtagctcatcagtctctgtgttgaacagccggtcacctcttcccctctgcattgaccttttgcaccagaccagttgtagttttcccactttctgcttttgtctgattgtttcttcgtggtgtaatttaacttgttcctctgtctactgtacctgctgtcaagtaggtactagatgaaattcagagttagcatttcaggaaagatgctgtgtacttaatattgaattactgcgggaggatataatgccaggtggttccattgttagtgacgctaaatttaatcacttggttatcttttcattgtaaagatacattttttccctttgaactcagcaaatgctctatggggtgatattttggcatcaaattgaatatccctttccttaacaacctatccattaattatacttgcccaaatcagttatttctttggtgttacaaaatgctgattctctaattttgttttaactttttacacttatttgcctgcatttgtttgtttgtttgtttgagacagagtcttgctgtgttgccaggctgaagtgcagtggcgcaatctcggctcactgcaacctccgcctcccgggttcaagtaattcccctgcctcagcctcctgagtagctgggactacaggcacgtgccaccatgcctggctaattttttgtattttagtagagacggggtttcaccatcatgttggccaggatggtctcaatctcctgacctcgtgaccccccacctcagcctcccaacatgctgggattacaggtgtgagccaccacgcccggccttgctggcatttttaaaagaagtgctgggtccagtgagtacacatacactggaaagcagtgagaggtgaggccagctggacttctgggtcaagtggggacttggagaacttttgtgtctcaagaggatcgtaaaacgcaccaattagcactctgtagctagctagaggtttgtaaaatgcacctatcagtgctgtgtaaaaacgcaccaatcagcactctgtggctagctagaggtttgtaaaatgcaccaatcagaactctgtaaaatgggccaatcagcactctgtaaaatggaccaatcagcactctgtaaaatgggccagtcagcaggacatgggcgcagacaaattagggattaaaagctgatcaccccgcaccccaaaccctcccagccagtagcagtaacccactcgggttcccttcaacgttgtggaaggtttgttcttttgctcttcacaataaatctggctgctgctcactctttgggttcctgccacctttaagagctgtaacactcattgcgaaggtgacttccttcatgaagtcagcaagaccaggaacccaccagaaggaacaacctccggaaacagcagggtccagtgagtacaaacattcaaggtgaaatgtttctccaaagacagatctggttgtaaatatgaggaagaaaatgactggctgagaagagggtatttttgttgaggatgttttaaacaggtcagccagagtagaagtagctcagggaatggagtaaagatgaaaggattttttatttttatttttattttttgagacaagtctcgctggatcacccaggctggagtgcagtggtgccatctcggctcactgcaacctccgcctccctggttcaagtgattctcctgcctcatcctcccaagtagctgggattacaggcgcctgccaccacgcctggctaattttttatatttttagtagagacgggatttcaccgtgttgattaggctggtcttgaactcctaatctcaagtgatccgcctgcctcggcctcccaaagtggggaattcttatttatttatttacttagagatagagtctcactctgttgcccaggctggagtgcagtggcacaatctcagctcactgcaatccccacctccaggtttcaagcgattcatgtctcagcctcctgagtagctgggaccacagggacacgccagcatgcccagcgatttttgtattttttgtagagatgaggtctcatctcaccatgttggccaggctggtcttgaactcctgaccttaagtgatctgccttcctcagcctcccaaagtactgggataacaggcatgagccaccatatgtaagtaaacaccctcctgagacaagccaatataaacaagtcaggagacagacaacaaaggcaccctttattaaagatactgcacttaattatagcaacgaaagaggaaactcttgaactaagaaaactgctaagacatgcatactcttcattcttctacataggattatagtctgtaagttttgagcatggtaaagatagcatcgatggataaggcatcaatttttttttctcatttttttcatgtagttaagatcatttgcactttttctgtgaattattcgtgtcttttgcctatttttttctaaaaaaataggtagttattaagagctttttatattttagggagctttttatattttgtgatataatgtgcaaaggaacaaaagttttcttggacaaatggttgattccaaaactgaagggagagtacaaggtgagcctgagatatcggaaaacagacctgcaaataataatctcccagtttgtcatttgctgcttatgttttttgccttgtagaagagtttgacatttaggaggtagaattgtattagtcttatattacttcttgttttgaatcgtaattagactgctctaatactaggttataaaggattcactcatgttctcaatatttaaagggttctatgtctttacatttgattgatccatttggaattcattctgatatatagaaagatgtatggatccaaatttatctgtttcccaaatggctacctggttgtttgaatcatttattagtaagttcatcttgtcagtgatttcagatgtcacttttatgtagttcttgatcctgttctgtagcatgtgtatctgtattgatgtgccaaacccatccagttgtatttatctaggctacatggtagagctagctctgcctcatcactcttctttctcagggttttctttgctattctttttattttgaaacaatccagcctcactgaaaaattggcaagtacagaagggacattttttcctgaatccctctgagagtaagatgctatgatatgatgccctatgttccttaaatatttaaagtgtgtgtcctgtaagaacaaagccattttcatatgaccatggtcacacttctttcttaggttttcctgaaaacgttgttccattattttcttgttttgtatattgtcaagaagtctgaagccaacctgatttctttcccttgtaagtgacttggttttttgccttaaagtccagtgggtttttttttttctttttaaagtcaatagttttgcaagattatgtcttgactcctctaagtcagttttccaggtatactatcatgtagattcaagtctgcttgtatttaggcagttttcttgaatgagttttaaacattgtttttctttccttttttaggaactcaaattgtatgcgtattagatcttgtttatcttctatacgtattgctttctgatcctgttaccatcttttgttaatttctatttaattttttggcacttttaatttctttcctttatgttttttattgtatgtccagttattcatatttccctttgcaaacaacatttaatttttatttctgaaatattttccttttgctttagcttatttaagttcagtagttcttgtttcacttttttcctccatttttatttgagtttttgtatttatgataagtggtggtttatcatatcagtacttgcatttttacttctattttaatccgtcttttagttttgttaccatttgcctgtgcctgtaatctttctcttttgggtttcatctattgaaaagttttatgtataatttttttaattaataacttcacatgaatgcttgtttgtttttcattttctgttcatgagtatttgtgttggatttgcctggaccagtgataacagacaatcctatgtagaagaatggaagagtttgcatgtcttaacagttttcttagttcaagagcttcctctttcattgctatagtgaagtacagtgtccttaataaagggtgcctttgttgtctgtctcaacttgtttatatcatcttgtctcaggaggatgtttatctttagctgttttcttctcttccattacctctacccttccaagatattcttttcaaagatatccttttagaactaatgttttctcaagactgccccttcctttgactcctcagttttcagacatggtgtcaatgtttttactgagagagggatcctttccttctgggaatgagctctagttgacatttactgatccatcaccagcaaaacctcattgaactctcttctatgcattctttacctgattgtccactctggtatagacggtggatctactggtctcaggcctttatttctgcagtcatatttaaattgaaatttataaaattctctgactcttaataatgttgcaagtgtatgccagggcaatttagtttgtcctccctgttgatctgtatggttgttttggtggatgtggaaattctaatttgggtagctgccatttatcctgtgggaacccaatcccctcaagtattcttttgttcattactattgtggtaaaatatacgtaacaccaacttaacattttaacaatttttaaatgtataattcagtggcattaagtacattcacgatgttgtgcaactattacctcatccacttttcatcatcccaaacaaaaactgtgtacccatgaaacagtaattcctcatcaccccaccctcaatccagcccctggtaccatcattccactgtctgtctctatgaatttgactattctagttgcttcatataagtagaatacagtatatgtccatttctgtctggtgtgtttcacttagcatgttttcaggatttatccatggattagcatgtatccaaatttcatacattttttctggctgaataatattccactctatgtatagaccatgttttgtttatcctgtcatcagttaatggacacttggattatttctactttttagccattgtgaataatgccggtgt

SEQ ID NO: 93811 - DNA, 21447 bp, Homo sapiens
accactcctcttcaacatagtactggaagtcctagccacagcaatcagacaagagaaagaaataaaaggcattcaaattggtaaagaggaagtcaaactgtcactgtttgctgaaaatatgattgtttaccttgaaaaccctaaatactcctccagaaagctcctagaactgatacaagaattcagcaaagtttccagatacaagattaatgtacataaatcagtagctctcctatacaccaacagcgaccaagcagagaatcaaatcaagaactcaaccccttttacaacagctgcaaaaaacaaaacaaaacaaaacaaaaaacttaggaatatacctaaccaaggagtcgaaagacctctacaaggaagactacaaaacactgctgaaagaaatcatagatgacacaaacaaatggaaacacatcccatgttcatggatgggtagaatcaatattgagaaaatgactatactgccaaaagcaatctacaagttcaatgcaatccccatcaaaatatcaccatcattcttcacagaattggaaaaaacaattctaaaattcatatggaaccaaaaaagagcccacatagccaaaacaagactaagcaaaaagaacaaatctggaggcatcacactacctgatttcaaactctactgtaaggccatactcaccaaaacagcgtggtactggtataaaaataggcacatagaccaatggaacagaatagagagcccagaaataaaaccacatacttacaaccaactaatctttgacaaagcaaacaaaaacataaagtgggaaaaggacacccttttcaactcatggtgctgggataattggttagccacacataggagattaaaactggatcctcacctctcagctttgacaaaaatcaactcgagatggattaaggacttaaatctaagacctgaaactataaaaattctagaagataacattggaaaaacccttctagatgttggcttaggcaaggatttcatgaccaagaacccaaaagtgaatgcaatagaaacgaagataaatagttgggacttaattaaactagagagcttttgtacagcaaaaggaacagtcagcaaagtaaacagacaacccacagagtgggagaaaatcttcacaatctatacatttgacgaaggactaatatccagaatctacaaggaactcaaacaaatcagtaagaaaaaaacaaacaatcccatcaaaaagtgggctaaggacatgactagacaattctctaaagaagatatacaaatggccaacaaacatatgaaaaaatgctcaacatcattaatgatcagggaaatacaaatcaaaaccacagtgtgataccaccttactcctgcaagaatggccataattaaaaaatcaaaaaacagtagatgttggcatggatccggtgatcagggaacacttctacactgctggtagcaatgtaaactagtacagccactacggaaaacagtgtggagattccttaaagaactaaaagtagaactaccatttgatccagcaatcccactactgggtatccacccaaaggaaaataagtcattatatgaaaaagatatttccacacacatgtttatggcagcacaattcacaattgcaaaatcgtggaaccaacccaaatgcccatcaatcaacgagttgataaagaaactgtggtatatgtatatatgatggaatacaactcagccataaaaagaaatgaattaacagcatctgcagcaacctagatgagattggagactaatattctaagtgaagtaactcaggaatggaaaaccaaacatcgtatgttctcactgatatgtgagagctaagttatgaggatgcaaaggcataggaatgatacaatggactgtagggacctgggggaaagaatagaaggagggtgagggataaaagactgcaaatatggtgcagtgtatactgctctggtgatgggcgcaccaaaatctcacaaatcaccagtaaagaactcactcatggcccagcacggtgtctcacgcctgtaatcccagcactttgggaggctgaggcgggcggatcacgaggtcaggagatcgagaccatcctggccaacatggcgaaaacccgtctctactaaaaatacaaaaattagctgggcatggtggcacatgcctgtcataccagctacttgggaggctgaggcaggagaatcgcttgaaccagggtatcggaggttgcagtgagccgagatcgcaccactgcactccagcctggcaacagagcaagactccgtctcaaaaaaaaaaaaaaactcactcatgtaaccaaataccacctgtaccccaataacttatggaaaaaataaaaatataattaaaaaaggaaaccttggcaggatggtcactaaaatgttaacagtggtgatccttgagtagtgacatgaccagtgattttaattttctgctgtatgcttttctgacttccaaattttctacaatagatgtcactactataattagagaagaaatatttgggattttaaatgtacccaacaaggccgggcatagtggctcacacctgtaatcctagcactttgggagactgaggtgggaggatcccttaaggccaggagtttgagaccagcctgggcaatatagtgagacccctgtctctatataatctttaaaaaaaaaagaaaaaaggaagtgaaagttggaggccaaggtcgtttgatgaatgagacttggctgtacaggctgctcatgccttcctcccccaggcctccatcacagccctcacatcccccattttcccctcccatataaatagcaaaaaccaggagccactgacaccagtgagaccaaagagaaaactctcaagcagagaaatcaactcggctttaaaaacagcatgtaattgagactggaggcacctgaatggaggcacaggctcccccaagttgacctgagtgggttgctggggcagctggcgcttcaccttagaagggcagtctccattgtctcctctcactttcctgagttcccagtacccagagaaaatgctgaagacaggctgcaggaaggaaagaactggatcaacttttatttggttgttaaagaggtaatacatgccttaattcattcaagagatacaaaggagtaccagtaaagagtgtccttcccacgccataccacacccttccacaaccttccacaaccttccggtgtccagtctcctccctgtaggtaaacactctccctagcttctcctaagtccttttagagaggacttgcatacacacacaaatgagagtcaaatttaaaatccgcttcctccctttccagtgattttggacaatattgaacgagggacccagcagccctgggttttcatctttgttcagtcactcactgtgcatcttcgagcccatcactcatcctctcttgagctttgcttttctcatctgtaaaatggggtaaaaatccccccagggttactatgtagatgaagttggatgcaaaactatatgaagaattccaattgtatcttttttttttttgacacagaatctcactctgtagcccaagctggagtgcagtggtgcaatcttggctcgctgcaacctccgcctcctggactcaagcaattctcatgcctcagcctcccgagtagctgggactacaggcacctgccaccatgcctggctaattttttgtattttagtggagacgggatgtcaccatgttgcccaggatggtcttcaacttctgagctcaggtaatccgcccgcctcagcctcccaaagtgctgggattacaggcatgagctactgtgccaggcccagttgtatcttttaagaactacaaataaatatgaaaaagacctgagtccctctgaagaggaaatgggtcaatggagtttgggctatccccagagctctctcccaggtaaaggatgttggcagctctcccaggtaaagggtggctggcttctctgggagacagaaggtccaggcctcacccagaagcatgcctttgtcttcttgatctgtagatgccatttccagcttggagacctggggccttgacagtgttggattctctgtcacatctggtcttgggggctacttatctctgtcataagtcccctgccccaccctagggtcatatttatattaaggatcccttcctgctcctggatcagagagggccatcttcgcaggcctgggcagtcactgacattggcccacccaaccagttatcaattaatctccatagctctatctgaggatctggggttcagggcctgggagagggaaactgagacagacacagagatgaaggggagccaggcagacaagatggcagattcctgtacaaggtcagccaagagcagggcctgaaagagtgtctctattcaagatctggacagcagacattgtactagtggctgttcgactcctgctgagtacaggaccccgggtgggatcatttatctgtccttccatccacccctctgtttgtctttccaaaactgcctgctgaggactagccagagacaagccctctccctggcacaaggccacgtgctaagatgaatcagattgggccggctggagccagtgggtggaagacagaggacgcaccaggtggagggcacaacaacgaccagggctcgtrggtgggaaaatactgggccaaggcaggcactggggttgagtgcagggtggagggtctgagctcccagggggtgtactgaaggttatggggaggtcaggagaggagggacaaacagcaggctatggagggacaaagcagagtccctgaagaaaggaggaagcagtagacaaaataacagggagggtggaagtcagagcctcagacttagctccatggggaagccacctggtgtctgcctgtcttcaggcccattggttgatgccactccttctcactcccccttgggggatctggttccacctgggccaagggttcacattgccattcctgtccctgcatctaccccagggttcccggacccccacactcacagcacacccttgtacccagcaccaaggagaaatggtaaagaccccagtgtcaggccaggagtggtggctcactcctctaatcccaacactttgggaggccaaggcgggtggattacttgaggccagaagttcaagaccagcccaggcaacatggtgaaacccccatctctacaaaaaacacaaaaattagctggatgtggtggcacacacctgtaatcccagctacttggaaggctgaagcagaagaatcacttgaatcaaggaggtggaggttgcagtgagctgatatagcaccagcctgggtgacagagcaagactctgtctaaaaacaaacaagcaaacaaacaaacaaacaaacaaatcccacaaaacccccagtgtctggagtaagaaccccagctaatgaaccctttaccccctggctagatgaccttgggcaagtcacttcacttctctgggcctcactcccctcctctgtcagatagggctgatggaagcacccaaccttgtagggtaacagagagggttataccataggaaggacccaaagcttggtccagcgcctgcaacagcctctggcaaacagtggaagctccagttttggacacttgatggtcagtgtagtttgcagtttaaaggggactttccaaccccaaaagattcaggacccagagctcaggtctctggtggtggcatttgcaggtctggggcaagcctagggaagggacgccatgtgcggcacgggcatctagtgtcccagagtccgcacgggttgctgggggaaaaagagggatagtcgcccagccagggcaggggtgggagttggggggagagggttacttcctcctgccctgaatctccgctcggggttcaactggctcgccggcgggcgagggcggggcaggccggcctctctggccctgctggggggtggggggcgggtcccccgggaactgctcctcccgccagccgctgctttaagaggctgctccgcggtagcgagcggggccggagccgcagcccgaacgagcggaccgagccgaccgggcagstgcacggctgcggggacggcagcggcatgaccggccaccacggctggggctacggccaggacgacggtaggcacagacctcccccaccgcctctggctcggacccccgacccaactgcactcgccccaaccctcttgcccagctggtttcccagaccggaaagctcccacactccaggctgggcgggacccctcttcccatcccggcccccgaacttggcccaagccttggtcccccgcgccagacgcaaagtccgcgctgcgccccgggtggccccgccgccagcaagcgacctggcggctgtgtcctgccgcctcctccgcgaagcccctgattgcccagcccgctcagacccaggcccagactctcactcactcgccccgggcgtgcgcagcgcgtgggggtggcccagggcagcggggggcgggcgccgcggagcgctgtgcgcgggtgtctgcggggagcgcgcacggcaagtgagcggggacctcgggggagcggggctccgcgtggcaagggcgcagtgtcccccggagagaatttccccgcagaagtggccgagctgccttctcggccggtacgtgagggaagggggcacttgggggcgcaagcatgtgtctgggtgtctacaccgagcagggtgtttgcgcacgtccgggtgtgagtcgtgggagcccgtggcccacaccagcctcctgggctgacgcggaagagagctccttcatcctgcctcagtttccttaggactcagagaaagggagaagaggcagaaggtgagagccagacggctggagtgtgggtctggggcagtcaattccctttggggccatttcttaccaagcaggggtgggggtgtggggtaaggggttccctatttccctggggagccagtgcaagacaggtggggtgcggagaagaaaaagtaatgatgggaggaacatcccccagccccactcctctgcggagaggcagtcactttgtgaggttgggtgggggaccacagtctgggaagccagaaagttgcagtagaccagagggagggtgctgtggagtctttggctccctctggggccccaagaacaaaggagcatattttggaagagaacccccagatctgggtatgcaagagctggaaagagacattcagaaaaagatgatatagacaagcagagagggagagacaggcagacatggggcagatggacaggacccatagggatcatcttctcccagcacctgctctgagccaccttttgggtgcttcccccagagccagagtcccctgcctccagctcttcttgctagtcatgcccaccagctctgagcacccagtgtcctgtgtagcctgctccatgggcctgctcccccaaagcagccaccccatcacccaggcagagctggattgtccagtcgaggaagggaaggacagaggacagaggtgccggcatgcagcagtgttcacagggcttcaaaaataacccagaggggccgggccacgattctgagtcatccattggggacacggctctgtcggcacctgctgctgttttctcaggaaaacttaagaagccaaaaagggggagaagcaccagccggcagtagctctaaaaataggctgcatctcaggatgttccccagggagatgctgagcctctcggctgcagatggatcctctgggaggcaggtggtgggcgcctgtgggtgtgtatgcaggtktgtgtgtgtgtgtgtgtgtgtgtgtgcatgggcatgtgttttgctgtggtcctttatgcaaacttgggtctccaacagaggggtttgtgtgtgagagagcatatgcgtgtgtcakatgtagtctgcagggctgtgtgtgtgtttgtacacatgaatgttctgggcctggctgctctgtgtgcacaatggaagatcatagaaagattaatgtgttcataggaagatctctatggacttgcaggcacacacattgggagggcagctgggggcagtgcatgcacatgctgtatttatattagtacatatgcatgcacacatgtgtgagtggccctcagttccctcatctgtgaaatggggatcttgctggtttctatttcacaaggtggttgtgagaggcaaatacatgtcacagagtcaaagctaggttgatgtgagtttttgttgttatttatcacaaacaccaacaccaaattgcccaaggcacagaaagaggtgagatactgatggggtcaggtcagagacttcagatgtctggaggtctccctgttggggagacttattactctgagccaccccgagcctgtagctgttatgttcccttccatacagtacctctctgggcctcctatcagcactggaaggtgagttttagtgagaccatttcacagacaaagaaatggaggctgaaaggggaaatggcaaagctgggattggaactccaagctgtgcagctccaatgcaggggctcacctctgaaaggatgctgaagagaccattcccctatgggtgtcctcggcctgaagcccagagatcctggctggcctgagtccttgccctcctccccacctgcaggcccctcgcattggcacaagctgtatcccattgcccagggagatcgccaatcacccatcaatatcatctccagccaggctgtgtactctcccagcctgcaaccactggagctttcctatgaggcctgcatgtccctcagcatcaccaacaatggccactctgtccaggtagacttcaatgacagcgatgaccgaaccggtaagtggcccctgccaaagcctggcacctggcccctggccccttagggtcctaaccttgtgttgggcagtctcaggaagcatgctatggtgggtaagaaaggttcctcctctcaccagctgtgaagccttgggctgatcttcagtctccttatgtataaagtgagagcaataagacctaccctcttaggtcatagaggggaaaaatgaaaaaaccaagtaaggtcgatagatctggcacacagcagatgctcaggaaatgctaatttctttccttcccttccttcccttccttgtggtgctacagatcaggtttgttttcactctctgccccatcactgacctgccaagccctcctcgctgtgtgatctggccaagcctagcagggagagagaagggagctaaaatttacaagtgccaaaccccttgctaaagtcacaagccgctcatttattcttctcaataacccatctctcagatgggcaaatagaggcttgatgagctggggagggccagaagcagcctggtccagcctgaaggtctctctctctctctccagttcacctatgacttcaaggtccaaccatcttgggccagtaagaggccagtgggaattcgtggcagctccttccaaggcctctttgccctgggattagagtccarattctttcatgataaattcctagacaggagtgctgttcattgaagggattttcgtccttatgactgggccttaygactgggtagagtggtggaatggggcgaggaagaaacctactagagtttcttgtgtaaggaagtattaataactggttccttcctcctccttctcccctccccacaaatacaataaaagccctcaaaggaacttaagtttcaaatggaaaattaaaaggcaaagaggatgaaggaagccagacctttcatgagaagagtgatcttacttagttctgagttccctggtaggctaggaaaaaacagaaagaggattgattatagtttttgctgcaaaagaaagggagtctagcagatcctcaggagagagacaaagcatttatttcctggtactgaattctaagaaaagcctcttactcagagctttggggagggggcgtggggctctagctgaccctagatgatagtttggcaaggaacagttttcatatgactgtcccttctaacagccttcagagggcactgggggctcaactaagaaatcagtagctcaatgaaggccactggggtgggagaagacacagggggacatgcctttggattactgatctggggtgttgccttcaggcctggctggggctccctcccccacccagaatgcccaggccggagggcgcaggaagccagtgaaaagaggaatgagatggtggggctctgccactcacycactgtgggtcactccagaggtcagacgggttgatgccagcagagtgccaaacacacattgagtgccccgtgaatggcagcacattctgtgtgtgaactgggggaggaggctaaggggtccaaggtcaaggggtgttacggagggagctccctctctaggarcccacactatagggtcccaggtgaggcatgctttggagggtggcatctgcagacctatccaattgcttagcctgcaggctcagccgctcctgcttccagggatggggcagcctgattagggccccacccacagctactactcccagactcctagccagtgcccaggtcttgcctctttgataagaccgggcaagaaagagggacttctggactgtcctgtcctcctgcttraggargccacagggccaaagccctaccctggtcacccatcatggaagggaccagtggaactctgagcctggggtgttatctgatccaggagctcacattcaagcctagctggggctccctccacctccagatccctttcagctggaaattctatcagtcccaggaggcctcgtgcatggccccagctcactgggtrtcaaggcaagaaagttacaaagccagcacaagtggggccctcagaagaggccatttctgggggaggcggcactggaggcacctgggcctgtccaggaaggtagagaccctcaggagctaccctcctcttctggaaaagcacaaagtttaaagaagtttcaaggttctagggaggcagtgttgcctggtgattagtggcttgggctttggacataagagatactagttcataccctagttcagtgccttgctgtgtgaccttgagcaaatgcctcgtcatcactgtgcctcagcttctctctttgtagaatatggataataataagttctgtccctcatgggctactatgcagactaaacaaaatagtctcttcaacctagccctggatcagggtttcagacatggtaggcctaactgtcagtgrtaatgggggtcctgggaggcagggtcccaccctccatgggaaatcgggcaggagcggggaggacagctagatagagagctgtcctctgtcagtcccagacccttctgccacctgccggctgtcaggatttctgccctggcccagctcaagggacaggggtctagggggcagtggggaccaacccaagcccagtcagcccagtgaattttccaaatgaaaaatgtatcccacactttggaaggctgaggtgggcagatcacctaaggttgggagttcgaggccagcctggccaacatggtgaaactccctttctactaaaaatacaaaaaattagccrgatgtggtggcaggtgcctgtaatcccagctacttgggaggctgaggcaggagaaatgcttgaacctgggaggtagaggttgcagtgagctgagattgtgccaccactgtactccagcctcggtgacagagcgagactccatctcaaaaaaaaaaaaaaaaaaaggaaaaatgtatctcagctggcacagtggctcgtgcctgtaatcccagcattttgggaggccaaggcaggaggattgcttgagcccatgagttcaagaccagcctggccaacatagagagaccccatctctacaaaaaataaacaaattagctaggtgtggtgccacatgcctatagtcccagctactcgggggggccaagacaggaggatggcttgaggccaggaggttgaggctatcataagccatgtttgcaccatggcactccagcctgggcaacagagcgagaccctgactcaaaaaaaaaaatgtccctttcctgggctgctgccctggtcctggcactgggctgtcggtcctctcctactcattgccactcgccccacttctacccacagtggtgactgggggccccctggaagggccctaccgcctcaagcagtttcacttccactggggcaagaagcacgatgtgggttctgagcacacggtggacggcaagtccttccccagcgaggtacgggccctcctccacttgaatccctctgctacatgggaaggaacgcaggcctgggtagtcaggggcttgaggatgcctggggtcgggccttggagagggggaagaggagcacccggggcctttgggagagatattttctacccacccccagcacagggtcttccatctgaccctgtccactgctatccttcctggtctgtgcgtcgtggagttttctgaagggctacccagtcccactgcagccttgctgacagccctttaagggttgagcccagtattcaagactgtgcatgaactgatcttgcctggcctcatccttcccctcacctcttcatacactgagctgcatgtgacgaatcccctgtccacacctggctccttcataccaccaagctttgtctgtgctgttctctctgcctggaatgcctttccccaaggcttccctctgataaccctctgcttattctctggactcagctgtaggcaccacctcctcaaggaggtgtcacgctggatgttcatgatcgatttcacagctcgttccctgcaaggcagggcttgggccagattcctctttgggtcccccggagcccagaaaagaattgggcccagagttgggtggatgctacctgtgaccctctggggctcccctggaccccccagcatcctaatccttggaggcttgacagcttccccttcctgcaaagaggccaggggtctggtgggagtgaggggagcctggctcagagttcccattgcctctgggaggcacgaagcattggcctgttgttgccccatagctgcatctggttcactggaatgccaagaagtacagcacttttggggaggcggcctcagcacctgatggcctggctgtggttggtgtttttttggaggtgagtggtggtttgctggggcctggaggggcatgggaggcctggcactgcccctagttctagaacacrgtgggctctgggctcacactgccctctccctgacagacaggagacgagcaccccagcatgaatcgtctgacagatgcgctctacatggtccggttcaaggtaaagtccctgcccctgacccragcagcccgatggggagagaggaagaggctggctcacaagttgggcccttccagtccttcattctgggagtaaacccttgctgagaccaaggaggagggtcagcatcagcagggccctgcacctgattcctcatcggggtcagcagcccccttgggtgtccagcatgaagcccggctaggtataaaattgataagatgcttgtcacattaatggtggtctaataggcaatgtcattgagggcagctgaaggcaagggagggaagatcgtggccaaatacctccaggagccacagcttttacatacaagcaaacggatgagagggcccggctcaggctggaagatggcatctgggatcacagacatttgctcacaatttgcatcagtggacacagagaggcctaaatcctgctgatagaaatgggtggagaatgccgggcatggtggctcatgcctgtaatcccagcactttgggaggccgaggcaggcggatcacttgaggtcaggagttcaagaccagcctggctaacatggtgaaaccctgtctctactaaacatacaaaaattagccaggtatggtggtgcatgcctacaatctcagctacttgggaggctgagagaggagaattgcttgaacccaagaggcagaggttgcagtgagccgagatcgtgccactgcactccagcctgggtgacagagtgagactccacctcaaaaaaaaagaaaaagaaaaagaaagaaagaaagagagagagaggggaaggaaggaaggaaggaagggaaaggaaggaaggaaggaagaaagaaagaaagaaagaaaaagaaagaaaagaaaagaaaaaaaaaagaaaagaaaagaaaaaagaaaagaaaaaagaaagaaagagatkggtggagaagttgctgrtttggtcccagtgggaggtctrtgctgattcctgggttcctccaccttgttccagggcaccaaagcccagttcagctgcttcaaccccaagtgcctcctgcctgccagccggcactactggacctacccgggctctctgacgactcccccactcagtgagagtgtcacctggattgtgctccgggagcccatctgcatctctgaaaggcaggtgagtyctctcagaggaccagatggagggacakggcactcagggctcaccccaggcagtgtgactctccaactagcaccccacagcccgtgatcccaccttcaaggttcctccccattttttactaataaatgtatagattcttggttgggagttagcttgattgttaatcaccagaacctagacactggctgggagcggggatacctggatcctgggacccccacccccgctactgtgttggaatctgaatgctacatttgctgataagtcttagctagatgggcttggaactagaactaggtaaagcagagcccagaccctttagtgagtaaataaatgagggtcctgcagagaaaaatgagtggggaagagtagggacagaccctaagggaaggaggagggaggggtagagctggctgggcaggtatgccagatgatgcatctggggtcatagaggaccacagcacccccaatctgccctgagcattccttctgcttcctcaagatggggaagttccggagcctgctttttacctcggaggacgatgagaggatccacatggtgaacaacttccggccaccacagccactgaagggccgcgtggtaaaggcctccttccgggcctgagctgcccatctgcctagccggccactagggcaccatcttctcaagggcttccatgtcagcagacaccaaaccatctgaggcttcctccctggggggtgctggggaccctccttcagccagtttgctccttggtcaccctggaggcttctggatgggacccttgagtctggggcacccttcagctgccctggggacaggaaggacaggagctaagcagggtccaagcctggggctgcctctgctctccaagacccaaagaccctgggaacctcctctggtcttccccactggcagtggcagcagccccaccccgagcgcacactgtgatggaggagactgagctccctggggcrggcagctgacactaccagagagactcaagcaataattagaggtgggcagagctgccctctcggcattacctcttctgcaggctctgccatgcacgcacctcactgccaggccattaaaatcagcacccagcatgctggaggtgacgtggccttctccctccagccacctgctgccacgggcaggccctggctatagcttatacagtatctccccttgtccccacccagtcaccaaagccacctacatgacagtccatccctgttgaattaataaattaatgtatccatgcaacaaataccaattgagtgcttgtgctgtctctagtaccgtcctaggctttggggagcaatggtggtgagttaagcactatgtgttgggagggatatgagtggtgagcaggtgagggttacacaaagggcagggaaggggctatgggagcagatgagaggggaagaccatgtcactcagcaaagaaatgcaattctggtcaggcgtggtggctcacgcttacagtcccagcactttgggaggccaaagcaggtggatcacttgagctcaggagttcgagagcagcctggccaactgctgaaaccccgtctctactaaaattacaaaaattagctgggtgatagtggtgtgcacctgtaatcccagctgctcaggagcctgaggcaggagaatcgcttgaacccaggaggcagaggttgcagtgagctgaggtcgcaccactgtaccccaggctgggcgacagagcgaggccctctcaaacagaaagaaaggaagaaatgaaattccaaccagtattccaaatcagatagaagggaacagcatgtttgaggccaagggaagggcaagtgtgcaggctcagaggtgagagagagcccagtgtggttgtggggctcaaaaggctcaaaggggctagagccctgggggaaacctgggaccccctccccaggctgacggggagctaccaagggcttatagtagaggaggggcagggccaggcctgcaaatggggaacatccctgaggaatgcggatgggcaggcaggaatggtggcagggagcaaggggtggcctgtgtccaggcgggaggggacagggtggagggaggtgggagacagagggctggatgagagagatttaggaggtggtgcccaaaagacagtgtttggctgttcaggatagagaggagaccagggcatatccctgagcagaaagtggagccttcacttgctctgggaaccctacagggagctggccacattggacacgcagcattgtggggtcctggaaggaaaatctaagggggcatgtgccttcaggcccaggccctgcacacgcacaaccccaagagggggttttatttttatttttatttaattttacttatttatttatttatttatttatttatttatttatttatttatttttgagacggagtcttgctctgtagcccaggctgaagtgagtggcatgatctcagctcactgcaacctccgcctcccaggttcaagcaattctcctgcctcagcctcccgagtagctgggattacaggtgcgcaccaccatgcccggccaatttttgtatttttagtagagatggggtttcaccatgttggtcaagctggtctcgaattcctgaccccaagtaatccacccacctgggcctcctaaagtgctgggattacaggtgtgagccaccgtgcctggccctagagtgcttttttttaaatgtgcatcctcaccctagtccctagtccaagtccaaaaaagtgcccaagggcaagttcacagttgggcttagagaccaagtgatgattgtgacccagatgagacagcggcaggagccggagacagacactgggggtgctgaggagtgaggggaggtgagaaactgggacctcacatgtataagtttagttgtgaagggggagaaagggacagtggagggggctgcggggagatggaatgtccgaacacccttgggaaggaggccccactgcagggccaggaggggctggtggtgcatgtcatcagctcactttgaccacagctcctgtcaatgttactataccagaagggaactcccaggccacagggcacttttgggtcttagattaactttgacctcagtgatctggggaagggagaggcttgctctatggacccccctcccactcccatgcttagggcaaacctgtctccggagtggggaggaatggggtatacaggaggagcaggccaaatagagagttaccctgcaggcgcccctggcctgatctaggtaggggccattttctccctccacttttgaggagatggtgaggagagggagagaggtgtctggaggacaacatttgctcagcttggaggcaggcagctgtggtaacagggaagcaacgccagtaatgttcctgttaaagcaggtaaagggcctgaggcagacgtccagctctccctgcgatccaagaactgctgttaccccattttacagatgaggatgatgaggctcagggaggttaggtaggcaggtcacagagcaggatttgaaccaggatctgtccagtaactcttctactctatactagagcaactgggctcaaaggagggtgggatgggtatggtggtggccatctggaggtggcataatagccccaatgctgctaactgtgccagggaccctgtccagcccctcccagggatggtggcatcacaggcccggcgctgcagaggacttggaaaatgggagctggttttataataattaccccgagactgccaagaatcctcactccctaagtcctttcccttattcactttttaaatttaaaactattttaaagctgaaagtggcctccttatgttataattacagccccagatttgaccctattatatccaaatgggatgtcccagctggatcccagcacacctggcctcaagggacccaggactgggtcctaagtcctcattcaggacaagattttcccctggaagtgatgctggggacatttgggacacccaagacaagatgagctctacttgctcccaggaccccagaggggccctccctgggcagccagtggtggcccttggattgatccaggcagggctgtgggcctgccagcagccacagcctgcggagtctgtgcccaggcaagggtcacagtcttccctccagtgcaggctgtgggccccagagcaagtcccttctatggggcgggcctcaggaggtgggatggttgtgaagatctgatccccctgaagctccttctgcagagggctgtcttccaatcccatggtcaccctatagctgctgctgctgcaaaggcttgggagtgtcccctcatggctagcgctggacacatacccactggcgtgctcatctgtggggagagtgatctgtggactgagcaacagctggagacaggaacagaaataggtctgaggtggaggttgcaagataacctgatagttgatgcctgggagggagccacagctgatgtcaaagctaagaggggttggagcagggcagaaggctttcggatgcagttggagctggcctggggttggggagagaggtcagacaacagcctgagcatcttggggatcctctcgcatccatgggtcacaacatcaactctgaggccaccctcaaaggccaaatgtactgctggttggtcaagactcggggggaggaggagatgtgactctttgatcacgaaatgttctggcatttatcctctagccagaagcaaggcctggggaatgtatctcttttgaagtcttatctgctcacaaatccaagggcccacttacccgggtcatacctgggttttgcaccatctgtcactcaaaccctctgaagcttatttcctcttctgtaaaatggaaatgacgtgtgagccatttttgtaatttaaaattttctaatactgatataaaatatatagaaagagacataaggccgggtgcagtggctcatgtctgtaatcctagcactttgggaggctgaggcaggagaatcacttgagcctcggagttcaagaccatcctgggcaacatagcaagaccctgtctcaaaaacaaaaatgtagctgagcaccgtggctcatacctgtaatcccagcactttgggaagccgaggcgggcggatcacctgaggtcagaagttcgagaccactctggccaacatggtgaaaccccatctctactaaaaatacaaaaattagctgggcgtggtagtgtgcacctgtaatcccaggtacttgggaggctgagacaggagaatcgcttgaacccaggaggcagaggttgcagtgagccaagatcgcgccactgcactccagcctgggcaacagagcaagactcagtctcaaaaaaaaaaaaaagaaaagaaaaatgtaaaaagaaacaagtcatttaaataatgtacttaatttaacccaattatatccaaaatatatgcattttaatctgtcactaatattaatagaaaaaaactaatgaaatattttacattttttgtgctaagtctttgaaatctagtgtgtgctttacgctcacagtacatctcagcgtagggcagccccatttcatatgctcaaagccttatttgtcagtatatagttggacatctttttttttttttttttgggacagagtttcgctcttgttgcccaggctggagtgcaatggtgctatcttggctcactgcaacctcagcctcccgggtttaagcaattctcctgcctcagcctcccgagtagctgggattacagatgcccgccaccacacccggttaattttttatatttttagtagacacgtggtttcaccatattggccaggctggtcttgaactcctgacctcaggtgagccacctgcctcagcctcccaaagtgctgggactgcasgcacgagccattgcacccagactgcacatcttaaaaaaaaaaaagaaaaaaagaaaaaagtcatatgtggcccagtatggtggcatgtgcctctagtcccagctattcaggaggctgaggcaagaggattgcttgaggccaggacttcaagggtgtattgcatgatgatcacatctgtgcataatcactgcactccagcctgggcaacacagtgagaccccattgctaattttaaaaaataagaaaaaggaaaaaaagccatatgtggccattggmtaccatattagacagtacagtcctaaatggatgtcactctgctggacaggtgtctgagaaagccctctggctgggcgtgcagccaggcaaagtggcaggaatgagtcagatctgctcccggcctctgtcctccacgagagcagcctcagaacatttgatgccaaattggctccctctgctagggccttcctcccccaggaaacctctctaaccccacttcactccagtgtggctggctctgccccaggccaccctgaagggcctttcctgttccactgagagaaaggccaagaccctcagcaaggaactgactgcagaggagtgttgggagtcaggggaggtggtagtcctggcttggttgagatttgattagtctgggagggtttcctggaggaggggcccagaataaagaagctggcattccaggagaggggcagaagcctcagctgcagagagcatttaccagacagaaaaagaaggcctggctcttgcccagcctgtatcaacaaaaagaagaagtggggctgaggagacaggggctcccaggctgcagagatttcaaatgccaggtagagctttacccttacatccacaggccatgggggtcattgaggtctaaagcaggggctgaggacctcctgggctggaggaagaggactcttcctgaggcttagagagcaccaggcatcacttagtttgaatccaccttctaacccagggcttgagtgcaaattctggcaagtgcaattcatcaac

SEQ ID NO: 93812 - DNA, 13914 bp, Homo sapiens
cctgcttcagatgcaccagaggagctggttaaacatgaggtggcaccaggtagcatccagaccctaaatcagactctaggctggagcccttgaacctgtagcccagtgattctgaccaagctctgctcagccaggcactgctgatgacataggcccagtggctctggctccagcagatggccacagggaacgggcagctccaatacataagacaaactgtcccctgagaacacattagacatcctccaggggcacacacagagaggggcccgacctgctgcacagaggcctgttcctttgcactcaggctggaagcacccagagaaacctgggcaacacaggtaacttacccaagtgccagacttggctagggaagaatcagaattagaattcacatccaggccccttctcacgactcctgatggagcctcagtcacacctcacataaacaccaggtcacagtgggccgtctcacccgaccccactaaagtctccccagcaactagaactctgtcagctggcggagaaggttcctcctgccttgatcctaacgggtatccaggagacacaaggccactctcccatcctgggtccctcccagcccactcctttagagccccaaactacaaaatgaacccaagggaatgaacaaaagggcatgaaaagaccccattagggcactaatggatttaatttttttattgctctttaaagaaaacttttcctcttcctagatatataaaaagagctcaacctagacatcactctacagtcttttttctttcctgttcattgaagcattttaacaggttgttcagataagcccttctcccagaaacttgttcctatccccagcatgaaatcctgaagagctggtgaatgtcaggccctgaatgagctcagccaatctgccctccggtttacagcaggcaacgcaggaagaatctcacaaagttcccctgaaatggaagggggaacaggaagcaagcaaagggagtctttacatttctttttaaagtgatgtctaaaaatattataagagaagtgcatgcccattgaagaaaatacagaaaatcaaaaaggagaaactatcacccataatcccaatactaagagataaaccccatgacatatgagcatatttcatgccaaatattattttctatacagtcctcatctttgagcacgtttcaactgtttattgaaggcctatgctgtgccaggcactgtgtactcagggcctcgttgcaacggccaaagagctcatgagtgtgtggaggaaagcaacaggaaactgtgaaaaggagatggtccccatgctgtgggagcacatggccggcctggcccaacactctgtgattacgctacaatttatctccattttcctctgctatgagcccttgagtccaattttccatgattataactgaaactgtgatgagccatctatccctattataagtaacaatatttaatctttcctaaaaatggaaattaagcattcttgtgctaagaaatacattctcagtggccaggcgcagtggctcacgcctgtaatcccagcattttgggaggccgaggcaggggatcatttgaggtcaggagatcaagaccagcctggccaacatggtgaaaccccgtctctactaaaaatacaaaaattagccaggcgtggtggcggatgcctgtaatcccagctactggggaggctgatgcaagagaatcgcttgagcttgggagctgagaggtggaggttgtggtgagccgagatcacaccactgcactccagtctgggtgacagagtgagaccctgtcttcaaaaaaaaaaaaaaaaagaaatacattctcacacacaagaatgtatgtatgcatgaatatatgtatatgtttatgaatatgcatatatgtatttatcagttggatttctctgatcaaaccttattacacaatccctaaaagaagaaaataaaaatcactcgtaaatctcagcaatcattgtcatttggatgtttaattagaacccagggttccagaggcaaactggcttgggtgccaaagcctccacagggagaatccaaatatcctgtcttatcaaagaccctgagaaatctgcagtcaaaagaaacttgcccaaacgtctaacaactggcaagtggataaacaaagtgcactacagccacgccatgaatactattcagctataggaaaaaatgacatactaatacgtgctacaaggcagatgcatgtcaaaatattatgctaagcaaccaggagcggtggctcacgcctgtaatcccagcactttgggaggcctagacaggcggatcacctgaggttaggagttcgagaccagcctggctaacgtggtgaaaccccgactctactaaaaatacaaaaattagctgcacgtggtggcacatgactgtaatcccagctacttgggaggctgaggcaggaaaatggcttgaaccctggcggcggaggttgcagtgagccaagatcatgccattgcactccagcctgggcaacagagagaaactccatctcaaaaaagaaaaaaaaaaaatgtgctaagtgaaagaagccagatacaaaagatcccacgctatatgttccattttatatggaacgtccagaaaacacaaatccctaaagagacaggaagtagattagtggtcacctggggccagaagagattgcaaatgggcacaaggtttctttttggagtaatggaaatgttataaaattagattgcacagcctgggcaacatgtagaaatcccatctctacaacaaatacaaaaattagccaggaatggtggtatgtgcctgtagtcccagctacttgggaggctgatgtgggaggatcacctgagaccaggaagtcaaggctgcagtaagttgtgattgtgccactgtcctccagcctggacaacagagccagaccttgtctcaaaaaataaaaaataaaaataaaataaaataaaattagattgtagtggtgtttactctgtagtgctgtttactctgtaaatttactaaaaatcattgaattgcacatttaaatgggtgaattttgtggtatgcaaattacaataaagctgttttaaaaaggaacccagctgaatttcatttaacattcaaataactaagggaagacacttttaccccatcacaccacaaactctctcttacatgctccttgttaaccccacatctatctcttaactagactgagaatttcggcattaatgtttataatatttctttcctgtttgtttcctaaggacagttttttttttcatttgggatcatacttcatatacttttgttggttttgttatttttttttttcatcttttacatagtgagtgccttcccaggtcactaaatatttttcaaaaacatggtttttaatggctttacataatccattatataagacctgtcacaatttattgaactccctactatttgattttttttttttttttgagacagggtctcgttctgttgcccacgatggagtgcagcaatgcaataacagctcactgcagccttgacctcccaggctcaagcaaccctcccacctcagcctcccgagtagctaggactactggtgcatgccaccatgcccagctaattttttgtattttttgtagaaacagcattttgccatgttgcccaggctggtctcagactcctgagctcaagcaatcctcccacctttgcctcccgaagtgctgggattataggcatgagccattaggtatggccctgttggatgttaagttctgtccagttattttattaaaaaactttgttgtgatactcaattatctaatattgtaaactgtgccatgtaatggctgcaccatccacccagacacctttaacactctggacatctctcctcacccaccaacaccagtcaaccaaccagcaactcccctgggccctgctttcccactcagctgcgggctctgtgccatctctagtttagttaaggtctctccccttccagtctcacccagttaggccctccactcatggttccccacatcgctccctgagaggcaacccggatcgtgctgggtgggggtgaggcccttcagtgactctgggttttaggacctattctcagtccctctgcacctatcccccagccctccccagccacctctctagggactggccacaagcccaggcctgcaggttctcattcttctgtgacttgtacctgttccaacactcctgcctcaaactctgctccatctcccagcaggcaataaggcttcccaaagctcctctcagtcatcagcccccctactcacagccaccatactcactgctgttctagttccaccattctcctagttactgctgtctcccccatcagacagacctcccccatcagacaaacctcccccatcagacagaccgcagactcccaaatgtcagggctgtttgccaggtgcccaggtcctagcccagtgcatcccacacaggagctcacaggacttgaatgtttacaaacagtcctgagcctgaatgcaggctccataccactttctatgaactagctattgtgtgtctgggggcacatcaaaccacacccaaaaagcacaaagaacaggcccagctcacatcaatgctagctcaataactaataaatagccaggcacagtggctcacacttgtcatcacagctactcaggaggctgatgccagaggatcacttgagcccaggagttggaggccagcctgggcaacacagcaagacgccgtctcttaaatgtataaacaaacaaaaatacattaattaccatccagctcaactttgcatttccctccccttctatggcacccgctggcatatccttctcctaatttcaacaaacttccacaaatctcaagcatttcaatcctctctatgtggtttcactacttcccaagagctctccaccaccctgagtacgctgggggcctgcccgcactgtctaccctctgcagatcccagccacggtactcctgccaccacttgccaagccacccccttcccagccactggagctagggactttcagttcttttaaggaattgagccttggtttgtgaccaaaatatcactccctaccccagccagctaaagcacccaatatccccatggacaccaacctgacccttctttgaccttcagcctcacactagtcacagccccagcccagagccagcatctcaaagccaccctgataactgaacccacatctgtggaccctaatggtttctctctgatcccctgcccacccaccagtctcaacactggggggagagggtggtggtggacagagcttccctcacatctgagctgcccaacccaagatgaaactgaccttccccacaacacaatgagcgtttttcaaatcctttcacaatcatcccttaagctttaacagcccaaatctacctgaaggatacaaatacttgtgtgctcctatctgtgcagactctggggaaagatacaagaaattggtaacagaggtggccttctaggagggtgacagacttccttctccctggagatcctcttgtatttttgctttttactatggaatgtatttttgctttttactctgcttttttctctctcctcttcaaaaaaccaaattatcctagagagtacacataaaagagggacttaccactgattttttctctttttcctgttctttatctacaaaagaaaggaaatcagtttttaaactcacttttaaataactctcctctgccctaatttgctacatgaccacaaaaacactaatgtttatgctcactccctggcctaaaaacattttccattttgggcgccctccgagattggaggcgcgcaccaccgtctcgccgatgtgccaccctgggctgcagctgcagcttcgtggacccccagtgtgctcgagttctttcacttagtacattatactttgcattttccacgttatttatttagatcttcacagactggatgttaagcaagtggaaaggcagaacagcctccactcgcggtgcacggggaagagtgggcggcggacgtggttttgggcctgggacccaggtgttcctctaggcccagggcgggcatcgctgcccatccgtcccacaggtggttctgaggcgtctctcaacagccatatggcggacaccagaacccgggtgtaacagtgacccgtttctgtgtgggtccccactcccagggagggcaggagagcgccgggggcgtaacccccctcccccacgctggcaccagagtgtgagcagaatcggcttaaggcagctcccagtccccatcgcccccaaggtcgaaagaatcgggacaggaaatgggtcgggggaccgagtttgggccggaatgttcagagcgtgtccgtcctgctctttaaaggccctctctccatcccagaaccaaagccgagcgcccccagcgctcgctgcggtctcgcgcccgggtaacggccgatggccgcccccgycccagccgcagccggggaggaaatcccgcgcctcggaagaggcgcttcgggctcgggcgggttccggaagccgaggggccgggagtaggtgggcgcataggggctcctgggaggcgggaccaagacgcgcgttaccgggaggccaggcccggcgctgcaccctccgcggcccggggcctgaggccgggctcccgcgacttcccggcccaaagcagcgcagcgcccgggcggcccagccccgcagcggccacagcagcatagccgggcgagcggatccagaggcccgggsttccttcytgtgcgagtcggcgcggacgactgctagtccagccgttgggcgccgcctggatcccggcgcctggcccttaaagagacccggtcgcatttcatctcagcaagaggagaaatactcgaagggagaggttcgccgctggcagccagaagccttaccactgctaggacgctggcagaacgcacccataacttggcaacactcggaggatggatggcaaataataccagcgactgaagggttaattaatgattgcagattaattgaacaccttctgtaatcagacacctggcacacactcatgatgtcacttattcctcccaacaaccctgcaaatagataactgtctctcccattctccgagcttgtcctcagagaattaggtaacttgttcaaaatggtcagaagcaacagatataactccttgctctactctttccccccttctcactactgcacttgactagtctttttaaaacataaattttttggccaggcacggtggctcacgcctgtaatcccagcactttgggaggccaaggaaggcagatcacctgaggccagaagttcgagaccagccttggccaacatggcgaaaccccatcgctactaaaaatgcaaaaattagctgggtgtggtggggggcacccgtattcccagctactcaggaggctgaggcaggaaaatcgcttgaacctgggaggcagagattgcagtgagccgagatcactgcactgcactccagcctgagcaacagagggacacttcgttccccccgccaaaaaaaaaatttttttttaatgatcagaagcggctgggcgcggtggctcgggcctgtaatcccagcactttcggaggccgaggaaggtagatcacttgaggtcatgagttcaagaccagcctgaccaacatggccaaaaactgtctctactaaaaatacaaaaattagccgggcgtggtagcgcacgcctgtaatcccagctactcaggaggctcaggcacgagaatcgcttgagtctgggaggcggaggttgcagtgagctgagatcgtggccactgcaatccagcctgggcgatagagtgagactacgtctcaaaaaaaaaaaaaaaaaaaaaaatcagaagcattcattaaggggtgaagctagaattccagcccatttctcttgctttgcagctggagctctttcctctgaactttgacagttccagcgtctagactctaaacgtactagatccctccagaggaggcaaccaaatattccaactatacagacaagtaggggctagggaggaagcatgtaaattccatcatactcagcaaaaattcagcccagatgtggagtcacagagtattagaattcaacaggcccaagtccagtaaccggagctgttgccactcttgactgtgaaggttccagtgcttgcgtggaggggtttctcacctctcccgggagggcgtgatgctggcagtcaccactaggcagggagaaggaagtcatttgcctctagatctgctgcctcatcttgtgcttcctgtatatctgccacacacctagcaagtgtgctctccgtaaataaacttcaggattaaggccatttttgtgagtgatttgtgatgaagctgttggaggtaactgtcgatcagatttaaaagaatgaaatggactgaagctgagatgggcaggatccaaacagatctgaatgaactacggtgatggccaaattatccaagatagaatgtaaatcacataaaaggagcgacatatacttcccatccctaaaaaggaatgccccaagacggtggagatctggcttcatggcagcacttgagaaaaaacattaagtatctgaagggactcaggctgttccacggaagaactagtaccagtgggaggcaaaagtaaaaatatgcagaacaagtcccgagtgtgatgccctgggggcttggataggacctgaggctgcacactttctgcaccaactatgtgccagaacctgggccctgcagggagagaagcagaccagtccctgcttttgtggaatttgtatttttctgatatatatcagctagcaataaacgctcagaagttatggtggctgctctagacgggatgaccaaaggagatcccctttaaggaggtgatattcacaatgcccaagttgttgggagatggggccgccatttctacagccccctccctctcctctgctcccaaccctgggaggatttcccgacaggaagactcctcaggagagctggagtgctgccgtcattaacgccaggccagaacacggcgggctaacagggcgctggcctgcgtgcccacctctaggtccgctaatatgtgcccagctctaggtccgctaatgtgctacgcgataactgaaagacagcacaagccagagcggacggccgcgggatcccgttggggcgcatgcgcgagagcgaacgcggcgccgtgcgcatgcgcgcaagagagcgggaagccgagctgggcgagaagtaggggagggcggtgctccgccgcggtggcggttgctatcgcttcgcagaacctactcaggcagccagctgagaagagttgagggaaagtgctgctgctgggtctgcagacgcgatggataacgtgcagccgaaaataaaacatcgccccttctgcttcagtgtgaaaggccacgtgaagatgctgcggctggtgaggccgggccgcggagggcgggaggctgatgaagctgctggggggcgggagatgtgggtgtgaagtgcaaagctgaacgcctgtttgcttttcaacctcgctttgatcaagattgaaaggcaaggcatggcctccttggggaagaaggagagagatacggcactgtcctccccttaggagggtttagggacacactcattcatgaaaaccagagagggcggggcgccgtggcgcacacctgtggtcccagcactttgggaggccgggacgggaggatcgcttgatcccaggagttcgaggctgcagtgaacgttgatcgcaccactgcacacaagcctaggcgacagagaggtcctgcctctttaaaaacaaaaacaaaaaaaaaccctttttttaaattaaaaatcagatctacccaaatggtctacatttggacccacaaaccgggtacccaggttaccaggcgagacaactgcagttatacctctcagaagcccacaagatttgaaagaaaaaaaaaaaagcctcaggggtttcggtgaatgttgtgtggacttccgtgagacagacgtttgatgtgactgagttcaaggctgatacagcccagaaccaggacaaggagagaactgctcgtttccgggagcagacttcctaccgggagcactgcagtcacttctgaacaggtttggaggaagttgatcatttggagagaagtgacctagctagttagagaagtggaaactatcctagttgaaggaatctattctagaaactcatcattggaggaattcacagagaaaccttacagggaaggaaaaaataaatcattttaagttttaaagagttgacatgggagaggcaaaatggagatagttcaaagttacaaggaaaacatttccaattaatgtgaggaggaatcttatattgggagagctcccaaaactaaatggccacttgggaaggcagtacattcccagacaaaagtaccaggcatatgtgagcacttggtgaggatgttataaaggagactcaaacttaaggtgagtgggttgaacaaagtgcatataagatccttctcacaccaaaagtctgtgattgtgagaagtagctttcatatcatgtaagttgagatacataagaggtttagaaaccactctggagttgagggaaggagaaataacttttgattgggagtaaatactcagggcaaaagtgaccagaaggtctgggatcttgaacactgaaaaaggaaagatcttgaacactgaagggggaaccatgtgagaatggtcctgtgagaatggttagtttttgatatattaattctctcaacaaaccatttgaatacttaatatggtccaaactctgggctaggagctggaacagcaaagacgaaccaggacaaaaatccctgactcatggagttcttcagtttaattatgagacagacacatgagcagatagttaagatatgtgataagatggagatagaacacagaagcgaggcgtctaaccaaggagaggtgtcagaaaaaagctcttcctagagcaatctagggttggatctaagagccacctgagtaaaggcatggaggcaaaaaatagcacaattgatgcagagaaatataagaagttgagtgttacctcatttattcaacaaataatctgtgtaatgcctgtcatgtgccaggcactattccaggctcttgaaaaatactagtgaaaaaaaacaaagatccctgccctcgtggagtacacattattgggatgggagggcaggggaagcaaacacaataaattttagtattctagaaggtggtacgtgcagtggaacgagaaaagtaaaagccaggtaagggagtgtaaggcggggaaggagttgcagagaaaagttgcgtaatgaatagaattctaggctttgttgagatgacatctgatcaaagatttgagtgaaatgagggagttagctatgagaatacctggaagaagagtgtttgaagcagagaaaatccagtgcagtggccttatggcaggaatgtgtgggaaggcatcaagaaagagcaaggaaaccagcgtaactggactggggtgagtgagtgaagatgaggaaggttttaagtaaagtatatgatctaacttacattttaaaagtatactaggccaggcccggtggctcaccctgtaatcccagcactttaggaggccaaggcaggcagatcatttgaagtcaggagttccagcagcctgaccaacatggtgaaaccccatctctactaaaaatacaaaaaaaattagccaggcatggtggcgtatgcctgtaatctcagctactcgggaggctgaggcaggagaatcactggaaccggagagacagaggttgaggtaagccaaaatcaccccactgcactccagcctgggtgacaaagtgagcctccgtctcaaaaacaaacaaaaatatactagctgctatgttaacagtagattggtagggaaggacagaaggggattgctgcaggggcaaaggtaaaaccaaggagaccaattgcagtaatctgggcaagaaatgatgatggtggctggtggtagcaaagcaggtaataagaagtggccacatttgggatgtaatattttgaaagtagcaccaacaagatttgctgatgagccagatgtggggaaaaagaggagtccaagacagcttctgaagtttttggtctaagcaactggaaggatggagtcaccatccactgagatgagacagcctattgataaagcaaatgtgaaaaaaggatcaggagtttgattcatgtggataaattgtgaagcaagtcttttctcaagaagtagacaggagccaaattgtggaagatcttgaaaacatggtgagaagcaggctctaaagaccctggagagccactgaagaattttaaatagatgaagaaatgcgtaaacaaatttgcatgttagaaatttcatcatgatagttcatggaaaagacgatgaaaggcagtagttgtaaggatgaagaggagggagtgcccaaaatgtttaggcattaagttagcaggacccgattattgatcagttggggaatgggtaggaacagtgatcttaggttcctggcatgggtgataaggtagattgtggtaccaccagttgaggttgtgaatccaggaggaaggggcgggatttcagttttagacatggtgaattgagattcctgtaggttatccagatagggattctaaatggctacttggtgtgaaatgtggagaatggacctgggttagagacccagactcattgagtggaatgagaatgacagcattttacaggggagaataaaaggagaagaacccaccaagagagaacagtcgcggaggtttaaaatctcggagaactgacacgggagccaaaagaaaacactagtaggggaaggacagccaatggcaataacgtcataggggtccactaggataaggaatgaaaaatgttcattgtaaaacagcagctcaaagtactggaaaaaaagaaaaaagcattcattaaatttagtatttctgaaatcactgatgttagcaaaagcaatatccatagagtggtaatgtctgaaatattattagtgagatatgtaaaagataactggaaacaaaggccaggagcttaggaaagatgtaagaactgtaaatataaatcacaggagaacacagtttgacagaaaccatagaaaggtttaaggaaatggagtaatcaccagtgcaaatcaccatgatgaaaaaggttacagaggatagggactgaaaaagtggcccttcatttcataatctgtgggctgaagaccttggtccaatagagtaattggagtagtttgagattatgtgttgctaatagtaattatattaattataaagaatgaagttacttagtaactagttatttgtaatcaaactgatcagtttagaagtttaaaagaaaggcatatttatgctaataaagtaattggaagaattatgaataagtaacctatatggacttaaaatgagtatgtatatgttaccagctgacaggatattttaaaagtctagccagggaagactcttgaccaaaccatttaccaaaaacacagagctttggaaagagctttatttcctaagaacattgacagaactcccctgggacccaccagctatttttttcacttaacattgccatgttctgtatcttcatttggaaatgaagaaatttcagagttttttatgtttttttttccacttaaaatagcatagattctgattgcattgtttaggtggggtgtgtaaaaaatggtactttggtaataaagctattaaacatcagaattgtttttctctgacaattttttttgtttttgtttttga

SEQ ID NO: 93813 - DNA, 18346 bp, Homo sapiens
ttacttcagaggagatttgaataaagggctgaagaaggacttgtatttttcaaaaattctcaagcatttttcactggcacagcctcaagccttgctaaaccatccctgagctagctgccccacagggaggggtagctcttctggctttattcagatgctctggggagtgagaatgccacagaactactgcaatgacaaacttttctgctaactgacaaagaacaaagacacttgagatttttacaaattgtcctagatatcagcgtggacgttacagcttttttttttttttttttttccgcaacataattttgctctgttgcccaggctggaatgcagtggcatgacctcggctcaccgcagcctccacctcccgggttcagtcggttcttgtgcttcagcctcctgagtagctgggactataggcatgtaccaccacactcacttggctaatttttgtatttttgtagagacggggtttcaccatgctggcgaggctggtgtcaaactcctggcctcaagtgatccgcccacctcagcctcccaaagtgctgagattacaggcataagccactatgcgtggccggatgctacaactttaacagtgagatagaaactggctgccactgtctcaggtcttcctgacacaagatcatcctcaaatccagctttcctaacattccatagatgtcttgtctgtagccaggcacagtggcttatgcctataagcccagcactttgggaggccaaggtgggcgatcacttgagctcaggagttcaagatcacctgggcaacatagtgggagtctctctacaaaaaattcaaaaattagccatgtgtggtggtgttcgcctgtagtcccaggatcgcttgagcctgggaggttgaagctgcagtgagctgttcctgcgccactgcactccagcctgggcgacagagcaagaccctgtctcaaaaaaaaaaaaaaaaaaaaaaaaaaagtcttgtctgcataggtgaggaatcaggggactttgcaggaatcatccaagaggtccatttctttacccctgtcactcacctgggtggttttgtttttgttttgttttgtttttgagacagagtcttgctttgtcatccgggctggagtgatctcagctcactgcaacctctgcctcctgtgttcaagagattctcttgcatctggctgttttaaaaatagtgttgcagctgggtgcagtggctcatacctgtaatcccagcactttgggaggctgagacgggccgattgcctgagctcaggagttcgagaccagcctgggcaatgtggtgaaaccccgtctctactaaaaatacaaacaaacaaacaaaaaaattagccaggcgtggcagcgtgtgcctgtagtcccagatacttgggaggctgaggcaggagaattgcttgaacccaggaggcagaggttgcagtgagccaagattgtgccactgcactccagcctaggcagcagagcaagactctgtctcaaaaaaagaataaataaataaaaaataaaataaaaatagttttgcttttccccccctcattatacaagttatgctagatggagtaatgtatatttactgtaaaaaatttgtaatgttcacctttgtctctttaggataaattgaaataagtagaattagtggatcaaaggtatgcccattgagtagcctccatgtatgctctgtattagtcagttttcacactgctatgaagaatacctgagactgcataatttataaaggaaagaggtttaattgactcacatttccgcatggctggggaggcctcaggaaacttacaatcatggcagaagacaaaggggaagcaagacacgttttaaatggcggcaggcaagcaagagcacaggggaaactgtctgttataaacaatcagatctccacgaggtcaggagatccagaccatcctggctaacacagtgaaatcctgtttctactaaaaatacaaaaaattagccgagaatggtagcgggcacctgtagtcccagctacttgggaggcttgggcaggagaatggcgtgaacccgggaggcggggcttgcagtgagctgagatcgcgccactgcactccagcctgggcaacagagcgagactctgttaaaaaaaaaaaacaaaatcagatctcgtgggaactcactcactattatgagaacagcatgagggaacagcccttatgatccaatcacctcccaccagatccctcccttgacaagtgggaattacaatttgaaatgagatttgggtggggacaaagagccaaaccatatcacactccctgctaagatggcaatgctctcttgccaatgttatgtatttaaaccctgttttaatatttaccaggttgactgacaaaaattaatggttcatttaattagcatttctttttcttttatttattattattattaatattactttgagacagggtctggctcttttgcccaaggtggagtgtagtggcacaatcttggctcactgcaacctctgcctcccaggctcaagccatcctcccatcctcccacctcagtctcctgagtagctgggactacagatgcataccaccacgcctagctaatttttgttttgtttgtttgtttgtttgagacagagtctcactctgtcacccaggctggagtgcaacctctgcctaccaggttcaagcacttctcctgcctcagcctcctgtagctgggattacagacacaaactactacacctggctaattttttgtatttttattagagacagggtttcactatgttggccaggctggtctcaaactcccgacctcaagtgatctgcccaccttggcctcccaaagtgctgggattacaggcgtgagccaccgcccccagcctaatttttgtattttttgtagagatgggggggtttcaccatgttgcccaggctggtctcgaactcctgagctcaagtgatctacctacctcggcctcccaaattgttgggattacaggcatgagccactgtgcctggccatttctttggttttgagtgaggctgaatatttttacatcttttctctaaaaatgccaattgaacagctgggcacagtggctcacgcctgtaatcccagcactttgggaggccaaggcaggcagatcacaaggtcaggagtttgagaccaacctggccaacatagtgaaaccccctctctactaaaaatacagaaattagccgggtatgatggcacatgcctgtggtcccagctacttgagaggctgagccgggagaatcgcttgaacccgggaggcggaggttgcagtgagccgagaccacaccattgccctccagactgggtgacagagtgagactccatatcaaaacaaaaacaaaaacaaaaacaaaaaaaacctgccaatcgagctatgctttccctttctcgaaggagagagaagtaatccttttccatcgtatttgcttataagaccttgggacaaggaagccttgagagatccggtgagggacttcggctggccatcctatatagggtgactgaactggttatagccttgaaatgaaagttccaatgcacataaaatcctccagggtgcatttttactttggaagtgggtgtgtgtggtaacttagaaaaactcagtggtttcaggcttggtggaatgatgtaatttttctcaggaaagtggcgggggccgccatctgtgtgtctcagcagtcagcccagggcctgacacattgtgggcacccataacacctgcagattgaataattaaacactgctgcctctgtccggaagggtaacccgttgtgaccctatatgacctgtctgctggggggagggaagaagtgtgcttttgcattctcttgcactcatttattagaaacccttagacttttttttagtttgggtctgaaacagtcctcttaatatgcaggaagagagatattgccagtcctgactttgaacttctggaaagggctaagggtgagtggaactataaatatacaagggcaagtctgacatgagcagttttattgtgaccacgtccttgggtccaggaggctggccaggctgcccaggtaagccagggtgtcttccttctggaaaaccacactctcagggctccaagtggctttttctggttgtctcccatttttctctgtctccagggaaggactccatctgacttaccatagttacaagagttctgtgaaaataatttataaggaagcaggtcatcactggaatgccacaatgttaggaccagaagggacggagggattatctggtgtcggggttcgctgtctctctcaacctaccagccgccagccgtgctgagttaattgtcagtagcaggccaatataatggtcagttcaaagcttaatggtttgtgggaaaccactaaagactttagggcaggaggccgggcgcggtggctcacgcctgtaatcccagcactttgggaggcggaggcgggcggatcacgaggtcaggagatcgagaccatcccggctaaaacggtgaaaccccgtctctactaaaaatacaaaaaattagccgggcgtagtggcgggcgcctgtagtcccagctacttgggaggctgaggcaggrgaatggcgtgaacccgggaggcggagcttgcagtgagccgagatcccgccactgcactccagcctgggcgacagagcgagactccgtctcaaaaaaaaaaaaaaaaaaaaaaaaaaaagactttagggcaggaatttgagggtttttttggtttgtttttgtttctgtttttgttttttttgagacagactctcactctgtctcccaggctggcgtgcagtggcatgatctcacctcagtgcaacttccacctccctggttcaaatgattctcatgcctcagcctcccaggtagctgggactacaggcgcgcaccaccactcccagctaatttttgtatttttagtagagacggtttcgtgatgttggccaggctggtctcaaactcctgacctcaggagatccccccgcctcggcctcccaaagtgctgggattacaggcaggagccaccgcactcggccttggaatttgagttttagaagtgtcattctgccaggcgtgatggctcacgtctgtaatcccagcactttggggaggctgaggtgggaggattgcttgagcccggcagtttgagaccagcctgggcaacatagaaagaccttgtctctacccaccaaccacgagaaaaggtgggaggggcgtcattctggctgctctgctctgtggttaggaccaagtcaaaggtggaggagggaaaaccgtaaaatcaagtgagaggcttggaatagggtggctgcgtcgccggatggatgagtggagagagatttaggagataggatttacagcattagataactggaaagagagggtgagggagaggaaggagtcaagatgcctcccagggttttggcttgggtctctgggcagatggtggggccattactgggttaggagagaagagaaaaagcaagtttggcagaaagctgagtttggggtaagttatgtttgaggcgcctgggggcctccagaggcaggtgtccaggtggctggacatcagggtgtggcgctcaagagagggttctggagtggtcgacaccgaagtggagaggaagcagtgaggtgttctaacaacggtgaggaattggggaggccgctgggttcggggtatgcagagtgtagcggccacgtagctggcgatctcaggcacgtgactgcctggtcctgtggccccgcgctcgaacactttcagcacccaggcagggggtaaggggcggtgttgccccctcccgggtcccgcctttctgcccgcctctcatcctctttagccattgggcaatacctctgtccatcaagggccygcctccgcaattgagccaaccagggctggcgggagggcgcttccttctggagctgggtcctgactagggaccgcctgggtgaggtgaggacctggtggccgcagttgtggcactgtgcgcaggcgctgaactgaccggacggagcgggcggctgtggcctcgccagctggtgagaagcgggcgagggtccgaggtagggaaggtaacgagcgggggatgtggacacctctttccccgccaggcctcgccggcgcctgaccctcccggcctgcggcaccggctcaggtgactgggcggagggagagctgaggtgagggggcgggtccgcggcggagagggaccagctgggcctacgaccacggtcaccccactcacgtgcgcgcgccacgtgggcccgcgggctcgccgaggacccttggctgcctaccggggcaccccactagctgctctggcctatcgagcaccccttggagctctgtgtcccgactgcacgcccctgttttacaggctggcaagccggggctcagaggcaccaagcgggtcgcccgggggcacccagctggggtacggccgtgccggggttctagggagatcggttttggtgggctccggagtccatgcacttagcgatgaggctgaagtcagagatttgaacttgggacctgtctgttttctttaaggatgcaagagggtttgcgtcctggctgcggtgtatcaccctgcaccgctgcctgccttgactgcagggccggagcgtcaggcgccctctgctcccggacagaccgcccccgcaccgacttctgcggggtgggctggcagggggtgggggagtgaagggacggtcctcagtcctgggaactcttgaggtcccgacaaatgatctcgagatcccgagggcaggattcatacatgaaaagctcattataatgggtcaaggttttgttctgtttttttttttttawtttaatttaatttaatttaatttaatttaatttattatattccaaggaaaagtaccaccagggctagtgaagggactaggaaactcgtcacccccttgaggaggcagatgtgaagcttttggaaatcagtttggcaatgagtctacacccttggacctactgactccttgtttgggaaataactaggataaaacctaagtagagaaaaggttactgcataaagcagtacagtttggtggggttttgttgttgttgttgtttttaaagagacagatctggctctgtcgcccaggctggagtgcagtggtgtgatcatagctcactgcagtcttgaaatcttgggctcaagcgatcctcccacctcagcctcttgagtagctgggactacaggcacttaccaccatgcccagctaatctaaaaatttttgtagagatggggcacttgctgtatcacccagggtggtcttaaactccctagcctcaagtgatcctcttgccttggcctcccaaaatgctgagattataggcatgagccactgtgcccagtccagtttggtattttatattaataaatagcaagtagtagaaacaacctctaaatttccagccgtaaagaatagttaagtaagttgtgattatttatgtcaaaatgtagccatcagatgtgaaaaaatactcttatcaggaaagccagattcaaagttggggttacaactctacaaaaatacgtacagaatgactgtgcgcagtagctcccacctgtaatctcagcactttgggaggccaagggcggaagatcgcttgagcctaggagtttgagaccagcctggaaaacacggggagaccctgtctattagctgggcctggcggcacatgcctgtagtcccagctatgtaggaggctgaggcaggaggatcccttgaggccagaagggcaaggctgcagtgagccacgatcttaccattgcactctagcctggggacagagccaggctccatctcaaaaacaaaacaaaacaaaaaaaaaccaaacaaaaaatacccagaatgacttagaggggtatatacctaatgatgaaaataatagctacttttttttttttagcagaagcgtcatattttattaaattctcacaaaaccttctaagactaatattcccattccaccaatagataactggagtgttacctcatcagcagtgtgtctgatgctacacaagatagtatcacagctagtgtgctattgggcctctgaaaatgtcatatttagccagtatttgaggacttagtgtgtgccgggtacagggccaggcactggaaagctgttggtgagtaaggcagccatagttgcttgagtcatggagtttatagactagtggggaaatatacatgtatataaaatttagtttttgagacagggtcttgctctgttgcccaggctggagtgcagtggcaggagcacagctcattgcagtcttgacctccagggcttaagcaatcctctcacctcagccttacaagtgaatggggctataggtgtgcgccaccatgcccaactaatttgtaaaaaaattttttgtagaaaccaggtctccttatgttgcccaggctggtcttggaactcctaggctcaagtgatcctcccgcctcagcctttggagtggttacaggtatgagccactatgcccgaagcagattatttatttatttatttatttttgagacggagtttcgctctcgcccaggctggagtgcagtggtgcaatcttggctcactgcaaactctgcctcctgggttcacgccattctcctgcctcagcctcctgagtagctgggactacaggcgcccatcactgcacccagctaaatttttgtatttttagtagagacggggtttcactgtgttagccaggatggtctcgatctcctgaactcgtgatcagcccacctcggcctcccaaagtgctgggattacaggcgtgagccaccgcgtcaggcctgtttttgttttctttgagacagggtctcactccctctctagtgaggcccaggctagactgcagtggcacaatcactgctttctgcagcctcaacttaccaggctcagatgattctcctacctcagcctcccaagtagctgtgactatagatacacaccaccatgcctggcaatttttttattttttttatttttttggagagacagggtttcaccatgttgcccaggctagtctcgaactcctgggctcaagctatccacccaccttggcctcccaaagtgctaggattacaggcatgagccaccaggcctggcccccgaagcagatatttaaatgaacacttatagtctgctggtgagagtgagtttagtgtattttaaatagtttattctaagtcatttttgttcaggatattagcaaatgttttcagaagtcagtatttttaagaaattaaatttgtggctgggtgctttggctcacgcctgtaatcccagcactttgggaggccgaggcaggtggatcacaaggtcaggagatcgagaccatcctggctaacatggtgaaaccctgtctctactaaacatacaaaaaattggccaggtgtggtggcgggcgcctgtagtcccagctactccagagtctgaggtaggagaatggcatgaacctgggaggcggagcttgcagtgagcagagatcacaccactgcactccagcctgggcggcagagcgagactacgtctcaaaaaaaaaaaaaaaaaaaagaaattaaatttgaaacttcaactttttaatttttaggtttaaaaatatccttttttgctgaaggaacacatttgctggtatagtttcagaatgtcaagtactgtgtcctactggatcttaaattctacaaggaacagcattgccacattgcaagggggtagacgcttatactccaggtatgtctcaaataggaataaattaaaatggaggctcttttcccgggtgccacccaccctaaacagttccccatgtggtggctttactctgtgcaaagcctacagacacacatcaacagaggaagatgattttcacttgcaactcagccctgagcagataaatgaagtgcttcgagctggcgagacaacccacaagattcttgaccttgaaagcagagtcccaaattcagtgttgcggtttgagagcaaccagctggctgccaattccccagtggaggaccggcgaggtgtagcctcctgcctgcaaaccaatggactgatgtttggcatcttcgatggacatggtggtcatgcatgtgcccaagcagtgagcgagaggctcttctactatgtggcagtgtccctgatgtcccaccagaccctggagcacatggagggagctatggaaagcatgaaacccttgctgcccatcctgcattggctcaagcacccaggggacagtatctacaaggatgtcacatctgtgcatcttgaccacctccgtgtctattggcaggaactgcttgatttgcacatggaaatgggactaagcattgaagaagcattaatgtactccttccagagactggattctgacatctcgctggaaatccaggcccccctggaagatgaggtgacaaggaacctgtcactccaggttgctttctctggggcaacagcttgcatggcccatgttgatggaattcacttgcacgtggcaaatgctggtgactgccgagccatccttggtgtccaagaggacaatggcatgtggtcttgtctgccccttacacgtgaccacaatgcctggaaccaggccgagctgtcccggctaaagagggagcaccctgagtcagaggacaggacgatcatcatggaggacaggctactgggcgtcctcatcccctgcagggcctttggggatgttcagctgaagtggagtaaagagttgcagcgcagcattctggagaggggcttcaataccgaggccctcaacatttaccagttcacacccccacactactacactccaccctacctgactgctgagcctgaggtcacataccacaggctgaggccccaggataagttccttgtgctggcctcagatggcctgtgggacatgctgagcaatgaggacrtggtaaggctggtggtggggcacctggctgaggcagattggcacaagacagacctggcccagagacccgccaacttggggctcatgcagagcctgctgctgcagaggaaagccagcgggctccacgaggctgaccaaaatgcagccacgcggctgatcagacatgccatcgggaacaatgagtatggggagatggaggcagagcggctggcggcgatgctgacattgccagaggacttggcgaggatgtacagggatgatatcactgtcactgtggtgtattttaactcagaatcaatcggtgcatattacaaggggggttaagaatctcccatcctattgtcaaggttaacataaatgctcttctaaaatgtttcacttactcctaaactagctatccaaaccttactattaaaagcgcaggcagatttaatttgctaaatagactaacaggaggaaaaaaacaaacagcctagctttaaaaaacagtgaaatagcagtgatttcatgtccctgtatgttctgattaagtcttatatgcagagaggacagagcataaagtctatagaattggcttgggcttgtgtagccccagtcatttgataaagatgttgttaaactgtgtcagcctgagccttcaaagggtaaatttaatcatgattctgagaataaagaacttcaggagcttcttaggtcttgccacaaaaatctgcaaatttgataattctcctgaattcacaatcatggacttgtagactatgaagagatattttatttgtttgtcttttatttaaattactaaggtctaggtttacaaagcatactacaggacccttttctatgcaatatcctaacttttttttttgtgattatgcttgtgagaaattttgtaatactacattctagttctgttttcgtttattttaaaactgaatccttaaacttgcaaacacgcctactgtaagcatgcttggaatgacttgttttggttttcagctrataggatctatgcctctggaccagctgaacttactggtgcagctttttgtgccctctactgagtcccattccagaaactttgagccatgctaggaggtaactagtctatgccttaactcctgacctttcctgcattagtaaaatttcctcctgggctgagcctttgggggttgattcacagcatttaagctttctgattatacctctcaaacattcttctgtcaattccacacaatccttctacctctgctatgctgaacccctcattcaccctgcacctgccaactgcaaaatattgtctgaaagaatctttcacatgttcctgcttcctatggctgcaggaaaggagaaaatgtgattgcatgtggtagttgtggtgatagacgtttagacaggacaggttaatttagcggattgtggacttaagattcaacctctatctggagaggtgaaaacacaaaggcttaaggacaacagtttctaaccaagtttctctgaatcctttcctgagaggtggtgggcaggagggaggagtgagacttatcagatgggacgcttgccccaagactgtgggataaaccaccattgctagtcctcaggaattagaccatatttagtataggagttggggcaaaaataaaagtgtaatttgtaatggtttctgtgggctgtagactctttgtatttacttggaaattcagttatgtggatccattttggagatgaatttcatctcatgagttgctgtggcatttaaacaacaggaaatgtgtccctaaatggaaacaaatataatcccacaaaaccaacaattttatttgcctctactacgtcaggcagaattcttcaattaagttgaactacatttgttgatcccttttctcatcttacccctttatgccacctactgaaaagaaaaacaaatagctaggtttggtttcctgttttttgtctatgtcccagctgacattcagtcaaatgttgggatacttctaatttggtggtgtttctttgtacatttttcagtgcaactgtttagtcatgtgttttcatctaagaaattatcttttgaatatttaagccttgatccttttattctgaaaccattaatattccttcttggctgggtgcagtagtttacgcctgtaatcccagcactgtgggaggccgaggcggatggatcacctgaggtcgggaattcgagaccagcctgaccaacatggagaaactccatctctactaaaaatacaaaattagccaggtgtggtggtgcatgcctgtaatcccagctactcgggaggctgaggcaggaaaatcacttgaacccgggaggcggaggttgcggtgagccaagatcgcaccattgcactccagcctgggcaacaagagtgaaactctgtctcaaaaaaaaaaaaaaaaaatccatcttatctcttagtccgtccgtccttccttccttccttccttccttccttccttccttccttccttccttccttccttcctctctctctctttctttctttctttccttcttgacagggtctccctgtagccaggctggagtgcaatggcatgatcttggctcactgcaacctctgcagcccaggctcaaacgatcctcctgcctcagcctcccgagtagctgggactatgcaccaccatgcctggctaatttttttaattttttgtagagacagggttttgccatgttgcccaggctggtctcaaactcctagactcaagcaatctgcccacctcggcctcccaaggtgctgggatgataggcatgagccaccgcacccagcctatctcctagatcttgaatcaaaaataaaatgtaaatcacttccattctgctagcatgagggtttgttgctaaaattgaggattctatctgacgtttactttttgttgttttttgagacaaggtcttgctttgtcgcccatgctggagtgcagtggcatcattataactcactgtcaaactcctggactccaatgttccctccccttttagcctcccaagtagctgggtctacaggcatgaaccatcaggcccagataattaaaaaaactttttttggtgaaaacatgatcttgctatgttgctcaggctggttgtctggcattttctttgtcctttattctttatactagctaaaccctggagtatccttgaagcctttactggcatacagagtacctgaatcttactttggagcctagcatgggtcataaatatatctgattcattaacctgtgagacagctgagagaacacagactccttacctgtatctccaggcatatctggtttttctctgcctaatagattttcctgctttctagttagtaatattgagaaagaagaaaggcttatttatcatttgctttttttccactgtgaatcatctgttctttccatgaacattctggggagcacctcctgattaaactcctgtctccctgaccactatcctgctgtcattggacttcttgaagcacatgggctactgccccaggacactgggatttgagaggagtttagtggtaattgtcaggtctttcaaagcatttattattccttttatacggagatttcagtattgagacttaaaatgaactgaaaaatgagattgaacatttaatattttggatgtaacttttgaagaaagtatgctttggtgcttaaaattgtatatgattttaggtaagaaactttgataatattggcataatttagatttattttctttcttttttttgagacagtctcactcagtcgcccaggctgaagtgcagtgacacagtctcagctcactgcaacgtctgcctcccagattgaagtgactctcgtgcctctgccacagagtagctgggattacaggcatgcaccaccacacaccgctaattttttgtatttttagtagagacagagtttcaccatgttggccaggctgcgaactcctgagctcaagtgatcctcccacctcagcttcccaaagtgctagcattacaggcatgagccaccacacctcaccagatttttaaaaaatatataactgcatctctcttgattctggggcttggtaaaaatggatagataagatagtattctaaattcaaattcgtggctaggcacagtggcccacacctgtaatcccagcactttgggattccaagacagaagactcacttgagtacagtatgagaccagcctgggcaacatagatcttgcctctacaaaaaaaaaaaaaaatagccaggtgtggcacatgcctgtagtctcagctgcttggaaggctgaaatgagaggatctcttgagcccaggaggtctaggccagagtgagctgtgatcgtgccattgcactccagactgagtgacagagtgagactgtgtctaaaaaaaaagtttgaattaaaaaaaaaaaaaaaaaagtcggctgtgcacggtggctcatgcctgtgatcccagcactttcggaggccaaagtgggtggattacctgaggtcaggagtttgagaccagcctgaccaacatggtaaaactccatctctactaaaaatacaaaaattagcctggaatagtggcgcatgcctgtaatcccagctacttgtgaggctgaggcaggagaatcccttgaacccagaaggcagaggttgcagtgagctgagattgtgccattgcactccagcctgggcaacatgagcgaaactccatctcaaaaaaacaaaaacaaaaaacaaactcaaattagcatgatagatcaggctacttagattcagctttctgagatgttatttgttaacattaaggctaatttattataatgaaaatgtaaactttgaggtatgttaatatataaacatctttttcctttggcctaaaaggtctttagtattcagcacactgggtaaagttcagtttagacacaatcaaattggcatcttttaaacataagtgaaatatagagagcttgaacttgagttacttaaagaagatacagtataattaattatacagaacaaaacaaagatgtgtttagagtgactctggcctgactcttgtccatcagcccctagtagcctatcttcagcctttgggaagtcttaacttcccaggttaaactagaatattctggaactgagctgtccaaatttcatcttaaagtggatcatttgactctgaaacacgattctcatggcagaaaaagccctggtgtttccttggagctggggataaaggccagtgagccagcctgtgatgagagctgcccctggcactatctgagtggaaagctcattgggacagccatgcagctatcagagccgactgaagccctgtcccttacccctcaggcacctgatgcttaacttgcctcctgggaaataatgatctagcatttacttggaacaatgattaatcatgttctttaataattgctgacatwtgtattttaagctgtataccaatgttcgtatttgacattgattttctaaccattagagatatttaattaaaacttggaaatgaaagaaacaaaatgaaatttagtttcttttggtttgaatcctaattttttttttcagtccttaaggtactagattaggccaacctttgtttcaccacctttatctgaccgtggaagattttaggctgttcaagagtccacccaaaagagaagtatgctgctctgcaaaggtttggtggctgttgcccaggaaatcctcatttagtgttgaccgtgtgtgtggagacctgaaagaagtgaaggcttttgttgtgagggtctccacacactcagggccaaagcctgccagaatttcatactatttaacttgagacattaaaaccaacttggcacattaccccctcgccccggaagagagaagtgggcagaagtggaagggtgcagtggctcatgccatcatgcccagccaaccctccttttcagcaagatcaaattgatgcccagaggttgaaaaacacccacgacacagcggtagggccaggatttgaaccaagtccaaagtcccaatactgggctttcaggaagggagaattatgtacagttttttgcacaattttggcctggaatgagtggggctgggaggagaggttggtggtactgaaaggaagctagaaggcttttggggggttattgctgataatagcatagttttatgggcagagtgtggtggctcacacctgtaatcccagcactttggggggccaaggtgggaggattgcctaagcccaggagttcgagaccagcccgggcaacatagtgagaaccgccccccccatctctacaaaaataaaaataaaaattagccaggcaaggtggtgtgttcctgtagtcccagctacttgggggactgagatgggaaggttgcttgagcccaggaggtggagtcttcagtgagccatgattgtaccactccacttcagcctgtgcggccaagcgagaccttgtctcaaaaataataataataaaataagactgggtgctgtggctcatgcctgtaatcccagcactttgagaggccaaggtgagcagatcacctgaggtcagaagttcgagagcagccaggataacatggtgaaaccctgtctctgctaaaaatacaaaaattaaatgggtgtggtggcacacaactgtaattccagctacttgggaggctaaggcagaagaattgcttgaacccacgaggcagaggttgtagtgagctgagatgatgccactgcactccagcctgggcgacagagcgagactcagtctcaaaaataataaataataataataataataatagtagtaataataaaatagctctgtggactctgataatgctttcgctcttatgagtaaagctacatatatttaacttatacacatgccaatgtcccatcattttagaacatgataaagggaacacagggagaattaaattttttttttttttttgagatggaattttgctcttcttgctcagggtggagtgcaatggcacgatctcagctcaccacaacctccgtctcccgggttcaagcgattctcctgcctcagcctcctgagtagctcggattacaggtatgcgccaccatgcctggctaatttttagtagagatggggtttctccatgttggtcaggctggtctcaaactcctgacctcaggtgatctgccacctcagcctcccaaagtgctgggattacaggcttgagccaccgcatctggccagaattaaaatttttaaattgagctgtttgagctctttaaatagagcggggaggaattaaacttatagacttattttttgcctttcatct

SEQ ID NO: 93814 - DNA, 56054 bp, Homo sapiens
  misc_feature (1)...(56054): n = A,T,C or G
ctacagaggctcacagggtgtcatggagcacgaggaaaggtgcagggaatcctagagaaagtcttgtgtttaaggagcaagacaggaaggagaaaccagtcagtgagatgggtcaaatgtaagtggagaaaggaacgtccaaggagaagcgggctgtcgctatggtgaatcatgcagagatgaaggcgggacgatggagcagtggccccttgggcttggcaggtgatcaaattcgaggtcatgatgaccttcaggagagcactgtgtgcagagtgccagcagtgggaagggaccgggtgggagggaggaygtggaatgtgagggtggtctcccctgcaggaagtttggccttggaggggatgaaaatgaagggcagggaggagtcgcgagcgaacaagcaggagggtgttcgactgctagagctgagctaagcgatgcctaaatcaaaggaacttgtttcttcaagctcttctggcagtgatcctgacagtgaggttgacaaaaagttaaagaggaaaaagcaagttgctccagaaaaacctgtaaagaagcaaaagacaggtgaaacttcgagagctctgtcatcttctaaacagagcggcagcagcagagatgataacaagtttcagattgggaaaatgaggtacgttagcgttggagattttaaagggaaagtgctaattgatactagagaatattggatggatcctgaaggcgaaatgaaaccaggaagaaaaggtattgctttaaatccagaacaatggagccagctgaaggaacagatttctgtcattgatgatgcagtaagaaaactgtaaaatccgagtcatacaaacaaaacctgtacttttctagttgtttgaatctgtctttttacattggcttttgttttctaaatgttgttctccaagcaattgtatgtttggattgcagaagaatttgtaagatgaacttttttttaatgtgcattattaaaaatgttgagtggagcaattgtcacctttattaaggaggattgctttgtgcccaccacctagtgtaaaataaaatcgagcaatacagtcttaaatgttgtggccttttttgatcataagagttggtactgtttaaggccaaaagtaatagtttttataaatcttttagtttcaactgagcttttacaataaaaaggatttgtattgcattgagtttataaacttttggtttgtgaaatccatatttgatctgttttcttccaatcaaatgtttatttggaaagtcagtgaaactgtcaaaatgttacctcaataagatatttataattgtatgagaactacaatcaccaaatcgactgtcttcagtattagcagatctagtttgataaacaaatggcttgtgtgaaaaccgagcaggtgtttgtcattacccatagtgttctgtgtagttattgcttagtctgcagaaaataatgacctagatgagatgtctgacttgctttcacttattaaacatgttcaccatgggatgatgtctgtaacgtcagatattgttaaactagactaggatttaataaaaattgtgaaagcttactggcctaacattttattttataatattgagtatgaattatatgtagccagagatgtcaataaggcttactgtcagtaggtaatatggttagtttgtagggaaaagagcgtatgagcacatgcttgtgtatttcggcctttrccccagtagatcagacaatgacattctagtcttgatgttactaagttttagcagacactagcaagtggtttgtatttaaccacacccatgaagcagacagactgaggcacagattttagtggctttgtggcaataaatagggcatggtgtgccttaggaaaagaatgtttataaagggaactataactgaaattaaaggaggcggcagtgaagaggaaataattatcttctatctaaatgatatacatatgatattttgagatttttataactgcagtgcaacacaattctgggtagagtagaaaaaggaatggtttaaagacatataaaagattcttgttgacaatttatttttggtagcaaatctcaaatgattacctgctattaagggctgccatatcagagttttgcactattttgctaccaagtttgattcgtacatctaaaacattttgtagttgattgtcaaggacttaatttgaaaatcatttgccaggccacatagttatcaattttctttctagcagctattctgttgtatttttaaaacattttttagatgactttttgaagtctatttagcagtaaccttaagaggtgcaaattagtaaaataaatctcttgtaatttagccttcatcaaataataggtaccaatgtattaaaaatatgtggtttttttttttttggcagccctttgaaccagagtaagttcagagaaactcccaaaatttgtattttagacacgtcatgcttgattggtaacttccctccttttttggggaacatgtttgtgtcctattaacttaattggatagatttttaagtatttcttatttttggcacacaggatggttagaatacagaactttgatttttggtgtagatacggagagaatgatgggtaaatttcctaggtttatatgaatttagggggtgtacgcattttgaaacgctattaacagatggtgctgaaatctattgcctacatgttttctagctctttagcattatgttaatgaagcctccatataaggagtgtttctctggcacagttggtaagttgactgctaacttcattgaaatgtgttactggatatgcagtatactgaaattattgatcttttttgtgtataggaaaagagaagtgggttaaaagaagcaaattaacttgttctgaaaagaaagtatagattaattttgttttctgtttaaattttatctccttggtaagactttttttccaaggcagaaagcttggcatttttaggcatagatcccttaccttataatgtcaaaatgaatttaattccagtactcaggtttttccctttaacagactctatgtgtatcagggctttctaatgggtttttcctctttgtttttaaaatgtgagcagcttttgaccaatttccagtgctcttagcattttacttaaagaacaaccactaaaaaagaaaaacttcgtaatttgcttgtcttttgctttgctttattaatgtctaagaacttaagaatactcctacctcattagctactcaagatgctgtgacgaccaaatctattctacataatgtgtttagaaacaaagacttgggtgaaaaatgaaataagtatattctgacttggctattgagggtaaaaagaaagaattaagtattaagtgttccttgtaggagatatgttagtagaataccataaaagtttgaaaattttaaaaagtactaatatttaggtatcctgaaattatttgcagttcattttttatggaaattaatccagtgaatcacgcaaaagttttttttttaaatggtgtttttccagatcaactctagggtaaacattcacataatcacaaatatgcaattctgtaattgtgaaatgcctgtatgttttgttttcatacatcttccttggagatgtctgaatataatactccatctatgaatattttaaatgttgaaataaaagtaagaaatgtgaaaaaaaaaaatgaaggctagggaggagagcaaaggatgaatataacgtgaaaatgtatgtatagttagttcaggggagaaaaccaggagagagagagagaaagctcacaccagagctgtcgcttaaagatgactggactagggtgggaagagaaagaataacaagtccctagaaaatttgctaaaagtgaggcctttggggtacagaagagtgggcaggtttgtaacggctgtaagggaaacgtgatcacttcgggttagagggaagggctgtagagccacatggcaagcccaggacacctgtgcatttcctgactttccctgacagcatccagtggcttaggataaaaaatggagacattggatgttggattaccccacaatggacatggacgtttgtcagggtaaggatggtgggagacctaagggacaaggagaaacattatttttttaaaattacagacgtcaaaagagtcacacaatacaaagtttatagagtgaaacatgaaagaatgaccttcatccctgccttaggaggatctctggagcagctttgctcatagtgtctctgactgcagtgacttacggaaaaaactaataattgggaaaatactagtacctaacagttgagactaagtgttgtggttggtgccgttggaactccatggaacatgttcctcatggaagaggtggggaagggggaatgtgggcaggtaacaacccacactcccatgcttctctcccagtgagtgagatctaattcaccctggcagtaggttctcagtgggtttcaggttggttccaaaaggaggtagggcctggtgcagtggctcacgcctgtaatcccagcactttgggaggctgaggcaggaggattgcttgaccccgggagttcgagaccagcctgggcaacatagcgagaccccatctctacaaaaaatacaaaaattagccaggcatggtgatgcatacctgtagtcccagctactagggaggttgaggtggaaggatcacttgagcccaggaggtcaaggctgcagtgagccgagatgatgtcactgtactccagtctgggtgacagagtaagaccttgtctcaaaaataaaaaaataaaaattttaaataaatacataaaaggaggtaggcacgatatgttgtaagtggactgaaagagaggagatggtacagagacagcagggtggagtgtgaccagtggcggttatgccttttgtgcctgtgcctgttgcctggaaggaggagaggttttcgcttgacaggactgtgaaggagggcacggaaatatggggggtcgggggtgaatctaggcttccatcttagtaaggagaggcgggatacgtgtgagaggcggcagcatgctggcagccctgcagcccttgctcgctctcggtgcctcctcggcctcggcgcccattctggccgcgcttgaggagcccttcagcccaccgctgcaccgtgggagcccttctctgggctggcctagtccggagccggctccctcggcttgcggggaggtgtggagtgagaggcactggcgggaaccagggctgcgcgcggcgcttgcgggccagcgcaagttccgggtgggcgtgggctcggcgggccgcacttggagcgggcggccggccccgccggccagggcagtgaggggcttagcacctgggccagcagccgccgtgcttgatttctcaacaggccttagctgcctccccgcggggcagggctcgggacctgcagcccgccatgcctgagcctccsccgcgccgccgccgtgggctcctgcgcggcccaagcctccccgacgagcgccaccccctgttccacggcgcccagtcccgtcgaccgcccaagagctgaggagtgcgggcggatggcacgggagtggcaggcagctccacctgcggccctgcgcgggatccactgggtgaagccagctgggctcctgagtctggtggggacttggagaatatttatgtctagctaagggattgtaaatacaccaatcagcactctgtatctagctcaaggtttgtaaacacaccaatcagcaccctgtgtctagctcagagtttgtaaatacaccaatggacactctgtatctagctaatctagtggggaggtggagaccttttatgtctagctcagggattgtaaccgcaccaatcagcaccctgtcaaaacggacaaatcagctctctgtaaaacagaccaatcggctttctgtaaaatggaccaatcagcagggtgtgggtggggccagataagagcataaaagcgsgctgccttaaaaaaaacggtggcaacacgctgggtttgctttacaacgcctgggaagctttgtygtttgcaataaattttaatwcttgtctgtttcggtctgcactgcctttatgagctgtaacactcacggggtaggtttgcagcttcactcctgaagccagtaagacaacgaacccactgggagaaacaaacaactccagacgcgccgacttaagagctrtaatactcgctgtgacggtctgcagsttcactcctgagccagcgagaccacgaacccaccagaaggaagaaactccgaacacatctgaacatcagaaggaacagactccggacacgccgcctttaagaactgtaacactcaccgcgagggtgggcggtttcattcctgaagtcagtgagaccaagaaccaaccaattccggacacacttggactcgacagactctaaggtgaaagattggtttagttcatgagttggggttttgtgataactgacattgtgaaaaacgggggatttaacatagattttcacagtggctttagacatttcataaatatttcttaaatgcctcctaaatgctaggatttggcaatacaaggctaaacaaaatacaaagccaaatcctactgtaaygggagtatgtaaagtgtttctgttaatggaaaaagtgctgtgtgaggatgggggttaagtgactggactgtttgtgttctgagctttctaggactgatctgattacgctgtaaacactcygccagatactgtgtaggcccagcycttgtgcttgagggggccactgtgaggtggcgaaacagacaagagattattagaatacagaaagttcaggttgggaggaaccactgaacatggtagaagtactgaggtctgtgaaagtaaagatcagcccaatgaacacaaacaaataaggttcttgattcggagcttgctgtagtaagggagttttgtacttagtggacactccgaggcaggcaggggagtgggaagctttacggtggaaaaggggaaggctgcagcagtgctctgattggaggcttctggcctggggaagttggaagcagctgatagaggtaggtgtcttcagtgattggtttgaggagcctatttgtttttctgtggttgattctgagttgcaagagtcctgaccatttggggctgattgctgctgaggttgtggttttcttgcaggacaggcaagccccaaattgggccttagcccatgagggttcctggctttacccaggaaagaattcaagggtgagccagtggtaaggtggaagaaaacaacttcatkaaagaggcagtgtgacagctccgtgacttttcctgcagagtasggctgctccgcaggcagtgtgctgaaagcagctcagggcagttgtgcagtcagatctatayctacttttaattgcacgcagattaaaggacagtttctgaagacatctgtaggaaaagggtagtaacttctgggttgttgggtcattgccatggaaaggggtggtaaatcctgggtgttgcgatggcaatggtaaactgacatggcaaactggtgggcgtgtcttaaggacggctgcttcggcccctccctgttttagctagtcctcaatttggtcggctgtctgaaccccacctctggagtcgaatctcgccttctatctcattttgagttccttggactgcctgcagcagcggttgtttaagccatrgttctgttatatagtgtctggctgttatccattcgtatgttcagcttccaagtggacacctaagtcagactgagggagctggattaggggctctctaacaaatagcaccatcacataacatgtctgtttcttcctctgcattgtaagctccttggstgtggaaccttatcttactcatctttgttttttcccatgtctcctgccacattgtagatgttcagccaatgtttgttgcatttaaagaacagataaagaatcacagctactagggaagctgagatgggaagatccttaatcctaggagtttgagccagcctggacaacataagaccctgtctgtctctcacacacactcaaaaaaaaaaaaaaaaaaaaaagaaacaaacaaaaaaaacggtgggggaggggaacagataaaggagaggccaggaaacacyagaaaaggattcctgaagcagattccacctgagctgtaatggaggcgtggcaggtggctaggcaaggagcaggaagcctattccaggcaggtgaattgcttgggccaaggccggatgtgaagtactgtagcctgttygggggacaataagtgctgctaggactggatcagggtgtgaaagtagtacaagaatgggtggacaggaggctgaaatcccaacaaaggatgtagatgccaaatggcaaggacgtttttattctatgccagaaggcttgatttcctttaaatcaatccattgattcgaagacatttcattggaggaatttaaaatggaaggattataatcaastgtgtgtttttattttttatttttttgagacggagtctcactttgttgcccaggctgcagtgtggtgtggtgatctcggctcgtgggttcaagcgattctccagcctcagcctcccgagtaactgggattacaggcacccacaaccacgctcagctaattttggtatttttagtagagacggggtttcaccatgttagccaggctggtctcaaagtcctgacctcaagtgatccgcctgcatcggtcttyccaagtgctgggattacaggtgtgagccactgcacccagcccagtgtgtgttttagacgaataactctacctgccatatgggaaaggacaggggaagtcaacttcaacatggtttgggaaagaagatgtggcttaaaccaagatggagcagagaggagagattaaaatgaaaggtatttgttttcttggactccacaggacttgatgaatgattttgaaggggtggatataaggagagaaagggcgttatcaatgacacctggattttgtgattacaaaactgagaggctgttaaygctatccacaggagaagcagatttaatggaagagagatttaaagaatgggcacgttaactaactttgcattgtttaggcaccatcgtgtcctatacgcagctcaattcaataaatactcattgagcacccaataaatattcattgagccagtatgtgctrggcactattccagatggttgaggggacattagtgagcaaaacaaaggtgtgtcgtcactgagcttagatttctagtgttgacttaaaaaatatgatttatcaatttagaaagggagaagagcctttatttcttctaaagggttacagcatgcttccagcttagaccacagacgggcactttgaaggaaaaggcgtttgasgtaggagctttatgctgactgggttggctaaacgtacatatttaacagattacaagaggagctacgaatatttatgatggcggacctgacacattgaacaaacatgtatgtaatatatgacccatattcactttgggatagagactcaacatgtgaatgcattacaattacaccctataggtcaaaaggtctttttaggacaggaaggcgccttgagtgtacagtttctgtaaactggccagaccagtccacggtcggcggtcttatcaggagaaagttactgagatcaatctcttgaccagtcaaagctgtagttatggctggtggaacaggggttcaattagtcactgtctggtggagctgcaggtgttttactattgcttatctcaaggccagcgtttagctgctggagaaaaagaagagccctgtggcagttagagcttagttgattcttcaagtgtaggggtgcctgacttcaccattgcctgcatggccttaggtcctgtttataattgggtatcttattgccacagagtctgttccgttagtsttatgatctctgttttaatgttaatgccagccagttgtgtatgaactccaaaaggaagggggtacaatgagggctatctgatctcctgtcccgttatttgaaatgctttttccctggtgctgkaaagaaatagcacttgtaggctgggmgccgtggctcacgcctgtaatcccagtacctggggaggctgaggcgggcggatcacgaggtcaagagattgagaccatcctaaccaacatggtgaaaccctgtctcaactaaaaataaaaaaattagctggccgtggtggtacatgcctgtagttccagctactcgggaggctaaggcaggagactcacttgaacctgggagccagaggttgcagtgarccaagatcgcgccactgcactccagcctcacgacagagtgagactccaytwaaaaaaaaaaaaaaaatgaagaagaaatagcactcgaaggctgggcgcagtggcttgcctgtaatcctagcactttgggaggccgaggakggtggatcatgaggtcaggagttcaagaccagtctggccaacatggtgaaaccctgtctctactaaaaatcgaaaaattacccaggcgtggtggttgggcgcctgtaatcccagctactcgggaggctgaggcaggagaagcacttgaacccagaaggcagaggtggcagtgarccgagactgtgccactgcactccagcctggcaacaagagtgaaattytgtctcaaaaaaaaaaaaaaaaaaaaaaaaaaaaggcgcttgaacattaatttactaagcaggccattttyacttcctgcagaaagggtacactcgccagcagttttgccatgggagtataccaaacaaaggagacagggtcatttataacctsactcgtccaccccactgcttgtgtctagtttccattggctggaacggtgcctcacgttctgtatttgtcccgattggctagcaacttagaagtttttaaaagaggcaaaggtagaggagaacaaaggaaggaggaagtaacttgtggaatggtgacaaaggttgaaacaccttcaaataaggaagaggaacaggctatgacctaatgctttcttggaccactataagcatgccagggcaaatatttaggctaaattgtgagagctaagaacatgaagtacattgatttctttatcatagctagcagatatttaagaatgttagcacaggtctttgaataaagtttgcttctaagagaagttactatttattcctaattaaatggggaggaaagtctttgaagaggaacctctactttactttttataccgtcatggctggaaactaagtttttaagatttttctggggttcccttggccgaggtggggagtgggagggctgtccagtggtagggacttaggatttttagtttacagtagtaggggaaacactctgtaatctaatacataagtaaatgatgtattagaatatggtaaatataggcaagtagacccccactgggattagcagtggtggaaatgtgagagagggcaaacaggtgggtctagatgaggtgtgagcagactcgaggggcacaggagttagtcaagccagtatctgggggatagtgcaggaatagtgaacagctagacaaaaagtcctagggccagagaaagcaaaagcataagagatggaggccagagaggtaatctgggtggaaggctgcagcctctcaggatccctataggtgctttggcttttgttggagagacactgaacagctttgggcagtgaacgtacctgacaggtttcctgtttgtttttgagatgaagtctcgctcttgtcccccaggctggagtgcaatagcgcgatctcagctcactgcaacctctgcctcctgtgttcaagcgattctcctgcctcagcctcccaggtagctgggattataggcgcctgccaccatgcctggctaatttttgtatttttagtagagacgcagtttcagcatgttggccaggctggtcttgaactccagacctcaggtgatccgcccgccttggcctcccaaagtgctgggattacaggcrtgagccaccgcgctcggctagacctgacaggttttaaaaggattactggttgctgtgttaaaacagactgcaggatggcttaggtagccagtaggttttttttttttttggagacgtagtcttgctctgttggcctggctggagtgcagcggtgtcatcttggctcactgcaaactccgcttcccgggttcaagtgattctcctgcctcagcctccggagtagttgggactacaggcgcccaccaccacactcggcttttttgtatttttagtagagacgggtttcaccatgttggccaggatggtctcgatctcttgacctcgtgatccacccgccttggcctcccaaagtgttgcgattacaggcgtgagccaccacgcctggacgggtagccagtagtttctagggctggagagatctaggatgagagaagtttccacattcctgttacaggctctctaaggcttcagctcctttttctaggactaagctggatctcaagtaaacactagagagggggcagctgaagctccaggagtgtgtggggctccctggggctggatggcggtggcgggcaggcgagctgggctgtgctcgggtgtgttacagtaaagacgcccagcttggcgctggcccggccttttcacggttttaggctctacagagagcggctgcagagctcacccggctggcaggagccaccgaggccggacacgtgggcgacttattgaccaagtggggaggaagcagccccgcactgctctcccgactgcggaccaccgttgggctcmtgcgcatcctaagccccaccgcctcacctccagtccccacagcgttcgcgctcccagccggggtaagcggaagaaaacaaaggcccggctccatcagggcaccaatcccgctcgtcggcctctttctcggcctccaatgagcttctagrgtgttatcacgccagtctccttccgckactgattggccggggtcttcctagtgtgagcggccctggccaatcagcgcccgtcagcccaccccacgaggccgcagctagccccgctgscggccgaggccggttgaagtgggcggagcggcgggcggggcgtcgccgtactaggcctgccccctgtccggccagcccctcgaagcacctactscacaggtccagccggccggtgagcgcctggggaccgcagaggtgagagtcgcgcccgggagtccgccgcctgcgccaggatggagttcgtgaaatgcctyggccaccccgaagagttctacaacctggtgcgcttccggatcgggggcaagcggaaggtgatgcccaagatggaccaggtgggccgagcctccctgcttgcccggggcggggaaggagctcgctgggccggcctcagggcctgagcggccgggcccggatctggggcaaggggcgcggcgagcagggccgacgcctgggtgttcccgtccccctttcctcgagccttccccctgtagggcccgggtggacgyggccgtcctggctgacctgtccctgcccccgcaagccgccctgggcatgagcgacttttgcgtggttcccggtggttgcgctccccgtttcgtcccctccgtgagcatcggcgcttaccggtattttaacccgagggttacacatctgasgcaatgtgggtgggttacgcgggagaggacgagtgagttttttggtaagcggaatgaactatgcagataacatcacatgaaggccgtttctggaatgaagtctgactcctccagtttcaccacctcttccggagctctccccgccttgctgycttccatcgcttcatcctcggtgcttcctgagttttaaaatcgcctatctacgcttccaagttccaatgagttatctaacgtctatggattagctaggtggttggtggaaggtcagaacttggttttacttagatttttatctgcctcatgcctgtactatttgtttaatgaatgcataggaggtgtttttattccaacaagaaaattattcgtacgcgattattgaatgaatagacaaattcagccaagttcttctggtctggaccagcctggctgatttctgtaacttttttgggccaacaggacagtagcaaatgtgactcaggccgaggcttgataggtgcctgaacatcggagtctttctttcagtgtccatgtgcttcagtaaacacactagaaaataaatttctggtttttgtccccagtagactacaccctcatttggtgttatttttcacgtgctatctttaatacaggtacatccttcagtctatttgtagaacattcagttttcttcatcttttctttgccggtgctacattatttgaattattttgctacagaataacttctattatttgatatggcagatgtcactttttatatttagatatagcattcatttatttaacaaatatttgacgaccagttgtatatcagatagtgttctaggtgctggaggtacaacagtgaacaagctaggtgaagaccttgattttataaaacttactttttagtggaagagagacaatttaaraaagcgaatgtacagtttttcacgtggagaaaagcactgcagaggaagatactagcagggcaagggatctgagtgcagtcagacctcatttgggtccagacttcattcctctatgtctctttcctttctacagaaagactgttagagaaaatggtagcattggtttcctgttgggagggaaagtgggtggtcatggtaagtgggtagagaaagacttcacagtatactgtttttgtacattttgartttttttaaaagcgagacttgagctattctagctctgataatatggtgcagtatttgttatgttagttgtagtctttctgggcagtttttacatccccatgagccgttaaaaaaatacctgaacctttaattaggggaaataaattggaaaaatacatttcccttcacttaacattatcttagtttctcttttttttttttttttttwtwgagatggagtcttgctctgttacccaggctggagtgcagtggtggcgggacctcagctagatgcagcctccgcctsctgggttcaagcaattctcctgcctcagcctgctgagtagctgggattrcaggcacctgccactacgcccggctgattttttggtatttttagtagagacggggtttcaccatgttggygaggctggttttgaactcttgacctcaagtgatctgctcgccttggtctcycaaagtgytaggattacaggcgtgagccactgcacccggcctttttttttttttttttgaggggggggtctcactccatcgtccaggctagaatgctgtggcctgaacatgactcactccagttttgacttccttggctgaagccatcctcccacctcggcttcctgatccygagtagctgggactccaggcacgtgtcaccaatgcatggctaatttttaaatttttttgtagacacaatgtctcgctgcattgcccaggctggtcttgaactcctgagctcaagcgattttcccacctcagccttcaaagtgctgggattacaggtgtgagccactgcacccaaccagtttctctctgcaaactagggaaaaaatttacgcttagcagataytgagggctgattatttctatcacagaagcatttggctatagaatttcagggtttagtaaacttgatttacactgaatttttaggtgcatatcagtaaatctacgggcatatgccgcctgcaagttgtgtggcatcacccaaaagccgagagtaatggaaagagcaggctgttagtaatcaggcagatctggctcctgtccaatctaaatcctgttatttagactaatatcttaagtctgttattaagtccgatttctgacgctattaagttaggtgaacaaccttggtaacttaacctctgaacyacagttacttcatctgtaaaatagggatgtatgtatggtaacgattttttaaccacaacttcccaactctaagatggtctgaaaagaattttttswgwgtttggctcagaatcacttggcagcaaaacctgacttgaagttgaggcttcattcatcccacttagtatattcaaatgttttgctaaagaaataattatgaggtgctacttcacactgactagggttgtatatgcattttattgcctattttctaaaacactaaaaatgctaaattctgccccaggtcttgccacagatgtttcagtggactatgggcctktgagaccttaaagggttgattgagtaaggatcacaggtgatgtccgcattgtgcttggcatggagttaagtgcttgataaatggtggttatcaatctgattatgtaaatttatgtaaattcagttctcaagtttgtggtttttttcccctcctggagaaatctattctattttaaagtgaggaaggctccgtggagggctggtagctggtagctgttcacttgtggaactttcagcctgaggctggagccccttcctgggagtctggtcttgtcgtcttcctgaccacccccacacccttcctctaaattccctccatccctgtttttctcccgcttgcgagcttttgggagtgtgctgaatctcagactgcaatagataaacccaagagggacaggcaccagtagcctgagcttgctttctcccctggctcatgggaatcaagcagtagaaatttttagtgagtgttgttttccatagtatgcttactagttgtgtcttcctgttttgttcttggtgatttgaagaaacctgtttacaaggtaagggactgaaacaaataggtgacaggaaaaagagcagcaggggtacgagctggaggagtaagtggcttggcttgctctctttcagaatggagggctgtatggaaaggaggggtagtgttcttgaagagtgttggggtttaaatctagggggaccgtgtcttggcattgattgaaactcctggcttaacatcaccccgaaactgttagttggactgaacatgacatttggcagtgcagttaaaaacacttcctgctgtagcctggtaatggtcaggctatgtgaagagctgctctggagctcagtccagagcgggtattctgtttctttcactctgaaatcctgcctctcgatattttgagaaggaaggagttggtgaattgttttaaaatcctcgatgaatgtcttcatttattcatgacaccacttctgaatatatttatgtgccagacgctgaagtttactaatattatggtgcccagtaaatacttgtttttactaatattttttatggcaataaaatgactttttcaggattatgtgatttaaaagattgacccttttggcaaaatacgtattcatgataggaaatatatacaawatagttcacttaaacctcccaccagagcccagggttcactgttaccattctgaagtgactggaatttcctagaagtggatatgccatatttttttaaccactcctattggatatttgttttttatttttttgagatggggtcccactctgcagtgtacaatatcatagttcactgtaacgtgtatctcttgggctcaagcgatcctcccacctcagcctcctgagtagctagtcttcagtagctagactataggtgggcgccaccacagctggctttttaaaaaattttttatgaacacgaggtctcactatgttgcccaggctgccctcaaaytcctgggctcaagtgattctcccaccttggccttccgaagtgcagggattataggcgtgcgccactgcacccggccctgttggataaatgattccagtctctcccaaaaagaactgttgtragactgtggggtgaggggagggaagggacaaataggaacccgccgtattttccactccctgtgggcctaaaactgctctaaaaaatagtccatgaaaaaatacatagtacaaacagcaactctttctgatatgcttgcatttaaaatcaggctttttctcccttttggaaaaacacagtccttgtttgctttagggaagartaaaggtcagtgcgctgcattgcattaatttcgaagggaaagatgagaagacatcttgaaaggaatggctggctttctagagaatagtagaggcttaataggtgtcatagaaaaaccagggttggacagtggtagtaaaacggcaaaacagattttattcagaaaaactactgcagtaagaggagagagacctcggtacagaactgctccactgcgaatacaaagaaaagtaggaattgatggcgggggagccggatgtcagtggatggaaaattattacgaggaaacacaggggtgtgcrttcttgctgaaggcaggccagagttatcagacatcacctgagggatggagggggatgtggaacctaatcggctgtctagggtgatcagatactgaagttgggggattctggtcaaatcaatttagcaggattcttggtaaaaytgggcgatgcaaagacagatgcgttgagtacaaagtccaggcyttattgggaagaggatttcagcggagcccgagtagagtttggtctagggagactctgtcactgggaggacgagcgagccgctcggaagtgcgctgggttcycttagcggccagtgggttctggtgagaagggcaacagcgggaggaggcgccggtgcggagcgggaggccgggggcggggctgcggggctgcggggcgggcccgttgtgggtcggcccagcgcgtattcgagtagagggcgagcccgtcccgccyctcgtcgggcgcttcccagatctgcttgagtctatggaggaaaaactccgcggggtccgcgattcccatggccgcagccgcctgcggcaccaaggccatggccctcttcaagcgcaccttggtgctgagtcccgccgcggcgcccaggggcccgggcgcaggcascgccccgcggggctgctgcttgcctcctgccgcctggccctgcaaggactggcctcggggagagggcggcaggctgtggagccgcctgccccagtcccactcccactcccactcccactcccactcccactcctgctcctcgacgtctcccaccgccgtgtgtgttgtctgcccgcaggactcgctcagcagcagcctgaaaacttgctacargtatctcaatcagaccagtcgcagtttcgcagctgttatccaggcgctggatggggaaatgcggtgagtgatggaggcagcgcctctggcttggaggaaagcttgtccgggacntttgagtgtgttggaagctaccttttgatatagcgctcagcgttgcagcctcgttgctgtggcttatccagaacatagcccggccctacgtgtttactttagaaagcccttccaggctctttgccatctagtagagtccctgcgggcccagcctttcagagaagrgggsggagggggtgatgtttattaactttttttagtcttggcagctgaacctgcctgtgagcaggtcgtgtatttctcggcttcccttatccaactttgcatttctatttctagcatattgggttgattcttttgaagctgcctctgtgcasattacacccatgaacttagaccagttgcctttatgtatgatcgtatttatactgagaagttactgtgttttttgactttcttttctatttgctacatattagttcggtctaaacgtttggtcttctggtctccatagttctacattggttaaatgcaactcacttctgggagtagtggtgacattcaactagtaggctttttaataaactacagaagttcattactctcatgtaaggaaggaaaactaatgtaactttcgttaagtatgaaaagcgttggatatccttatagttctttagagttaagggtgagatgggtttagaaagtggccaggcacaagttattttaaaataaaaaatctttggctgtttgttccaatatattaatagttttcccttttttacagcaaygcagtgtgcatattttatctggttctccgagctctggacacactggaagatgacatgaccatcagtgtggaaaagaaggtcccgctgttacacaactttcactctttcytttmccaaccagactggcggttcatggagagcaaggagaaggatcgccaggtgctggaggacttcccaacggtgagtggggttacgcatcttgtctacggactgttgtgttcataattgctaacgtggttgtccggtagcctccatacatgtggagaaaggttaaataagcattctgagggcagcataatgtgagggttaaaaactcyggtagccaagactctgaagccaggctgcctgggttggaatctcaaatctcccacttactaaactgttggttacttacaaagactctctgtgcctcagtttcttcatctgtaaaataggggtaataataacacctacctcatggtattctgaggattcaaagaattaacgtaggtaatgctcttagaatgttagctactgctgttattatcagtattggaagtccagtgtttcttcctgtgggaagacgcagtcaaattttagtgttgtgaaagattctcaggctagctcacaaaagcctgccgactgtatgatgcagcctacctgtaacactgctggcctcttgactacccggagcctggtagcatgggactgctgctcacgatgggcagcagcctggyatgggggcggtgtctgttggcagctagggcgagcctctgccacttcacctgtgatcctgggcaagttccttatctgctttgtgtctccgtctcctcgtttgtaaagttagagctgagaggattaatttcgcacatataaagtacttagtgcctggtacagggtaagtattctgtaagtattagctatttggtctattttgttggagtaaagtgggttatagttaaaatcctaagatttttaaagtccctcaagttcaygtggacatctrcctaggtcctactatcctagaattcgcatgtcttatcacayaaataactgattcttccatatcttataaataaaggtttgatttagcaaagtcacatgttgtgtaatagctcgaagaagccctttttgtccacagttgccagagcttttggagaacagtccttatgttattgaaacaaacctaatctgtagctgagttgggagggagctaagtggacagagagtcctccacccaaacaaaagaatctttgattyttgggcataatgggagcaatatttaaaaaaaaaaaaaaaaaaaaaaaaaggaatgtttggggaagactcttgcggtgcaaaggctgtttcagattgctgagatcagaccttaagtaccaaagcccaaatatagtacaacataatacaaatgagaagaaaatagctgaagaataattcgagtttatacagtacaattcaagagaagaaagaaaatttatgacgactagctgggtgagaattagaactgtaaccctgggaaggtcctggtgatttgactctcacaggacacctgatgaccagaggatgggtttcctttgatgggaaatctgtggcgattcattgatgggcytctgaattctgctgaagcagaggaagtagtaataccccatttataatggaagtgcattctcacttaaaaacaactaatattattctagctggacctagcctctagaaacagccaaattacatttgacttgagtggattcataataattaaaaaatttctggggcatgggataaatgtgttaggtattgctaagtcaaggcagccctatcccctcagcagaagtgagggaatatgaaagtgtgtgaatgctaacataattttggggaatatcgccgtcagatttccagatgatattccaacatgtttgtgaaacttcagtgtcttcctgtgttcatacagtgttccagtggaaaaataatgcttagttctggaaggtttcagatgtgaacactgaactcatcgttttcttttttgggtagtagagttagagattccatcctcttgaaagcacagttgccccgggaagagtaaaagggagcagaaggcgtaagccaggcacggctgttttcactgttgttcaccttttgtatccttacgaatatgaagatgtactaagttgtgtgttttgcgtgcatatataattttaagctacttgagttgtaggtccctccagtctgtgattcagtttgagatgggactgtatgggaattaacagtgccttgtcttcttaagsagtgatttgtgtatgtgctgatatagctcagtatgtctttgaaaccagttgtctggggctaggcctgcaatcagcttttggctaagaggtcccaggatggaacaagtagtgtgaaagaggactgataccttggcctcacacacagtactgctcttagactggggcaagtgaaactcctcacttcagagtgccccattctaggccccctcactcccaaaggggtgagggatcactggggccatgggaatgtgcttgttcagctctcgtgggctctccttctgtaccacgttctggacatctggagttccttgccccaaatccctgagcccacgtctgcgtccgcacagtctatttcctaaggtcagtccatctcctccaggtgggaacgtgccaccattgactgtgcccttgggcctgagtgatggccaagggctgtgttggggagtgttgtggatggatcctggcaccgagggctgggatatcctctcaaatgaatgtgaggtgcctcccagtgctggagagagcgggattcaggaagcagtggaagggaagagcctgggatatggggatcagctgtctgtgccctgctgcattctggaataaaactctgagggactaagaattctaaattcaaacctgaatcaaccaggttgttacaaagataagtttgtcagtgcaggaggatacaatatattttacttaagttactagctcgattgatcatttttaaatttttagctacatatagtatgtgggcctccatttgtcctcttatcccaggccttgcagaatttaggaataagcctcaatacagtgttctaacccagtgacttccgcctcratgtacagtagattgaacctgatcctttatactttagtgatcattagttgataccagttcaagtcaggctttctagaaatctcattgtatgttaggggttcgattagagtacagtcatgcatcacttaatgaatggccacaggatacattctgagaaacgcattgatagatgatttcatcattctgtgaacatcatagagtgtacttacacataccaagatggcatagctactacagacgtaggctctgtggtacaggccattgctccaaggctgcacatctctacaggatggtactgtactgaatactgtaggcaattggagcacagtggtaagtatttgtgtatttaaacatagaaaaggtatagtaaaaacagggtgttacagtcttaagggcccaccattgtatttccagtctccgttgactgaaacatcattatacagtacatgagcacgtatctttctcacctggtactagtggaaagctagaaggcttagaagtctacctgtaaacatagcttaagtaataatacagccttatttttaaatgataatagcaataatagtgttcacttattgagcattttactatgagttacttactaaatatatttcatcgttaatttactctttgtgttatttgatctataacatcgtttaacagggaaattacctagtacataatgtactgttatctacattttatctagatgaggaaactgaggcacagagaaattaagtactttgcctaggattacccrtgaagttaagtgacagaatcaatgaatctggaaggtctggcttcagatctcttgtgctgagtcactcgcatactttactacctctaaggtttctaatcagaggaatttgtatctgtattccctgctactcttaccctctatgtgggatttggcctttctccattatccctgtgaactcgctctgggaccttccttcttgtacttggaaccatcagaaagtgatctgagaacatagaaatctactgtgttgtgaaacagaattacctggaagcggaaaaagccctcctggctcaattcacatgtcacggcttatggtcgtayccggggaacatatgaaactgggcactgagtgcggagtcaggaaagccctgtccatcctctgggtttctggggaaaacgtggaccccttcattgtcactttctcctgtatatttttgtttttacttttagaactgtacaattacgtaataaataataaaaagtcgttggaaggataggtgaagttcagaagtgaaagtgttttggaggagtctaagctccttcccaccctcattgacctttcctctctaataaatagaactggtctaaccaaggatctgtggaatgagcagagtccaacggagattcagggattctaataacctcttgtagaatcactggtttgtttcagccacaagaaggaattaccttttgacattggcttgaacagctgttgtgcaaagaaaaactttttggaaagttctggaagtaccagattgattttataggtttttttttttttttttggagggacatgggggtattgacagttgatgttaatcagaaatcctaaattatgtgtattcctggtatgttgcaatcagccggccacctggttttcctctgggctcttaattttaggtgtattccgaggaagtttttctaacttttctgtaaacacagaccaggtatattgcatactttcaatgtttaaccaaatctcttcactgtttgcagtattatctgtaggctctcatgttttaagacttcccatggtgtttttgtattgtattttgctaacctataaacaattctttgaacttaaaacaagatatttgggcagtaacaataaattttaaaaacatcaattcaacttttttacattagggcttggactatggaaaaagtattgggcagcatgcctcatactgagttgtttaatgaatttaaaagtatagccttaatagtgagagaaactctatagcttcataatataaattgggtaactaatgagataaaatggttggcagatctgctcactagaatytaagctcttcaagggtctgagtttttttttttctttttcttttattatactttaagttctagggtacatgtgcacaacgtgcaggtttgttacataggtatacatgtgccatgttggtttgctacacccatcarctcgtcatttacattaggtatttctcgtaatgctatccctcccttggccccccaccccacaacaggccccggtatgtgatgttcccctccytgtgtccatgtgttctcattgttcaactcccacttaggagtgagaacatgtagtgtttggttttctgtcgttgtgatactttgctcagaatgatgatttccagcttcatccatgtccctgcaaaggacatgaactcatcctttttttatggctgtgtagtattccatggtgtatatgtgccacattttctttattcagtctattattgatggacatttgggttggttccaggtctttgctattgtgaatagtgccacagtaaacatacatgtgcttgtgtcttcatagttggacgagttataatcctttgggtatatgcccagtaatgggattgctgggtcaaatggtatttctagttctagatccttggggaatcaccatactgtcttccacaatggttgaactaatttacactcccaccaacagtgtaaatttagtcctgtttctccacatcctctccagcatctgttgtttcctgactttttaaatgatcgccattgtaactggcttgagatggtatctcattgtggttttgatttgcatttctctgatgaccagtggtgatgagcatttcttcatatgtctgttggctgcataaatgtcttcctttgagaagtgtctgttcatatcctttgcccacttattgatggggttgttgattttcttgtaaattttttttaagttctttgtagattctggatactaccctttgttggatggataaattacaaaaattttctcctattctgtaggttgccttttactctgatgatagtttcttttgctgtgcagaagctctttagttgaattagatcccatttgtctagtttggcttttgttgccattgcttttggtgttttagtcatgaagtctttgcccatgcctatgtcctgaatggtattgactgcatttycttctagggtttttacggttttaggccttatatttaagccttcagtccatcttgagttaatttttgtataagatgtaaggaagggatccagtttcagctttctacatatggcaagccaggtttcccagcagcatttattaaatagggaatcctttctccattgcttgtttttgtcaggtttgtcaaagatcagatggctgtagatgtgtagtgttatttctgaggcctctgttccgttccattggtgtacatatctgttttggtaccagtaccatgctgttttggttactgtagccttgtagtatagtttgaagtcaggtagcgtgatgcctccagctttgttcttttggcttaggattgtcttggctatgcaggctcttttttgcttccatgtgaaatttaaagtagttttttccaattctgtgaagaaagtcattggtagcttgatggggatagcattgaatctgtaaattaccttgggcagtatagccattttcacsatactgattcttcctatccatgagcatggaatgttcttccatttgtttatggcctcttttatttcattgagcagtggtttgtagttctctttgaagaggtccttcatatcccttgtaagttggattcctaggtgttgtattctctttgtagctattgtgaatgggagttcactcatgatttggctccttgtttgtctgttattggtgtataggaatgcttgagattttttgcacattgattttgtatcctgagactttgctgaagttgcttakcagcttaaggagatttagggctgagacgatggggttttctaaatatacaatcatgtcatttgcaaacaggcaattttacttcctcttttcctaattgaataccctttatttctttctcttgcctgattatcctggccagaactaccaatactgtgttgaataggagtggtgagaggacggcatccttgtcttgtgcaggttttcaaagggaatgcttccagtttttgcccattcagtatgatattggctttgggtttgtcataaatagctccttattattttgagatgcgttccatcaatatctagtttactgagagtttttagcatgaaagactgttgaattttgtcaaaggcctttcgtgcatctattgagataatcatgtggtttttgtcataggttctgtttatgtgatggatgatgtttattgatttgtgtatgttgaacagccttgcatcccagggatgaagccgacttgatcgtggtggataagctttttgatgtgctgctggattcaatttgccattattttatagaggattttcgcatcaacgttcatcagggatattggcctaaaattctctttttttattgtttgtctgccaggctttggtatcaggatgatgctggcctcataaaatgagttagggaggattccctctttttctattggaatagtttcagaaggaatggtaccagctcctctttgtacctctggtagaattcggctgtgaatctgtctgttcctggactttctttggttggtaggctattaattattgcctcaatttcagagcctgctattggtcatttcagaggttcaacttcttcctggtttagtcttgggagagtgtatgtgtcgaggaatgtatccatttcttctggattttctagcttatttgcatagaggtgttgatagtattctccagtggtagtttgtatttctgtgggattggtggtgatatcccctttatcattttttattacgtctttttgattcttctgtcttttcttcttgctagcggtctatcaattttgttgatcttttcaaaaaaccagctcctggattcattaatttttttttttgaagggttttttgtgtgtctrtctctttcagttctgctctgatcttagttatttcttgccttttactagcttttcaatttgtttgctcttgcttttctagttcttttaattgtgatgttaaggtgttgtttttagatctttcctgctttctcttgtgagcatttagtgctataaatttccctctacacwctgctttaaatgtgtcccagagattctggtatgttgtgtctttgttctcattggtttcaaagaacatctttatttctgctttcatttcgttatgtacccagtagtcattcaggagcaggttgttcagtttccatgtagatgtgtggttttgagtgagtttattaatcctgagttctaatttgatttcactgtggtctgagagaaagtttgttgtaatttctgttcttttacatttgctgagcagtgtttttcttccaattctgtggtcaattttagaataagtgcgatgtggtgctgagaagaatgtatattctgttgatttggggtggagagttctgtagatgtctgttaggtctgcttggtccagagctgagttcaagtcctggatatccttgttaaccttttgtcttgttgatctatctaatattgacagtgggatgttagactcgcacacaataataatgagagactttaagtctttttctaggtctctaaggacttgctttatgaatctgggtgctcctgtattgggtacatatatgtttaagatagttagctcttcttgttgaattgatccctttaccattatgtagtggccttctttgtctcttttgatcttagttggtttaaagtctgttttattagagactaggattgcattccctgcttttttttttcgcttggtagatcttcctccagctgtttattttgagcctatgtgcatctctgcacgtgagacgggtctcctgaatacagcacagtgacgggccttgactgtttatccaatttgccagtctgcgtcttttaactggggcatttagcccacttatatttaaggttaatattgttatgtttgaatttgatctgtcattatgatgtttgctggwtattttgcccattaattgatgcagtttcttcctagcctcgatggtctttacaatttggcatgtttttgcagtggctggtaccagttgttcctttccatttttactgcttccttcaggagctcttttagggcaggcctggtggtgacaaaatctctgagcatttgcttgtctgtraaggattttatttctccttcacttgtgaaacttagtttggctggttatgagattctgggttgaaaattctttaagaatgctgaatattggcccccactctcttctggcttgtagggtttctgctgagagatctgctgttagtctgatgggcttccctttgtgggtaacccgacctttctctctggcagcccttaacattttttccttcatttcaacgttggtgaatctgacaattacgtatcttgggattgcgcttctcgaggaatatctttgtggtgttctctgtatttcctgaatttgaatgttgacctgccttgctaggttggggaagttctcctggataatatactgaagagtgttttgtaacttggttccattctgtctatcactttcaggtacaacaatcatagcattggtcttttcacatagtcgcatatttattgaagcctttgttcatttcttttcattcttttttctctaatcttgtcttcttgctttatttcattaatttgatcttcgatcactgatatcctttcttctgcttgatcgaatcggctattgaagcttgtttatgctttgtgaaattcttgtactttggttttcagctccatcaggtcatttaagctcttctctacactggttattctagttagccatwtgtccaaccttttctcaaggttttaagtttccttgcgatsggtcagaacgtgctsctttagcttggagaagtttgttattaccaaccttctgaagcctacttctgtcaactcgttaaactcattgtccatccagttttgttcctttgctggtgaggagttacgttcctttggaggagaagaggcgttctgtttttggaattttcagcytttctgctgtggtktctccccatctttgtggttttatctacctttggtctttgattttggtgacgyacagatgggttttggtgtgggtgtcctttttgttgatattgatcctattcctttgtttgttagttttccttctaacagaggcccgtcagctgcaggtctgttggagttgctggaggtccactctagaccctgtttacctgggtatcaccagtggaggctgcagaacagcaaatatcgcggcctgatccttcctctggaagcttcgtccaagaaggacacccacctatatgaggtgtctgtcggcccctactgggaggtgtctcctcccagtcaggctacatggggctcagggacccacttgaggaggcagtctgtccgttactggagttcaaatgccgagctgggagaaccactgctctcttcagagctgtcaggcagggmtgtttaaatctgcagaagccgtctgctgccttttgtttagatatgccctgcccccagagatgcaatctagagaggcagtaggccttgctgagctgcggtgggctccacccagttcaagcttccttgctgctttgtttacactgtgagcatagaagtgcgtactgaagcctcagcaatggcggggaggcgcttcccctcaccaagctccagcatcccagcttgatctcagactgcttggctagcagcaagcaaggttccatgggcatgggaccccccgagccaggcactggaggcaatcacctgctctgccagttgcgaagactgggaaaagcacagtatttgggcagagtatactgttcctccaggtacagtcactcacgcctttccttggctaggaaagggaaatcccctgaccccttgcacttcctggatgaggtgacgtcctgccctgctttggctcaccctccatgggctgcacccactgtccaaccagtgccartgagatgaaccaggtacctcagttggaaatgcagaaatcacccatcttctgcatcgatcttgctgggagctgtagaccagagctgttcctactgggrcatcttggaagcaactctgggtctgagtttctgtttgttgccctgatgtatatccccagtgcctagaatgatacttgttacataggaagtgcttgatccatgtttgcacaaatgaatctttctcataatgaggtttctctaaacaagctgttctcccaaaaacttamacccagctttatgttgaagcatctcattatacattggaaagatgaaatgtgtagtgagactttgaatcttcttttgaatctagaaacattagcatttttagaccattctattttaatatttatgaaatttatgaaataataagaaacatgaggccgggctcagtggcttatgcctgtaatcccagcagtttgggaggccagggctagtggatcatgaggtcaggaatttgagaccagcttggccaacatggtgaaaccccacttctactaaaaatataaaaattagctgggcgtggtggtgcatgcctgtaatgccagctcctggagaggctgaggcaggagaatcatttgaacctgggaggcggagtttgcagtgagctgagatcgtgccattgcactccagcctgggcaacattgcgagactccatctcaaaaacaaaaacaaaaacaaaaaaaatgtgtgacctaaattaggcttatagatgaaccattgcagtcatgattaattccgccattgtttgccttgtgatctttggtgccatgtctgtacatatttcatgatttctgtgtttttacggtttccatttcagatctcccttgagtttagaaatctggctgagaaataccaaacagtgattgccgacatttgccggagaatgggcattgggatggcagagtttttggataagcatgtgacctctgaacaggagtgggacaaggttagtctcataaaacagtgtctgtgtgtgatgtattagacagagctggcagtcctcatagtgaagctcagaacaagaaaagttrtccagtattttcagcccctctggttttacaattcatctgtttaggttgaatgtctcatcataaacagtttattccagagttaattccaaaccagcagctatgtaggatatcagccaggctaggagtagggtactggagagaagtgcttatctagacaaagggatgtaattgaccatgaagattaaaactacacatcaaaacataaggtagggttaggagtcttgcctatttttcataggaatggtgtttgtgagacttactcatcacttctgtggaagtaaagacattttatttatttattttaaagccartcagatttagcaggcagagacatttcagacatctaaagtgttgatgtatttcatacctttaactgtgcttaaattaggatctccgaaaagatgctgctacatggtcactacgttagtgtaggtccaaggtcttgggcctcttaatttttcaaacctcaaaacttgacagcagttatctttggaactgctgatttgtgcttcctaagttaacagcatacaatgaytgctagaaatcaatttctgcatttaaggtgaagttagccgggtactatggtttacctgtaatctcagcactttgggaggctgaggtgggaggatcatttgagcccaggagttagacacaagcctaagcaacatagcgagaccccgtctttcaaaaaattaaaaaatgagcagggaattggtggcatgtgcctgtggtcccagctactctggaggctgaggtgtgggaggattgcttgagcccaagagttgaaggttgcagtgagccatgattgtgccactgcactccaacgtgggtgacagagcaagacaccatctgaaagaaaataaagttgaagttaaaacttctggccaagaaccagcactggttatgatagtaactcattttctgttgtgcagatttattcaggaaacttaattttaggttgttgaatagaagttttgatcagataaaattgaattaaaaaaaattttttttgagacagggtcttgctgttatccaggctggtgtgtagtggtgtgatcacggytccccgcagcctcaacctcctgggctcaggtgatcctcccacctcagcctaccgagtagctgtaactacagtgcatgacaccataccaggctcatttttgtacattttttgtagagagagggttttgccatgttgcccaggctagtctcaaactcctggcatcaaacagtcctcccactctggcctctcaaatgttgggattacaggcatgaccagccaattatttcaaggagttattttttttcttctactttgggggaagatgaattatataagtctccattttaggagtatttctaccaaaagaactattatcttcaaatatatttttggatagtactatagatatactaatttttttttaaatttctagtaattcttttgaagattttgtatagctgtccaaagccaatttctgtctacctaatttcagcaagatttcactcttttcatgttacttttgtcccagaacaaatttcaagtgctttctcttcacctgtgcattcttccccctgattagtctctggctttgtattactttcagtcagagacgactttttttttttgagacagggtctcactctgtcacccagactggaatgcagtggcacagacaaggcagccttgaccttctgggctcaagcaatcttccttgccctcagcctcctgagtaactgggaccacaggcacgttgccaccatgcctggctartttattttaatttttattatttttgagacagggtattgctctgtcacccaggctggagtgtagtggcatgatcaaggctcactgcagccttcacctcctgtgctcaagcagtcctctcacctcagcctccccattagctggractataggtccacaccactacaccaggctaatttttgtaattttttggtagagacagggtttcatcgtgttgcctaggctggtcttgagctcctgggctcaagcgattcacctgccttagcctcccaggtgtgagccactacactcagccttttaaaattttttacagagatgaggtcttgctttgttggccaggctggtctaaaactcttgggctcaagcagtcccctctccacagcctcccaaaattccgggattacaggcgtgaacttcggtcatttcctaacttttacccttcctaatgacactccagagcttaccttctttacttttgcttcttaagttaactaatagacaattattgtatgtggatattgcattaagttgtcttaggatacccttttcagaggaggacagcttttgacaaattgctgtcgcggaaaaaaaaagtatttggcaattaagagttgcatttactgaaatctctgttgagagaggggaagttacgttgtctctaaaagaaaaactaaaaagaaaaggggaagttttagcaaagttgttaaagcctgacacttaagtcatactacctagttttgaactcttagcccctgccacagacacggcagccccttgaaccttcctgggttcaagcgagcctcctacttcagccccctgagtaactgggaccactggcctgtgtcactgtgcctggctaattttttttttttcctcacatgggcaatgttgggcaagttaaatcgacttctttgtgcctcagtttcctcatctgaaatggagatcatactgctatgtacctgatacaatgtttgtgaggattgaatgtgcagagttctttttttctgttgttgttgttttgagacggagtctcactctgtcgcccaggctggagtgcagtggcgcgatctcggctccctgcaagctccacctcctgggttcacgccattctcctgccttagccttctgagtagctgggactacaggcacccgccaccaggccagctaatttttttgtatttttagtagagacggggtttcaccgtcttagccaggatggtcttgatctcctgatctcgtgatccgcccgtctcagcttcccaaagtgctgggattacaggcatgagccatcgtgcccggctgaatgtgcagagttcttaaaacmgtgtcaagaacataaaatagttatttgttctttcatataatgatgattttgagggcctgcggatcttgacatgttatcagattggtcaaaaaaagattaaaccatagttggtattgtcctagttcctgttaccagaatattccatctttcatcgttgccttctctcatagttttatgtatcaaaaagtttattgtaaagctaggscgggcacggtgtcttgggctggtaatcccagcactttgggaggccaaggctggcagatcagttgaggtcaggagttcgagaccagcgtggccaacatggtgaaaccccgtctctactaaaaataaaaaattagctggatgtggtggtgggtgctttaattccagctactcaggaagctgaggcaggagaatcacttgaacccaagaggcagaggttgcagtgagttgagattgtgccastgcactccagcccaggggacaaagtgagacttgatctcaaaaaaaaaaaaaaaaaaaagttattgtaaagctagacacggtggtatttgcctacaatcccagctgttcgggaagctgaggcagaaagattgcttgggtccagtagtttgagtctaacgtgggcaaatatatgagactccatctcaaaaaaaaaaataaaaaataaaaataaaaaaatgtttactagtttttttcagtagccttttattatagtagcagtacatgtgtattgtagaaatttggaaaatacaagtgaaaaataaaaacatcaaattcccgtcagccagagactgctrtgaaatgttttgagcacatccttcttgaatgttttttaaatcctggtatgtatatttgtattttaaaatcaaaatgcattcttacccattctcttttgaacctgcttttttgtagctaatgatctctagtgtgtccatttcagtaaaaatkscattattaaagtgctttaaaaatcgtctcttacagtactgccactatgttgctgggctggtcggaattggcctttcccgtcttttctcagcctcagagtttgaagaccccttagttggtgaagatacagaacgtgccaactctatgggcctgtttytgcagaaaacaaacatcatccgtgactatctggaagaccagcaaggaggaagagagttctggcctcaagaggtaacagattcagggtattttgggggaaaataactttagacattctctgaaaaatcctttaactcttgtggttgcgggtgacagaaaaacaagycaggcctcccccaggcagcataaggggatgtggaaaataggataghttgacatgagtttgcttcaggtagactggctgactcccaggattcacaccacgtaatcagtatattcaagccttgctgtccttgatttctttcagacggtctttctccaagtggtggatatggtaacaacccaygtgcactagcttaacaaaaagttcttaggaatggctttgttcggcctggcgcagtggctcatgcctgtaatcmcaacagtttgagaggccaaggtgggcggatcacctgaggccaggagttcgagaccagcctggccaacatmgtgaaaccccgtgtttactaaaaaatacaaaaattagccgggcgtggtggcaagggcttgtaatcccagctacctgggaggctgaggcaggagaatcgcttgaacccaggaagcagagattgcggtgagctcagattgtgccactgcactccagcctgggcgacagagtgagactccctctcaaaagaagaggaagggcttggttcttctgctcagccctgaatcagttactgttgctacacagctgagttctctggcctcrcctggattacgtctacacagtacacacagaatggatttcccccaaagaaagaattctgcrgcaggaaggggaaagggatggcaggtagacaaaaactccaggtgtctgtaataagggacagggtcgatctttaattaaaacatggacagggaacagaaagcttttgatactgattttgttcagaaggaaagtagaaaattttatgactgttccctgaatttattccagcatttaccttttgctttccataaaagtgtttcctgcagccaagtactttaaagttttaaaaagacgggtgaggctaagtgtggtgtctcatacttataatcccagtgctgaggccaggagttcaagaccagcctgagcaacacagcaagataccatctctataaaaaattgttagaaaatgattctgctgaaagagcaaaaataaaaattaaagaaagtagaaaaaataaaactaaatttaaaagattaactgggcatgttggcatgcacctgtattcctaggtattcgggaggctaaggcacaaggatcccttgagcgcaggagctcaaggttggattgagttgtaatcacaccactgcactccagcctcggtggcasaatgaaactgtctcaagaaaaaaaaaaagtgacagagggaaacaatatttgcaattcatagagcagatacagggttcatattcctaatattaaaaaaaacttctaaaagttaagaaaaaggccaactgccccacagaaaaatgggcaaggagataagaacaagatwgttcacaggaagagacacacagatgattattaaaaatctgaaaagatgctgagtcttactcctaagaaaaattcacatttaaactactctgggggctgggcaaggtggctcacgcctgtaatctcaacactgggagaccaaggyaggaagatcactgaagccaggrtatcgagaccagcctggacaacgtagtgagaccttatctcttaaaacaaaacaaaacaaaacaaaamaaaaaaaacagtaaaaattggccgggcacagtgactcctgcctrtaatcccagcactttgggaagcccaggtgagtggatcacttgaggtcaggtgtttgagaacagcctggccaacatggcaaaaytccgtctctactaaaattacaaaaattagccaagtgtggtggcatacgctggtagggccagctacttgggaggctgatgtgagactccatttaaaaaaaaaaaatcaaaaattagctgggtatagtggcacacccctatagttctcgctccttgggaggttgaggcaggaggattgcctgagcccaggagttcaaggctgcagtgaaycatgatcrcaccactgcattctagcagcctgggagacagagcaaaacccttgtctcaaaacaaasaaacaacaacaaaaaaacaaaaaacacttccctcagctcagacatggccttttaagtttcctaggtgactcgtgtgcagccagggttgagaaaccactcttgtcttacccctcttttgcagacacagggctcagagaagggaaggggattgtctggggatgtatagtgaggsagtggctgccttgraagtggagtctcagtctcccggctcctaggccagcccctgaccactgttccattgtctcccagacagaacatcagccacgggcatgtgatgcatgagcgtgagccacaccatcttgcacacacaggagcagagccctgctcttctcattcacttactttatctgtaaaatagcatcatttctaccacacggtggtggtgtgaataaaatgagatgaacttctagcatagagtgcttagtaaaggttctggacatttcgtagtagttgaatcatgccaaatgtggtcctaggtgattggcttcttttgctagcatgttttcagggctcctccatgctggggcattgcatcactgctttattcctttttatcgcctagtattattccactgtgtggatagaccacatttatccattcatcagttgraggatatttgggttcttcccattttttttggctatggtgaatagtactgtgtacatttgcatataagkttttgtgtagatgtgtgttttcctttttcttgggtctatgctgagaagtggaattgctggttcatacagcagctcgaaccttktgaggagctgccagacgcttttccaaggtcgctccaccattttacattcccgtcagcagtgtgagagtcccagtttcaccagcacttgttgttatctctttttaactgtatgtatatatacttaacattttatttataataaatgtacataatagagaatttgccattttaactatttttaagtctattattcagtggcattaagtacattaatgatgttatataaccatcaacactatgtttccagaactttcgctagcttcasagaatcctctaaataatatcattaaaaatcatcaagccgaatcccactgttagaattaaaggttttatttcactttcaagttatcaggatccagggaggtgtaatacacttagaggatagactcagctcatttcccagctatgcctttcagcagcwttcttaccagagtaggaatataatgttagtcattatttagaggcctggccatcttgagaaggtttactgtttagtctgcagtacaattataactgtttttgtatattgggttatttttttcagaagtaggccagtagctctaacaggagcctctttagcctgaattcrtccaagtagtgcagtgttgcactagttgtccctcgggacatgctccccaatacgtaactcacttccaggttgcaactggacacttactggtagtcagaaatagctattgcatggagcttaaaatgaacttgatcttcgtgaaagatgagtctgcagctaagagactttactgtatatcatagtgtttttttttgttttgttttgtttttgtttttgtgacggagtctcactctttcacccaggctggagtgcaatggcgagatcttgactcactgcaacctccgccccctaggttcaagcaattcttctgtctcaccctcctgagtagctgggattacaggcgcctgccaccgtacccrgctagtttttgtatttttagtagacacagggtttcaccaccttggccaggctggtcttgaactcctgacctcgtgatccaccctcctcggcctcccaaagtgctgggattacaggcgtgagccacggcgcccagcctgtatcatagttcttatgcacaaagaccctttaatattgtttgtaaattctcccctatgcacacgctgacctgttccttaatcttcttatctgtctaggtttggagcaggtatgttaagaagttaggggattttgctaagccggagaatattgacttggccgtgcagtgcctgaatgaacttataaccaatgcactgcaccacatcccagatgtcatcacctacctttcgagactcagaaaccagagtgtgtttaacttctgtgctattccacaggtagggaasggggctcctctgggtggatayggggctaaagggagtggggtaggagtaagggtggattttgctgtgctatattcaaggatatgattccttaaaaagacgatgactccagtttattacgctgggagtttcatagcacccgcctttgcttccagccaccaaactcagctcagccttgaggttaagcctgctccttttcagaaccttctttcyggatttactattttctacagctatcctaaactagttaggttcttttcctcacagttaagtcaaggtctttggcttagatttatggggagtgctgggtaaaacctgggtgaagctgttatcattaaaaagtcttcattaagcacctaattactgctgtccttttcctagacccggcataaaaagaacctggtccggtagacctagcctctcagtatgctaggaacttacactttttagttgcctttaccaagtattgcagatactactgcaaataagtgaagaaagtaacagcatttaactgatttgggaacttggtttgatcttgttctaatgaccmacttcgaatggtggttgaaagtaaaatctgtatcgccgtcttatgtttccatttacctagaaatactttacctttgagcacaggaaattaatccccttctggttgttctccccctggcattggttttaaatatataatgattatgtttgttgtakgaaaaatagaaaaacaactacaatagaaaattcttcccatatattattttgaaatacatatttccgatccgataatccattgctctagcatggaaaatgttggatttacttgtgtttgctttttccaaataaaatggaacttttgtggctacattatagaattgttttagactgcttaattctgtgtgttgttgaraaagggaggagtggggaaggtaaaaatcttgacatactttcttcgtgggtattttttcttgagcgattccatcttagttgattagcagttagcaattgcccattcaacagaaggttttcttacctttttgtgataatgatagctaacgacatcatttcttcttttttccctctcttcttgttgtctctaggtgatggccattgccactttggctgcctgttataataaccagcaggtgttcaaaggggcagtgaagattcggaaagggcaagcagtgaccctbatgatggatgccaccaatatgccagctgtcaaagccatcatatatcagtatatggaagaggtgggtttttatttaactacttggataatttgtagctacttttatgatntagtaatgtcactgtttaaccaggtttggatattagatgatcctaacaattcactatcctgtggcctaaagagacaggaattgatatcctttataaggaaaaaagtctattcacaggagccgagcagattgctcactgctgtgtagtaccctggtgagaggagataaatggagsaaggctgtaggttggagcccctcagtagaatcatagattttgagctgcaagatgatgcaggaggccaaccaagcttcttgttgctggtgaggaatgtgaggttgaagcttgtctgtgctgatgcagtgcgtgattgagtggatctctggctcccgtccatgtgtcctgacacccagtctggtactttcattatgccacaggcctcaattgaaaaatcacagtagggaatttaggccaaggaaagccatcaagttgcaattatttcctaaattttctttggaaaatttcatttcaaataccaaaaccatcctataaaaagaaaacttaccttcttaggtcaaatctctaatatttgactagrttcaaaaagtttatttctggccaggcacagtagcttactcctgaaatcccagcactttgggagaccaaggtgggaggatcacttgaggccaggaattcaagaccagcccgggcgacatagcaagaccccatttctacaaaaaatttaaaaattgtcatggtggtgcacgcctgtggtcccagctactcaggaggctgaggcaggtggatcacatgagcctgagaggtcgaggctacagtaagctgtgtgatttcatcattgcactctagcctgggtgatagagtgagactttgtctcaaaaaaaaaaaaaaaaaaaaargtcttagagaccagaagtctytgtaatctctaataatctctaggccctagagcagtggtttgtaaatggaggtgatttgctcccctccccccagaggacattggacaatgtctggagacatttttgattgtcctaaccggcaggaatcgggtgctactggcatctggtgagtagaggcccaggatgatgctgtgatcctcaggtgtgatcctgttgagaatgaaacactgtagactttatgaaaacatacaagaccctcatcatttttcctttgcctgagctccctccccagaggttacctctgttcatggttttgtgcatccgtctagtccccctrttacgcgtttacaggaatatggtttgcaacagtgttttcatctaaatagaattatacaaaatagcgatttctgatttctcttgcatattgcacattcttcttatacttcctccctacctttatctgacacagaaatgctgtatgtccagaacttctatcagaggcacctatggaagtctaagggaagaccacatcgcttttaaaaaccctaaaattttgtagtcactagatgaaaatattcagccagtgacccaaaaaattgctaccaatgagactctccattttgccatgtagccagaacttactttgatctatgtgcctggggtagtgaccaagtaggtgggtaggagtaatctcagggaaacttgaggccccagcctcatggctagggtcataatttgaacccaggtctgtctgacatcagaatccatgatgttaaccccaattctaaggggttcaactaccctttctaaatggaatcctgctatattargcactatttattcattttatataaactagaaacattttatgtagtaagtagttgagagtgttttggttttgcagtttgatcactagttttagaaaccagtttttaaacactttgtggccaattccattactatattaaaattcagatttatttggtttttccttaactattgggattaaatcctggttgtaattcatagtttgagggcgagggtgggcagtctacagttggctgagccctgtttttgtgaataaatgttatcagaacacagccacacccatttgcttctwtgtcttctgtggctgcttttgcaatgtgacggccgagttgaggagctgcaacaggcgatgacttgtaaagctgaaaatattttttggcccttgaataagaggttkgctgacttctgacttagggyatcagttgttctgttatcccagtaaaactcaaggcattaggggagaaatgttaatattaatacttaagttgatttgatttagggaaatctttgaagatttctaagtcttaagcagtagaacctgttaatggttttagtttcagcagtaaggacattttacaagtaaagttttaaatgaaaacattttgtatgaagccacaagtcgtctggcctcttgctggtgtccagatattaacactgatcctatttctccttgctgaccaagtctgtcctttgtagtaagaaaggaagaaacgttgactctgtccgatctctggacttagtgttgtagcgagcatgcacctggaagggacttgccagaggacctcctcatgcttctccagtgcttagtgggggcttggagtgcagccccaggtcttcacgagcagttggccacactgcagggccctcaccccactctggagcagcctctgcttcaaaccagcctggatgcttgtcagctggggagaagatcaacctgctattttgggatagaaataaatgctcagccaaacggccagaaacccccattcccctctctgccaaagtgaattccttggcagggagaakcttgttcgtgtctctgcacacttcctgtgccctcctgtggttaagtcagagaatcatccggctctttgagccccaggtgcctagctgctcaaggatggtccccagccagcagctgccaggaatcacctgggagcccattaagacatccagcccccacccaaacstatcgaatcagaatctgcctttttttcccaaatgatgtttttgctttaatggaagtttagatgttcatagacaagagttttaaatgatgatcaagctgattccatattcgcagttgtaagtagaactgctgagacgtggaagtaccacatggactcacagaggagctgctgtatgtagcacagcattgcacaagagcttatttcagtctagtaaacatttataggagcctgtgtcatttaatcatcaagcctcgcactgtggctcacacctgtaatcccaaaactttgggaggctgaggcaggcagatcacttgaggtaaggagttcgagaccagcctggccaatatggcaaaaccctgtctctactaaaaatacaacatttagccaggtgtggtggtgcacacttgtcatcccagctattccggagcctgagacatgagcatcgcttgaactcgggaggtggagkttgtagtgagctgagatggcaccactgcactccagcctgggcaacagggtgaaggccctttctcaaacycctcaagtatttggcttcaactttatgccgggcatgtagatgaaaagtcggctatgacctgtccttgacaagcagatgtaactccttgattgaggctagtaggtttttaagacctgaataattgagtttgcagaaacctactgtgtgccttcaggtaaatggagagtggggtttggtctagcaacgaagcatctagaaggtcyctttggccttaccggctctgttttaggtaagtccacgtctgagtaccagtgactgcagctcttccagttgtgctgtcatgyttatatgttagaaatgatcatcaaaggactcaaaagttttgccactaattgtattaccggggactgtcacaaccaagatttctcttaatttattcaccttacttatctcctggaagggcatattgragtgctcttggagttctctaaaagggtttttgttggttgtgtatattcacttgggtgccagcgattgattccaaataagtaaatcttttttcccaaaaggatgtaagatggcttatggttataagtacaacaggctaacaaagtmcaagtagatgagaaagtaaaatgaagaaataaagtcataggagccmcagaattaacccaggaatgaataagtgtgtagtttggtgctgatgttatcatcctttatttgtacattgcttgtacagttgctytgagaaggtaagtcttaaattttcaaaagtgaaatgtcmccgagcatggtggcttatgcctctaatctcagcactttgggagrctgaggcaggcggatcacttgaggtcaggagtkcgaaaccagcctgacttatgtgatgaaaccctgtctctactaaaaaaaaaaaaaaaaaaaaaaaaaaaaaaatmcaaaagttagttgggcatggtggcaggtgcctgtaatcccasctacttgggaggctgaggcaggagaatcrcatgaacctgggaagtggaggctgcagtgagccaagattgcaccactgcactctagcctgggtgacagagcgagacaccatcttaaaaaaaaaaaaaaatctacaatataccaaaaccattacttacctgagaaactattctcagggtcattgtagtgaatgcctattttatggcttttgatggcatcagggcactcaggtcatttacaagagtagtgtgtgagaccctgtgtgtcactgccactcatcttggccttcggccactgctgtagcaaccagtttccaagtagggctggaccttgccttctgctccagagacctctcgcttcctgcccttgggcttctgacgagctgcaggaactgcctggcacgtgggtccccacaacccagaggaggtgagggccacctctctgctcctcagggccacctttcataaggctccttgaaggtccctcaagatcaagccaactcaacacatccttgataggccttcctgccttctgtttcacttctccactcgtttccaaataaatggctgcatgcaagcttttgcctcaggttctgcttttaggaggaaggctaagacaagcagtaaagcaacatgggcaggcagaaggatgacttctaatagaattatctcatcactatatattttactttatggatgcttgtattgaaaagtcttggctgggtggagtggctcacgcctgtaatcccagccctttgggaggccgaggtgggtggatcacttgaggtctggagtttgagaccagcctgaccaacactggtaaaaccttgtctctattaaaaatgcaaaaattagccagggatgcacgcttgctgtgtgccagcacagggctaggctggagataaaaaggtgagtaagtaggtgcggtgtagtcagggtgaaaactacagatggtccatttccacgtaagtggaaaggtaaaggtatgtacaatagggtggctcctggctgaacctggagctgcagacaggttttctagaaggcataatcctgaagttgagacttgggggcctaggtaggagccagttgaagggacgtgggaggygcattccagagagaaggagtggtatgagactggaacagaggtgtgcagcagcatcgcatgggcgaaacaacagtagacagttgttcttttgtttttgtttgttttttgagacagsgtcttgttctgtcatccaggctggagtgcagtggcatgatctcggatcactgcaacctccacctcccaggctcaagtgatcttcccaccccagtccccaagtagctgggggaccacaggtgcatgccacgatgcccggctaatttttgtacattytgtagaaacagggttttactgtgttgtccaggctggtcttaaacgcctgagcttaagcagtctacrtgcctcagcctcctgaagtgctgggattccaaacatgagccactgtgcctggcccggcaactgttactagactrtagagagggaggtgggcaagggctggtgacactagacaggtgcagtaggtctggaccatgggtggccttgcgctacacattacagagctcaggctttttttctccaggtgagagggctggtgccactgaggcatcaagcagaggtttgagatctccttggtgacagtgtagagcagacaggtagatttgggaatttaagcttagactcacgttggagactgagatagctcatctgagaggcactcagggcctaatctcaggcagtaattttagggatgtaggggaagagatggattctgcacatacttgggaggcttgtggaggagtggggagggaggcacagggaggactccagggtggttcatacggctccctgcttctgttcctgtccccctttgtcaagctgtggtctgtactgcgtgttccatcttgtttctaagctgcttttgcccagtctttccagcatttccctttcgtcatgttagtctgtgcctgtctacgtgaactatggtgacgtttattgggcctggcactgtgaggtgctggggatgtgaagatcattgtggctcagccgctgctctcgagggcctctgggtgcagtatgcacacctgtgcctcctgtttgctcaggaagacaggctttgagatgagctggggctgacatccccaccttatcattgggatggctttgggtaagttatgttcatgttctctgagcctccctttcctcattggtaaaatgggtataaaatacctgccagtggagggttgttgtaagtagccatggaaaatgtaaagcacatagcacttaycattttttcctgtgtctttaacagatttatcatagaatccccgactcagacccatcttctagcaaaacaaggcagatcatctccaccatccggacgcagaatcttcccaactgtcagctgatttcccgaagccactactcccccatctacctgtcgtttgtcatgcytttggctgccctgagctggcagtacctgaccactctctcccaggtaacagaagactatgttcagactggagaacactgatcccaaatttgtccatagctgaagtccaccataaagtggatttactttttttctttaaggatggatgttgtgttctctttatttttttcctactactttaatccctaaaagaacgctgtgtggctgggaccttwaggaaagtgaaatgcaggtgagaagaacctaaacatgaaaggaaagggtgcctcatcccagcaacctgtccttgtgggtgatgatcactgtgmtgcttgyggctcatggcagagcattcagtgccmcggtttaggtgaagtcgctgcatatgtgactgtcatgagatcctacttagtatgatcctggctagaatgataattaaaagtatttaatttgaagcaccatttgaatgttcgtamtagtagaaaatgatgtgaattttctttctgttcggctcctatttttctcatcattttgttttctttaattgggttgaatggagtagatagaaatatttatggtttaggtaacagttagatgtttcctaagaatgcaaactgccttttccacacaaaggctgggaataaaattctgggtattctcstattctcatttaaaggagtttagctttcagagagaaacagcaggattgcttttgaccttttagaagattggtctccagtaaaggtggacatttttgagatttttataataaagaatttaattgctctgcatttgtcaagtacagttcgcttgaaagcctgcctgactgtggaaaagatggagctcaagaatggagttgatggcccagcgtggtggctcatgcctgtaatcccagcactttgggaggctgaggcggtcggatcacgacattaggggatcgagaccatcctggctaacacggtgaaaccccgtctctactaaaaaaaaaaaaaattagccaggcgtggtggcgggtgcctgtagttccagctactcgggaggctgaggcaggagaatggcttaaacccgggaggcggagcttgcagtgagctcagatcgcgccactgcactccagtctgggcaacagagcgagactccatctcaaaaaaaggaaaaaattgtaaaaaaaaaaaaaaaaaaatttcccccagcagtttttgttttctaaagttatcagtttatatattcaggtcttaagaaaggcaaaagctgtcttcaggtgattggcttgggggcagaacagtacttctgctcggggtttcaccttcctctctactccagtgcagcagagcttgtgatgtgctctcactgaggtgctcagtgcagcaaggaggcctgtggaccctcgagttgagaattggtgtactagggcattcggtactttctagaagccattaatgctacaggtactcataaagtctactcttctgcagcccatcgtggatggtggcttaatcattgaatttgagttgtttcgagctgcarcgttggatttgcattgttgtaagcacactttcttgctgtgaccactgacaccaaaattagtttgggcccagggagacttcagttaattggttcatttgaggcttagccctggactcatttgtcaccagccaagataacttgccacatggaatacagccagaccaggggtccccgacccccaggcctaggaccggcactaaaccttctgttacgtggcctgttaggaaccgggcatcacagcaggaggtgagcggcgggtgagtgaacattatcacgtgagctccactcggcgttagattctcataggtgcgattgcgcgtgtgagggatctgggttgcatgctccttgtgagaatctagtccctgatgatctgaggtggcagtttcatcccaaaaccattttcctccctctgtccttgggaaaattgtctttatgaaaccggtccctggtgccaaaaagcttggggaccactgagctagactcgacagtattttccaaggaattaaagcctcaaaacttggtttgagatttcagggtaggttgttaaaaatctgtgtgttgaaatctaagatttaattctgccaaagttcacgttaagacagaacaacctgctggaaagagatttggtctgagtggggcctgcggaaatcttctttcctgacttggtcattacctgtgggaccacttcctgagctgtgtggtttgggtgatctcagattttttctatctataaagctatgtgcttttttctactcactgagttgtagaaaggtattcgctctcattccattctgaagctctttgaaagcttgttttccttctaagtatcttctctactaaggttgccagatataataggggatgctgggcatggcggctcacacctgtggtctcagctactcggagggtgttggggctgaggcaggaggatcccttgagctcaagaggttgaggcagaggttgtggtgagccaagatcacgccattgcactccagcctgggcgacagagtgagactctgtctcaaaaaacaaacaaacttgcataactgaaaattcagaagtagttggccatcttgtatttctgtttggtaactctggcaacactaccctctactccccacttctaatataattttatagcatctctggcatacagtctatttggatccgacctaatggtgcaatattttgttttcctcagaggagcctctgacccatgtgaatctaggaccataaacaattagaatgcttgggagcaagagctttatatctgcatatgggaacttccggatccctgtgggcaagtgcagggagggccccttcttccatctactgagccatttcccaggggctcgggtgtgtataggaggaagagggcgagtcaggcatgttaacaaacattctaggttattcttggcagttttggaaacagttctaaggctgtggttctcagactttatatcagaattgcctgattgctgggaacagagactgatacagtaggtctgatggggtgcccaagaggttgcattcctaaattctcatgcagttttctaatcagggagcagctggaaaggtattgtgagcttgaatgtacctgggaaactacctggggtcttgggagatgcaaatgctggttcagaggtctggccctctgacactctgatgagcatttctaacaggctctcaggtgacggccgtgctcctggtctgtggaccacttcagtatggctgaagcacaataaaagagggcaaattactgctttctttaaaaagagtggcagccgggcacagtggctcacgcctataatcctagcactttgggaggccaaggcaggtggatcacttgaagtcaggagttcaagaccagcctggccaacatggtgaaactctatctctactaaaaatataaacattaggccaggtgtggtggcaggtgcctgtaatcccagctactcgggaggctgaggcaggagaatcccttgaacccaggaggcggaggctgcagtgagccaagatcatgccactgcactccagcctgggtgacagagagagactcccatctcaaaatttttttttttaaatgcagaggttggactgcctacctatactctaatttctattctggagtgattctctggagagtctaggtaaagactgaaaaggcattgttacgtccacctgtcatctcacttggacaagaatccaggagaaactattgaactgaggtgacaaagttatgatcaatgtggtgatctgaggtgtattaaaacactgagctctttcccagtcacaaacactgcaaggcaggtgtttctaacaaagccttaagctgatgtcgacatgccccacaattccttgtcactcaccagcacatccccgctggctccatgctagaagcaggcaaggagctgcaggtgcgtatacgatggaggtgagggagacagtgcgcatggaatgaatcaactcagtttgggagcagggagaactttattgaggttatgaatatattctacttgaaactggaaggataagtggtyatgaatttgtggcttatggtaacctttgttaagcatctttctttttctttttttttttggtgagacacagattcactcttgtcccccaggctggagtgcaatggcgtgatctcggctcactgcatcctctgcctcccaggttcaagcgattctcgtacctcagcctcccgagtagctgggattacaggcatgtgccagcatgcttggctaattttgtatttttagtagagatggggtttcaccgtgttgccaaggctgatctcaaaactcctgacctcaggtgatctgcccgcctcagcctcccaaagtgctgggattacaggcttgagccactgygcccggccttttttttttttttttttttttaattattgagacggagccttgcgctgtcaccgaggctggagtgcactggcactgtcttggctcactgcaacctccgcctcccgggttcaagcgattctcctgcctcagcctcccaagtagctgggattacaggcatgtgccaccatgcccagctaatttttgtatttttagtagaggtgaggtttcagcatgttggccaggctggtcttgaactcctgaccttgtcatcctcccaccttggcctcccaaagtgctgggmttacaggcgygagccacsacggccggctgttatgctcatcatggcacttaagagatgcttaacaaacctttcctacaatgttcctcagattttcagagcttatttgatctagcatctggttcctaaattctgagtcacatcagaagccaaacttgaatgcttttggaaagagctagcctcataccacttcagttgggaaggggagtactgaggtgtaccttggcaggacagtggaatgattgctggttcttctagtttgctctataccaagaactgctataacatgtttctaaaccagggctatgcaaagcactagagttcctgaccagcaatgcaaaccagtggcatacaaattcaaaatactgtatacaggccctgactccagcccaaaccaaggctggagggcatccagggggatgtggttccccacggggtagcatcttggttatgtgagatcaccaagacaccaaacctgttttatgagctgaatcctcagcttgttgctggatttgtggctgataaaaagtacaggcagggcccagtggctcacacctgtaatcccaacactttgggaggctgaggcaggcagaccacctgaggccgggagtttgaaactagcctggccaacatggtgaaatcctgtatgtacttaaaaatacaaaaattacccaggcatattggtgagtgcctgtcatcccagctactcggaaggctgaagcaggagaatcgcttgaatctaggaggctgcaggttgcagtgagctgagaaggcgccactgcactccagcctgggagacggaatctcactctgtcagtcacaacaacaacaaaaaaatagagcacagctatgttttgagttcttaagcaagggcaagcttaccaggcacttacagagaaggttgacgaggatgacagggaactaattgggggagggatgccatggttgaaaacatggctggggcagcgagaagttaagatgaagtcccaagagtcgcaagaacatgcagttccaggacgtgattctctgcagggacaaagagagacagcagctacaagtctataggcagtgacaaaggatctgagatcccatcagagtagacttcaagttggagaaaccttttattggcacaggcattccttgttaacttgacagggtgaagctgtaatttttcaaaaacagtaaaagctggtttctcctaaactattttccttgtggtagtagagatcagtgggtcagaaacaactcctgaccacttggtttccttttgagccgcgtcataaggaggcaatctgtaaaactagcacaggtctcccgctgttccactggctcacccacatgattagcagagtgcacgaaaaaataaaacttctattaaagaatcatgctgagcacaagatcagagaggttgtgacattgcaaactcgatagatgcagggggcctgggagactggcgttctccaaagggctcccaacaccatctctcctctgatttctgtgacaaatgtggaaagctacttgcttggaggtactgggggaactgatgggggaactttcatcctgttaggaactccgctttccattcctgcgtctctgtcttgctccctggagatggatggatcacggagggggccacagtcagctggggcarcaggtactccctacggcactagtctacagggggaaggacgctctgtgctggcagcggtggctcacatggcctgtctgcactgtaaccacaggctgggatgtagccaggacttggtctccttggaagacaggtctgatgtttggccaatccagtccttcagaccctgtctgaaacttgtatcttacgtgaacttaaagaataaaatgcatttctaccccgatctcgcccccaggactggcacgacaggcccacggcagattagatcttttcccagtactgatcggtgcgtggaattccagccaccacttctgattcgattccacagtgatcctgtcctctgagtattttaaagaagcctgggaataaaaagtaaggtgcttttaaagtgtgacaagggtcaaccaatatagtcagactcatccttaaaagaccttaagtcactcatccctggccactcctgctgtgggcccactagcacagtcctcaacaccacaaggcttctggagccgtggggcacacctccacgggcaagccccctgcccggtcacccttcccatcacaggatctggcgcgatgctgtgggaactgttgcaggcgttggctctgaagctgctcagagtctgccctcacagcaaaagggaactcctgactgcctggcacttaggaggagctcacagcctggccgtaggtccagggtttaaggctgtgcggtgggtagaacagagaaagccgagatggccacggggtgtggctcacaattcactgttcttggcaggaagggggcagccactcaccattgtcac

SEQ ID NO: 93815 - DNA, 31848 bp, Homo sapiens
gtttcacaaggatttttattttctgagaatgattttgagctcacaagccacaaaaatcaaccttatttcttttccctataagagttcttgtaggaaaatatgtactgatataggctgaatctccttatacccctccacctcatcctgtaacttgaaaatatgaacctgaggctccattgatgagtgacttagagctgaaaactatgtttttcctgccaaaataaaaatgacctaaattttctgaactaatctgcaaaatgaggaagcttgtttcttggacaaataatttatgacaattttcaaagcactgtcaagtgctatgggcaaatataaagatgactcaatctggccttcaagacattgatattgggaatactaagacatgtacacacatgagaataataaagagtgacctcagcagctagtaactcttcacctaaagtgcactggaagttcaaaggcaagaggtgtcatttcctcttgggggcattgggaaagttttatggagaaggtccaatgtggaatgaaccatgctctgtggagagagggcattctaggctgagggtaagagtgttgattggtggttaaaatcacagagacttgaagtcaaatcttggtagtttggccagagaaatgtacttctttctgcctcagtgtttaactagaaaatggagaaattcatttggtacctggtgcatgtaagtacaaatatgtgagtgctattattaaaaggaagcatgcataaatacgcacagagctaaaaagtatggcccatgggtggagaagaatattagctttatatagcgatttgccctcaatgtgtataagcagctaggattcatttaaaatacaattagtattgacaaggatttgttttattagttgtacatctatagcacaaaacagtgtgcacctgtgtgggatcctcagtcttctttatcaaaaagagatgaaactcctgtactgatcagtagtgggatcacgcctgtgaataaccactatgctccagcctgggcaacatagtgagatcctgtttctaaaaatgaaaaaaagaaagagataaacaaggatgtctccctaccacttactgatggaactgatttgaagtatcctttttttttttttttttggtcaaattggcaggtcagataataataagagctaacatttactgacaccatgtgcaagtcactttcaacctcatgacaattgtgggaaacagctgctgtcattaccatattttacagatccaaaggggagggaacaaaaaaaattaagtaacttgcctagggccatacagctagcaggtggtggaggcagaaattaaactcaggcaatcagacattagagccttcacttttacaatactgttccattgcagttgtacactgaaatgaccaagtcttctccctcctgccgcctcgtggctagttgtcagaccgtggcaaagtcagtttgatcaaagtgatcctaacaatttggacaccaattacacagagcaatggttcttaaacttttataagtcatgaggccttttggaatctaatgaaattctacgaatgctctccccagaaagattcacctctcccctcccctaaacaaataaacttttagttacaacttcatggagtacacagttccaacccaaatccatccactgagacttctggaggctaaaagactctaaggtaagaacccctagacctgtagtgacatctatatcactttcattatggcctgaaaataagagaacacttactatcttattgcagaagtgaaaatacatgagtcatttaaaatccctgagagctctccccaacattacttgcagacaagtaatccctttacattttaagacatgtgtagaaaggggatttttcttgtgtagagccaggtaaagatttattcctggctgggcatggtggctcacgcctataattccagcactttgggaggccaaggtgggaggatcgcttgagcccaggagtttgagaccagcctaagcaacatagtgaaatcccatctctaaaaaaaaactacaaaagttagccagatatggtggtgtacacctgtagttccagcttcttgggaggctgatgtgagaggatcactcaagtcctggaggttgaggctgcagtgagctgtgattatgctactgcactctggcttgggtgacagagcaagaccctgaaaaaaaagaaagaaagaaagaaaaaaaagaaaaaagaaagaaagaaagggaaagaaacaacaaagaaacaaagagaaagaatgaaattattcctgctaatattttttccagagtattattctaagaaatcgattcacttttataacttctcaaaccatacaagcctgaggaaggacaaccaaaggggtgagtgtcagtaatcatgaacatttaaagaaggccaatgtacctgagggtaggcaggcagaagtaggccttatcatagcagcagccctttgatttgaccactccagctctcgattggtgtgcattctaggtatttatctctgtcagtaactttatcctttaatgcaaaatttgacgagtgattattatttatcaatgataattatggctaataagtgctgattaatcgagtgctgattattggtaaaacacttttctaagttctttatattttttctcatcctcacatcaatcctcagagatggacactactattattcccattttatagatggagaaatttgcctctgttcagagctaatatgtggcagaacaaggattccgcctgggctgcctgactgcagagcccaaagcctgtcctttcagccacctgcccactctccagaagagagcaccctttgtattttaccgtatgagatctctgcaccattccctacattctacacaakggggctctgacacctacttctgatttatctgattagagaactgggggagaacagcctcggttatggtccaggccattatctgctctttgggtgcagggatgcttttgggtgtcccacgccaggcttgttccacctgctccaggatcagatgattggttcccttcatacagactcattgccagtaaacttgattactcaaactttgctcaagggccaactctgcttagtccagtcagggtcctgcaaaggagcgctgacctgtcccgcacatgtcttgcatgatctccagtctgggatggctgtgctgcactggaaggctgtcttattagccatgtgaacactttgtgctgccttaccgactctatactcaattctgcccttcctcggctttttgttctttggtcagctgtrcctgtgatctccaggctgtggtgatcattgggcataaattccttgccccactttccccggaaaaggacttcctaattggggtctgagctgaagtggctcttcctgtattgaaatcctttgtgtgttttcattaactatgctgtgtcatcacacaagcagtggaggtggtggtggcaccatccattcattcatgacacatttattaagcacctacttatgttccaggcattgtgctgagtgctgaggttgccatggtgaccaagatcaaacttgttcctgctttcatagtttactgtttttgaatgaatcagacacataaagaggcaggtgcaatacaatttgataaatattctgatarggcaataacaaatattttgagagcacctaaaaggggcagctattccagacttgaagggctggggtggaccctgggagaagtggcatctgagacctgaagggtatctagaagaagctaggcaggcaaagaggttggtagttgggtagtaaggaggagaaagtgttcaagaaagacggaatagcaaatccaaaggccaacacacagaaaaagcatgtaacacctgggcagccatgattagatcagcatagctaaagcagagtttgcaatgacgtgtggccagatattatgctggtgagctgaacaggaatggggataagaagggtggctatcatttaatctttctatgtaccatgtaggtaccacttgtcttcataggctaaactactgtttcttgaatatataggggcagggatgaagctaaggagtaacatttgtcgagtcctggtacatgttggggatgatggatgatctcagagacctttcattccagactccagcccataccactcaagggccccaacccagccaaatgccttcctccttcaggtagagtcccttgtggctcaatatacaccagagtcttccacctgttactgctcccagtgctgttcactctgaaaactggcgcccttaatcacagtcccctctgctacctctgctgctgctgcttccacagccaggcctggcctctattgctgggattaacctcagtgtaccactagctgctgggaactaagccaggcctttgacattcaccagcagccctacaaggtagaggtgcttctttccatttgcacaaatggggaaactgaggctcagaaacattaaattacttgttgcaagccacaaagctttaagtggcagggttgaatttgaacttcgtttaatcccaaagccactaccacacaacagtttctctttccccgacagtcttgtagttcttactgagatcccttgagtctgctcctttggttttcttattgacccttttcttcagcatgagtccccaaatgttgggccagaggcttttcagaggcctctccaagagttttccttaacctctcacaagaaagaactgaattcagatatctcaacccccgagggcatgttcaatgaccaacaatagcctgccctgcccagctctatctccaagattggaggcagcctcccaccccctactttaagaacagcagtactttctgactttggctagtattcttaaattcccctcagagggtctggtgattttttattcaaatagatatttaggcagcccttagtacacctgaacatcctaagtgtgatttgcagatgaggttccttctttgtctcctacccagactctcactgcatgctgtttttcatttacttttatttttgtcaccttctttcattatcattttaatgttcaatttctgtgctaaataaaataaggtttttctgttcttctgctccctcctgcctctttcctcaaacaccagtaaagcccagggacaaatcttatggattctaccagtggagatgaatgtgttcactagccaaggctccagcttcagacaagggtagtaatgaatcaatcactaggcttttattaagtgtctcttcactaaaagcatagctcttcctgcagccagacagccttggctctgcactcctgaaggtaatctggaccctgtcactaattactgttcttcccggcagcaagtagaaaaggcaattttcaaattgtttctattgatcacagggcattttctccagaatgtcactctctataaaaagggcatgcaattatttccaggtaacatagtgaagatattttatagaagaaaagcagttcacctactggccattctacaatttagagtcaatagacttgagtgcaaatcctggctctgtcctttactagccgtatgaactagggcaaatcacttaatatctttgaaactcacctcctccctccataaatgggaatattaattcccattttacactgggattataaagattttacagtgctattacaaggattaggttagtggggattaaataaaacagtacagttttgacccaggaggtcctattaatgtatttattattattatcaaaaaagccctgtacctgtcagtcttcagaacaatctgatatattttcatttgctgcatgggattctctttttcctatacaagttctcattcttcttcaaaagtagaatgtgatattgcttccatatatactctgaatctcatcttttacaattgtatgatataatgaaggtttaagtaaatttcacctaacttttggctttcattgagccttcttcaataagatgcctgtgttttcattgcagaatgatgaggtggagtttgtccgaactggctatgggaaggaaatggtaaaagttctccatattcagtgagatggaaaatatcacagcattaaagaggtggcaacttcagtgcaacttactctaagttccaaaaaagattacctgcatggagataattcagacatcatccctacagacaccatcaagaacacagttcatgtcttggcaaagtttaaagaagtatgtgtcattcttcttagatgccgcctatcttgatgcagaatttgccataaaacagcatgaagtgttacttgcttatttccagttccctttgcattttaatctatttttacatttaagccattttttaaaaaaatgttcttttctagcctaaaggtctcaggattgaagaaaactttgcagaaaagcaaacaaacacacaaacctcacatctttgtttccttggctcttatctcactgcaatcttttaggcagagaatcttattggacaaaatacatgttatctctaattagaatcaaaggaaaatcaaggtcctgaaagaatttcagaatagaattttacacatttttgtcatgcatttctttgagtcttaccatttagtttttatttttttagaatggtgtgcatttatagaagaaaatatcatttcacttcttgttattaatacagaagaatatcttgagtatgagatacatttatttttattgttgaaatctattttccaaattttaatgccattctaactttcccaactctattaccacttactgttcatatacagtggttattaggacttttcaagagagacttagatctgatagaactgatattttagcatttccagctctggtttcttttttctttttttttttgagacagagtctcgctctgtcactaggctggagtgcagtggcgtgatctcggctcactgcaacctccgcctcctgggttcaagtgattctcctgtctcagcctcccaagtaactgggactacaggcgcctgccaccatgcccagctaatttttttttttttttgcatttttagtagagatggggtttcaccatgttggccaagatggtctcaatctcctgaccttgtgatccacctgcctcggcgtcccaaagtgctgggattacaggcatgagccaccgtgcccgaccccacttatggtttctttaagtgtgagtgaagctatgctgggtcacccagatttctgggcaattcaagctgatttttttttttttttacttgccatgaagtctaaaaagacaagaaatgtagactggaaagcttcttttctcatgttttctcatgaaatccatacccataattcattaaatgaacaaacattgcaatataatttctgcaactcctawttttaccctgaacctttctcttgctaatcagaatgacccagcaaacatagatggggctatggaaaaaggtactgcattctttaaaaaaatcgtttgaaagtagacctgtgctgtgatatggacaagggccaggtacaacagattcttgtatttcctgtactgtgtaggagtttgcagaaaagtgaagaatggacctgaatgttaaaaactacttaaagtcattcattatggatagagtgattgtatagcttcttatccaaaccaggacacttttgagctcaaaataggatgctattcgtaattattctgggccaacaggtataaaacagaactatactggggaagcctgtacaaatacttcactttaattataggcaaagccattaataatttccagactgtgctaagaccataaaatattacctagggattaatatggaagctgcattatgggggtggagagctgggatcaatagaaggactgtatgcaaggtaaggagtgaggtggcccttcattaacatttttccttgggaaaatgggaagcctcatagagtttagagtgttgtggtgtgctgtggttgatacaagtgatgactgaacgcactgtgagaagaatctgaatgttaagttattttttgctcatccactgacacatcctctcctgcaaaatgggtttcttttaaaaacgagagtctcacctggtgatggtgattattaacttcatttgggagctctartaaaaaagtgagataaacacctttttctcttgaggtagactctattctctgcttgtctagttctaaaaagcaattcatcaggaaagagaacatcatgagtaatatcaaaagacaaaattacaacaagtttagttatagagtgaattggtttttatttaccattggggcagcttctgttctacaaaaaagagtaagagcttccactgggcattgggttttgtaaggtgggaacaagaaacagaacaatggaaaaaaaaactgattggttaacatcgggtttcagattacttttttagtaagagttaaagcagaggggacttccttatcgcactgactcagatagactggartctcctgttttcaggaaaaactggtctgttttggtatctatctgcttccttaaagcttcaatttgattatgtggaatttagcataagtgactccattttggtctggtctgttggggtctaatgcaggagcttagtccaaagcaatgacctcccatcgtttcatttaacagtatttataaattatttttaaatgggacaattatttctgctttgaagcattttgtttctttttacaaatcaaaagcatagaagcctttggtgtgaatatttgtgagcattttctttcttcttttaaccatgtaatccgagctcaagtctacatggaagaaatcccttggaagcatcttggaaaggttaactcacttatttgtgctctcagtttaattaaagaaattggctttatggcatgaactgaaattttcctggaaataatttgtttccctaattttcagaatggagttaagcatgtccatgcatttattcacactcccactggaacacacttctgtgaagttgaacagctgagaagtggtaagaaactatttttcatgctttgattatatagtagcaacttcagggtggctttgttttcttttttcttcatttcttctaaacaatgctgtttactaacatggaggaaaactgtagagactttttaaggcttttaaatctgagatagaaatgaatattgtgactttgaattatattaaagaattatctactttttgtcttaaaaatataaaaatgaaataattcattttgcaacaaccctggggattgagtcaggcaaatcatttttattaccagattttgaggtaaggcaaaataaaaaaaggcccagcctgaaaagaacgcaaatctctggattttctgaccaatattttttgtgccacatcatgttacaattatagtaaccttcataggaaatatttactaaataatagtcaagttttcctgaaattttattttgtgtaataaaaccactaatattgtaattcctataaaatgcatctcatttaagatagcaatggcaattatataattctatttcctaagaaatttccaaattaattatgaaacatwattatatcataggtgttattagtactgataactgaacttagcaaatattaaaatttccacagcttgtattccacagatttgttgagcttgtcagagcagagttcaataattggctaagagttaggctagaggacctctaagaaccatggagacaaagctggtaataatgtctttatcccagtaaaaaaataaactttactgattgttataaaatgaaagggtggactctaaaatttttctattttctttccctcccctcctttactcttcccttttcttctttgctgttgccttcccttcccttcccttcccttcccttcctccttagtaggaatttgaagtggcatctaaygaatatcagatttattataaggttaataaaatataagatcccttctcattctgagttcttttggataatgccctccttagaaagttctagtgtattagctatttttaaatattttccactatgtgaattaaagtctatacataactagggccttctcaacgtttgataaacagttataaagttaatgttatataaaagagactaaatagctgttgtatttggttaaaaagatgatctttatcacccagatgtgtagtcatatgctatattagctttctgagctatttgttaagttaaattggaactaacttctttctttccttccctcctttccttagcccttccttccttcctttctgtctctctggttccttccttctttccctctcctttctcttcctccctccctcccttcttccttcttttctttcttccttccttcttgtcttagatatgtggctttggaggagaaagaaaagtttcctgactcaatgttatcctacccaagcctcattaactaccctcataaaactagaaactcgaaatcagctctgcccaactgaaatatratgcaagccatatatataatttaaaatttttttcataaccacattagaaaagcaaaaagaaattagggaaattaattttaataatatattttatttaaataacatcaaaaatatttcagtatgtaataagtataaaaattactaatgaagtattttacattctttttacaaaattgtctttaaaattctgtattttatatgtgtagcttatctcaagttatgctagccataattcaagtgcttaatagccacatgtggcttagtggctactgtatagatcagcataacttaaaactgcttttcagtgacgtttgggatgcttttttacattttttacatttttcaataatgtaaaataacaacagcagctaggattaggcctcaagagagctaattaacaatgagagcatttatgaaaagtgcttatgtcattcattcatatactattcattcaacaactagatttcgaggccctattatgtatgcaaagggctgtaggtaaagaggggaataagatgctccctgaccctagtgagacagattgactgcagtatgagaggctagagactatgatgaagggataaaaggcatgctatgggaactgagaagtgaagaaactctttccagagcagtctgtctggaaggcttgacaaagraggaaaaaatattccatttgacttttgaaaaatgattcagaatatgctgcgcattaaaggaggaaagggaattacacgcagaagaaacaggatacatatgagtacagtccatgaggagtgaaagaggggaagtaaaatattttgagcacttgcttcatgctgaagactatgccggggaagtaatttatttaactgtggaaagggcaaagcatttgggggacagtaacaaattcagtgggtctgatttctagaatgtaagaagggagatgaagataaataagttggtggtttgggctggaatctgaagggcctcatgtgttatacacaagtttagtataagatgaaggcagttttgcacagtggttaagcaagaggccttgaggtcagaatgaatcatttgaatttgagctccactacttaataactttgtgattaagagcaaggttacttatactacactggtgggttttaatttgtaaaacaaggataccagtgcccacttcaacaactatccagagaaacaaaggagataaatgctaatttattttattaaggcatttagcatagtacttagcatagtacttggcacactaagctctccttaactaatagctatagttattgtttagaatgacaacagagaaycagagaaagcctctaatggtcagattactatgtgcatgtttttgttcagaaactctgaacaaggtatggtgacagattaaagaaacaggcagtagtgagacatttggagacttgcaaagatgaagtgatggggtctaaactaaagcagtagaaatagagctggagagactgagaggttgtgggaagcattatgtgagacatttttgaagtgtaatcaataggtcttagtggttgattagagatggaagattggagagaaagaggagttaaaattgaccctaatctgggaggactgggcaactgactaaggagattacacacaaggggaagttttcaggtgggaagctggtgaatgtgggactatgtgatggagatagatttggggcccatcagcagattggtggtaggtgaagctacagcagattggtgttaggtaaagccacagggaagaaggaccattccagaaaaacayacaaagtgagaagagtttgaaagaggagatggcctgggaaaaattccccactgtaagggttgggcagtttaaaaactgagacagaagaatgtttagagagatagaaggaagacragggatgatagtgtcatggaagcagaagaaaaagacatttcaagaaattagggatttctgaattactggggaacaaagatgcataaaaaataggcccatgtgcagtggctcagcactagaagtttacttctttttgcagaagtccagttcagtgtctgtgtggggggctaggggggtcagggggatgctgtgctccatgaagttcttcaggaacccaggttgatggcaactttatatttgtaatccttactttttggtgtcaccttgaaagtagaccctcataccagacaaccaaagaaagagcttagaggggcaaagtccttgaagcgtaagctcccggcctggaaacagcatggatcatttcttctggagagagctcagtcacatagtcacacctcactgcaagggacactgtgaaatgtcatctagctgagtgccaggaggaagagcaagtagatttagcctctgccataggagagttaagaagttggggttccgagaggactgatgagaaactatgtagtcagtaaataggcrtcattggtgacttcccagaatacttttagcagagccagggaggtggaagtcaagtggccaagtatagggctgtgctgatcatgaaaagaaaacggacttctctttatatcctgttctttccaggaatgaccaagrgttgctatcagcttgaattctaatcacctggctgcagctgagtggaaaaactagccaccataatcaggttaaaactttttctttctgcagaaagctgcaaagcttcagggtattgagatcattgtggcagtgttcccagaagctccagcttgactyatctagagtccagcccccaactccccctctgatttcatgcagggctggcagggattggggtagcagaagagatatctgttgccttaagtgtatacaggtatgtgtgtgcacatgtttatgggtgtgtgtatctttcagtgttgtgtatatgaagatgacatttctactctgtccctctttggagagtagggatgtatgctcttttggtagcaaagtttaattctttatttgcttattatccaagagctgaaactgtaggaatcgtaatgtgagagaatgttacaatcattgtcataagaaatgcccttgtaaaggcttaactaaagaaaatagtaattatattatacacacaccactcacaaattcacatggggaaggctattgttacaaacacctgagtagtgcctttggtgggggaccggctagaatggtaagacttttgccccctcaaacacatgtgcttattcacacgttcagtcacgccactcccaaaaggactcttcccaggaggaggtgtgactgagtttctcccgatggactatatkcattcttacttagcaaatgaacaaacatttctagaaatgctgctgaacctcaagcaccactttaacccctgggaattgctctaaaactcccattacactgtttcttcctagtggatcttttacagctacatcactaggctgtattttagttgtttcaaagcctactgattccacaggagaatctggaagagagaaagaaatttgtttgcccaaaggaatgagggctggttttatgtttgtgacttctcaagccctgagaggagaactaggccctatgtgtatgaagcaggctgttggtttaggtatcatatggcattgaatcttcagaactctttctatcaagtatcagtgagaaactacaagcttaacggagctgtaagtcattggtatgattgagtcwctaatttgaactaaactgacccccaaacctctgcactatttgaattataactcacaatttcttcagcatcaaatttctcccatttgacactaattatgaaattcagctaaagcatagctaaatagaggaatggaagatggagaagaggcctcaaatactagattgtgtcttctgatagtgaaaaatacttcctatatttctattgacatgaagggtagtgagggtagggggatggttgtaaggaaggcaactgatgaaatccgacctggaggagaacagatttaagaggtgacaagatgggcagatggaagaagtgaaatgggagaagtgggagatccaggacagagatggctactgccaagaagtctgtttatgtcgttttgatatcaagactaaagtgctcttcggttcctctgtaagaaaagttcttggcagattcgtggtcttttaaaatgttcttggtcatcacctggttgtacaaaagcccagttaatttcctaccatctggatgatgtcatctctttccatccacagttgcgcagagggagctttcgctcttcctgcatgagctaaatggactctccaaggcaaatatttaattgatctttactttttctggcactttacaagtttgagattttctactagaatgatttaatatggttttaaaatatctgcctttcagctatttgtgtcctttttggaggtgttaaatgtggaagcaattatcctcttatgacaagatctttttcttggctcaataaagctttgtgctttgtgacacctgatgcgtaggtaaggaattgggcttattttctattaattcgcagtgagtttctttcccttagatagctaaagggtaggatgtatgattctytgagagataagccacaatctgctaagtgtgtaggaggacactaaaagctggaaaagattatgttctagcaaagtgaaatgtgaaaaatctttcttttgcattactccataaccaaggcagaaaaacaaaacaaaacaaagctgattaagtgatttcatggggtgtaacctagaaaaggacagtttttgaattacttcttgttggtctaaatgggaatcttttttagagtgtgttaggcatcatatttttagttgatgggcccatgattttgaaagcctcaggttcttaccaatgttcagaaagctggggcaccgccaacagagaagataaaataagctctctgatttcatccagcatgtctaatgtgtgccagggaaaaattcttttaacattcagagaatagtttttgttgttgttgttgttgtttttaatagaatgatgagagcaccagagtagatggtgtgtgttctgccaaaactgtggcaatagttaattgtcttggggaacatgagacattttattctgtgtgaaactgatgccaagacacattttaaaaatacaactgctgtctccgtttttagattccagtgagaaagcagatcatttcaaagtggcctagtaggactgacattcgcttaaggtcaataaatcttatcccagggctggagatggataggacggcacattagaagtagttttcagaacccagtaagactttgtgaaacatgggaaatatttataagttgttgaagtcattgggaaaaagtcaattatggcaaaatcatcatcatcacatttgtagagcactttcgtaggtcagcaattctactaagttytttatgtgcatcctcttagacatgtggcaactctaggaaatatgtatgattatcgtctccattttacagatgacaaaatcaaggtagagaggggttaaataattccctcaggagcatagagctcataaaaatgggggttgaggatgcagggagagcactgggatttgagttctaggaatctgagtctcaaagctgtagattcaaccactatgcaacattgcatccaggaatccttttatggttaacacctttggaggagccaaagtttgactggcttacatggatgccagcagtcaaggccagatgaataggaagaaaacaatgtagataaagtttgtctttggttctttttcaccttcttttcattctcctgcaagggtttctgctactcattttaaccccactcctgattgcaaacccatgtttcatttctataggattttgttttctagaaaggcttaccatgggaagtagattatcatagtaccttacaaaggcttaaggagtcacttctttaagggatatttatttgcatttcaataggaaatgtttaakgaatacaaaggtttttagatacataggagccaactctaaaaatgattattcaatctctgtttctgaccaatggagatggtatttttcaggcagggggctctatctgaggtccttaaagcacgctgtgaatagaaggtggcaaccttgtctcctggaaaggccacgtatagaacacaaatggggaaagggtcaaaggaaggaggaaccattgcatagatgggaagtgatccaaaaagcaggaagaaaagcatgggatctcataatgtggtgctgagtttaaattccacctgtgacagtttctagccatgtgactatgggcaaatgattaaaagtcacctacattaaaataactgctttatagagtkttgagaactaagtaagataaagactgaaaactgcagcaaccaaagtcatgtctacagagaggaggttcttagccaaggttaacacccttcctttcaccccctgccacactatgtgtgagttggaggggaccagaaagggaaatggtaaagactgatggggctgaactgtctagaaaagaaagatactaaattgtgcaatgcttattccttgacatgaatcaatcttgctaaactcattcattcattcattcaacagatacttattgattgtttctgtagttctgctgggtttgaggcttccactcactgcatgtagcaatgctgattttgtgagatcatgacttcatacatttagaatctgataaacccagccagctgaaggctttaaggcattgttggtatctttctcttgctccttcttcagatgtagcttccagtaagtacttcggaaagttaaacaaggatcatttccagtttcacygcattatcctgggacactctgcacagaatatcttctttaatcaggacatattyaatcagcagatctaccactaaccactggctattgttctctctgataggagtatactgaagcatggaaaaacagaaatacagactttatttacctacttttgaaactccacagctcctgagttaactgtagcaatagaaaccacataggtgatgtaaaccattggatttttaagagcttccttggattttaattgaggatcatgagttatattcttgttcttcaactaagaccatgtgtgtggtgatacctgacatctctggcccttgatttttagactgaacagtccaagaagcatagatattggttggaactaacaaagagactgaaaagaggtgatcttaataatcgtgccatggcactttgctattagggtttgccaagtgctcccggaatgtccccaatccttgccagcctgtgcagacaaataaagtcatagtgatgttaatattgttcttttttagatgatgcctgtcacccttccacctgccccattaccttatgaaagcacagcagagacagaaggagagccatatcattccctccattgttttcaactctcccttctctccccccaggtacccatgaaccaagttcgtcccttctccttcagcagaaaaaacaaaagcctttatagatatcaacttaggcagatctatcccttgtgagtcaccaactccatcttccctgtcttatttaggctcagccaggcccacgctgctacccatttatgaagttgcctggttttgctgagctgataaccgtaagggaactgggatgctgggatgccatcagggcttactggagattgggatcatcagctactgtagatgatcagcatgaggactacccccagtaaaggggtcacagtagcaggtagaggaatggctcttaagggccgtattaacacatttcagcatgatcacctgttggaggagatggagctcaaaatacataaggtgagttggccaagaagacactcccgcttgtagttgagaggaatgtattcatttctgtggccttcaatacggaatggaggttattcttagaccttcagattttcgagggcaagacagggcagggagtcwtggaatccagatggaagcaaaggcacaccatcctcttcacttggacttcagaggaaataggatgacagaaaacacgggcggtgatgtagtttttgtacagaatgtgtcatgttttaatgaccaggatcctctgtgctaggtatcagcaacaagacactgtttatgacctcagccactcttgactttctacttgaaacaggaccccaagtcattcattctggaatcaaagacctcaaggtcttgaaaacaacacagtctggatttgaaggtttcatcaaggaccagttcactaccctccctgaggtgaaggactgatgctttgccacccaagtgtactgcaagtggcgctaccaccagtgcagggatgtggacttcaaggctacctggtatgaacacgtgcatgtagtgtctactcttgtcccaggggcccagacttcatagaatcttagatgtaaaagagaaacttagaggccattcaactcaacttcccactattcagaaatcccttctgtttattcaatttattaaattggtggttctcaaacatgcatgtgcatcagaatcacacagaaccagaaaatgaagcttgctgggcccatccccagagattctgattctgtaggactgaggtggggcccaagaacatgcatttcttgcaaactcccaggggatgcagatgatgccactggaccagggaccacagttgaagaaacacggcatcaaatgaagagaatatctggccttactacctcatagtgatgcagagagggctaaacgagggtgaccaacttgttgtagtttgtcacggacttcctggttttaacactgaaagtcccatgtctcaggaaacctcttggttccaggcaaactgggataattggtcaatctaggctaaactcaaaatgatatgatgttcacaaaagcattttataagttataaatgccttaaaaatattgttaactgaaataacagagagagattctacaaagataatgaatttatttaggaaaacacagggaatctgcaaatttgtgggctgcaggaaccataggcatatcctaagaggttgaagcaaggggaagcttttaaaagcaaaaggaaaaagtgtatgtaatttgttttcagacaaagagaacactggttatagtggctatcgcaggaattgacgccagctcattagtgaagactgtggcaggcaaatgttcttgtacatctggctagctgtccttgtgactcacgtcacgagccactgtttgaaaagtcctttgcaaaattgttgttacaggcatatgtacataagagcccttcagagagtctttgcaatagttcttacaggcatctgtgcctgagggccctccctcagcttcctggctttatttatttatttcattagcatctgacacaagtgactccattttgattctgacaactcacaatataaaggtatgattattgttatatcctgacagggagtaattaggcctctgaactttcagaacttgctttttgattaggtatctcattcctttgctaaagctcttttagaaatttctaccctaccataagctagaatctgcatgcatacccttcccccaccacccactcccacagctgtccctcccactagtgtagtttttctctgcttcttttattatgtgataggtttttaaatgcatgatgagaacgttacctcagtcttctttcccttttatttcaagtgctctccatgggcagcagcctgatgtatttatgttgaaaagagcttgaaattgaacatgccagaggcaggatagtactgtaggctgggcctccttctaaagagagggacttagagcatatcatgtaacttttaagctcaggttcttcttctctaattggggataataatagtacctacttcagctatattgagagaattcaatgacatcatcacataaaatgcttagcacagaaaaatctgtctaacctaaaaaacacagagtctggcacagagcaaacccccaaatgtaacaattcaatgagccagccaagcagagcagcaagatggtgagaatacttgggagtcttcttcttaggttcttcaaacatgacgggaaatttaccctaaaatgcccactgggccctggtgccaaactatgaagacagtctagtgatgctcaatatgtttgttgaatggtgtatgtgtgtgtgtgtgtgtgtgtgtgtgtgtgtgtgtgtgtaggggaatkggaagtgaggtgttttgtttttggcattgcaagatactaatatcttctaaaaacatcaataacattgttttctgggggacagacaggtcactgcttcttagcttcctaacacattactaaaattcctttcagtatcctcagtgaccttctttgtgttttagggacaccattcrggaccttgtcatggagaaatctgctgggccctatgacaaaggtgaatacttgacctctgtgcagaagaccctctgtgatatccaggtgctctccctgagccgagttcctgcggtaagttctgtcagttgccattctgaggactgggagaacgtgtgtcttctgtcagctctgagaaagagttgagagttaaaataagaaagtggaagacacatgaaaaatgacatctgttgttgttcaaaagcttgttatagcaagtgaaaagagagcaaaaatggaaaaatctgtctaacctgaaaacacaggcccctgttgtagtccttgagttttgttgaaaattctttgagtcccttcaacctgccactgatttaagcctcatagtcaggacacttgaatgccttgagggagaggggtaattagacaaaggttctgtgtttcagaagaaccagacaatgaaagatagatgtagagagatttcatccatccatccatccatccatctgtccatctacccacgtccccacccattcattcattcattcattcattgaatggtgattatgtctctggcagcatacgaaggatacaaagataaattagatagtcactaccctcaaagagctcatcattcagtgaatgaacaaaataagtaaatgaacaatacaatagagaaaagagtattatgaaagtacagagcaaagcacctaactcaggtaaaggagatgggttccgccaggttttctagagggaagggtgtttgagtctagaggttatctgagtttactctcaagggtgagggagcagggtaggtatggagacaagagatagcatgatacagtcgtttactgttgagggtctaccacgtgtgactgaatatatatgaatgaattatagtcattccatgtgcctggaaatgaggcaggaaccacaggagccagtcaagagggcctttttaggcttatttatagagtctgtaccttatcctgaaggcttctgggagccaccaaggggtttaagctggatgttttgtttcagatttgtactctagaaaaaacacgctgacagaaatgtgatgaatgaaaaggttgatggaccataggcaaggagacatgttgggatctatttcagaatcttgtaaagagagtctgggccatggtggggctggagaggaggagtatcactcttagacctggacaagagggactctggccatggctcagcattctacaggcccccttcaggccttcctctggctgtgcctccctccactaggtgaagaatcagtggggccacagcaacatactctgcagasgcccatgcattccccagaatttcctgtccaaatagccctgagactacttcgggaacgtgggcaaatctcttctcgagatctgtcttccagagggcgaatcatgctattggtgttcacccttaggcctgagagtaggcaaaggggcagatgtttgcaggaggtatggatggcacttgacatgcaagctggagtgtctacccctgtgagtccaagagagaaggtgggatgggccaggggcgaggggctggctcttcccatgctgccatgccctggcatggtactccatgccaggcaatgaggagaaaaaaagattctattttcactttcttccatcattcctaccttttgattaactagtcaattcagtggcataaaatacacacaggaaaacatgaaagagtatttatgtttctaattgcaatcacagttagagaattttaaattaatgcttggccttccaggttgttatgaagggtatatttgtcaagttagaagagtagaacatatttcacttaaaaaaattttggcttgattaatagaactttaaagtttttatacctttggtatgtgggtctccaattatactcttactgcagggcctataaatgttagatacaggcctggaaaggaaggagtggaatgaggaggaatttagaaggttgactgaccagtacctggaggccagttggatgttgaagaggtctcccaggtttctgacccgaggagccctttcttttcagagaaacagattttgtacactgaggggagaagagcagacccaccatctaatcacagaactagcaggagagaacagtgtcgggcagtggaggaacatcagagggtgtctccaagtcagagagagaacctgagtaatgggtgcgaggttaggggaggtgagggtagctggagtgacggagatggaggctcgcagctcctaatgtgatgcataccactgtggtttccagatagaagatatggaaatcagcctgccaaacattcactacttcaacatagacatgtccaaaatgggtctgatcaacaaggaagaggtaagaggtaagagaactttaaatatatttaaagcacatctctgtcccacccccttttgcccctttatgagcctgggatgataatgtcactgaataaaactcttaagcaactgttgctttggggaatatttatagttgccagtgattacagccctcttcaattctgggcctttcaatgcctgaggttggagtgccttcgaagtggatgagtgattatagaaggttggaagtccaagagagaaagacagagaaggaacagagtgtgcccaaggaaacagctttgagatctgcttctctgaaagtgccatgcaaggacacagcttcattattcttccatcatgaggcaatgaggagaaaaaaagattctattttcactttcttccatcattcctaccttttgattaactagtcaattcagtggcataaaatacacacaggaaaacatggaagagtatttatgtttctaattgcaattacagaggtaagatgtggaaattaattttttgaaaacaaccctttgtcttggagaaacayttctcctgtttttttgtttttttgttttttttttttaagccatggcagaatgttaaaccactcagtgtgtctgactagacagcctgaagtactgactggtgggttggtgtggtcagttcttgggagatcagaaccattcttccctcttggaccacattcaaaataagatttctcaatttgctccagctccccacacattcctattaactagaaaacattgtttcgagtaacttcttttagtatgtgttggggagtaagatagggaaggagccatctattagcatggctctgctcccatagactcatatcctttggcggataagggataatgaaggggttaaaggtcccacattctgcacctgatggcccagaagcctcacaatccttcgggccaggtacctcctttctgttttgcaagtaatgtgagtggcctctagcaggctttgaccaccatcagctgcaggtggaggctcgggagtcgcatctggaaacaaaggtcatgcttaggtgcctggcaaaggtgatctagattctgaaaacctccagggattcagttccagttctctgggaagcagagctgcccttaccttggtcccacatgctgtacatccagccacaaggagaggcagcagtatttactttagaggaaggaaaggacatggctaccagaatgccattaattagaatctgaagcctttttaaagccttctaacgggcaggagagcgacctgaaagtaatcctggccaagtccaccagaggcaaaacaaatggaccctacatagaaaaaaggatcaggtgtcatggctcaagcagtgcttagctcaggaccccaggcagagagaggagggctcctgagggcccccgacacctcaggtctgcactaatcccagcatgctggggggctgcgcccacagggttcttccctctaggaagtcagactygcagctccctcatggagcccagctggggacttggagtcaggaaggcctaagttcctttgggtcagggctctacrtaaaggcacctgagtggctgaacaagctgtccttgygtctgtactttgaggatgtctggagccactcttggactctcacccagcagatgtgtacaaagtgaacataacacatgagaaacaggaagttggacacattaacactagcagagaagtgacaaatgacagggtgggagggtggaagaactctaaaagcaccgctatctggagccatttagaattgagtgaacagccctgcagacctcagacacttctgaggccatggtgatcttacagcattggacaatgactcatggatgaggtgagtcaccaaggaaaggtcaattgtgttcaatacactgcatttacaaagcagggatatggaatgcatcttagaaacatttatatctcaatgattaacatttttcaaaagcttttaaattttctaggaaattgactcatctctcaactattgccagaataataaggcattaccatgcttgaagtaactttagtggaggacatacacattttcctgtttagtaagttgttgtttttgtttttaatattgagtcatagaaaggaggagagggctattttaatgtcctttaaattaccatgtggtttttctacaggtcttgctgccattagacaatccatatggaaaaattactggtacagtcaagaggaagttgtcttcaagactgtgacattgtggccaccaataggagtccactctcagctgaggaattccttaagtcatttgtgatgctggagatgatagcatgtagccatgcaaaatttcacactagtatattgatttatagtgttcactttcctccaatatgaaacagtttatttcttctacacctagctcagcaaggcattctgtggattaccttattagtaattataacaggctttatggctataatttactttaaaaatgctgagcagtattagaacagttataaatcaatatttctttttggttatcttatgccttcctatcttggagaagctttagaatcaattcattaagaaaataatcatgaattaatgagtgtgtcacatcaattaatttgtgcacaggtttaagaaacaaatattgttttcatcctactgatgcttctaagtaatgcagaaaatgaaataaaattatattgaaaaatatcaccattgttacttcatttgactgaatatttgattttaagaatgctctagcatatgtatcattgattatttatttccactctgatagtacttctgtgatcttaatgtttgattttaaactttttcaatccttagagaatatttagtacatatgagggtactgaaaaagagtagaaattgtttttctttgaataatgcatcccttatgtgcacaaaacgtcacatttaataaatgttaagccaatatacagatgggtggatgtacatttagaaagaagactagagagtatagatgtgaaaatatcagcaatgacaatttctggatgatgagattatgagtgattttcatttttcaccatgtacttttctgaatcttccaaatatgaacaattattccttttatagccagagaaacaaatatagttgatgatttaaagatgtttacagatttgagggctgattatatcaattgactaacactaccattgtatacatgtaataaagcttcacaaattacagctttagaaacccatgatgaaaacttgtccacgttaacattctgggtaaccttttccattttaaaaaatcttcatttaaaaaataaaatcaaatctccatttttaagaattgctttcatatgagcccttagtattatttgttaatacggcttcattcacctttatgatactgctacttaaggttgcatggtatagtggttaattgcacactcatttaaatcctggctccacctctcagtaaatataagacaagtttcttcatctgtaaaatggaggtgaaaagagaacctaccttataggtcttttgaggattaaatgggttaatgcttgtaaagtgctatggtagtatttggcctgacacagaaatttctatatacgtgtgtgttgaatgtaataaatgtcctgtcttcttttcgtttgttattaggcccacatagaaaagctgtcattggcctccgggtcaggcaagagatgggaggtgttcagagcagcaaaccctacaagatgttggaggccattcacaagcaagcgcctgcttggaaaataacgtgggataagaacaatgaaataatttgatgaggaaagtgttgtgctacattgaatactcacgtcacaaaatgtgcttctacattatgtaacttacatggtcaaatgactggtacattttattcctgtgctaatttgtcaattctgttccaagaggaaagagtctaacatgacttttcaaaaacaaaacaagacaaaacaaaacaaaaaccccgacttaattaggcctttcttacttgatgttctcttattcttgtaagttttagaaacactgtatttgcttcagagaagaaacccatgttagagcagaatccttagaaattgtggcccatttatacatatgtgcattttgcttctccttagctcttagcacatttactgcaatagattgcaaatgagctattggatgttatatcccaggtatgtggcaggaaagcctgtagtatgtgaaattttcaaggacaaagttcctgttttgtgaaggatgtttccttcttagaattgtgaacgatggggctgaaaaccagctttgggtttcacctgttcctttcagttcggcagacaggcaggcagaactgaactgtaaacacttgtgaggcaatttgttttaaaaacacttcatgattttgctaggaagcctccagggattcagttccagttctctgggaagcagagctgcccttacaacactcttctgtctcctcactcactctctctgcttaccccaaccctatctcaagtactttcatggaggaatcgtgcaagtagttccaagcccacgtgctgccggggaggcagtttccatggcattcaatggagcaggctgtcatgtggggcttgtggttttggtagccaagattctgcctgaggtttgtttcatattctttaaatttcatctcataattttcatagtgatagactcagaaaatatatctccttccttttccttttcctttttagagtcagacttaagttcataccattccttatttttagacaccaatgttttccctttcttttttctaccccaatatagaagcgtaataagtcttttgaggcagcattttattgatttgtcattgtaacagaatttaccttcttcaataccggcagattttaactagagaaatttgaaattttcctaacctctttatactttgtccagaaggagcgtttcctttcctccggactctgagctgtgtggagttggccctttgcagtcgcctttgctagacctttacgagttctgctttcttgtctgaactcatgaggaaggcaaagcttctttcccaaagagattgacttgaagccttctaaccagacacacacaggaccttccggcttccgcatacttgaaacttattctctgtatgtttcacagtcttagcacttgtttctcttagagcttagctacctgtcattcttccatttgcccaggctccctctcagaaattcttagttttgtggagcctatcaagaccctattgagaatatgatggctatggaccttcttcccagaaaaatgctcattcatgtctctacaggtgcctctacctctgctaaggaagtagttcacacattatctttaaagtataaaggattccaacagaaatttgccacatgaggaatatattcaatcaaacttagaaagtatactgctcacctttacataagaaagaaataaacgtagtattagtttcctgaggctgccataacaaattaccataaacttggtggtgtaaaacaatagagatttattccctcatagttctggaggccagagtccaaaatcaaggtgtgggccgggtgctacttccaaagactccaggggagattctgtttctgcctcttccagcctctcatgccttcaggggttccttgactcacagctgcatcactctagtctctgcctccatggccgcattgcttcctcctttttctgtctggcaggttttccctgtatgactcttataaggacactggtcactagatttggggcccacctggataaccttaagacaagatcctcaagatccttaatgacatctgcaaagatcttttttccacgtaaggtcacatttgcaggttctgacagtgaaggcatggtctctgttttgagacccattcaacccaatacaccaagtaagaggtcagtgagctgtttaagggcagctcttctggtgtatgtggatcttagctatacataagctactcttcccttcagatctgggggatggtgccatacccctcctggtttgatcacttgtcacatagatttttataaaagggtaaagagcacggactttggatgcagatagtactaaggtttagactgggctccaccaatttctagttgtgtgatctcgagcaagtaatctctaagcttaagctctcttgtttatgaaatgggaataataataacccctacctcacagcacagggtagtgaagcattaactgagattagagctagaatgcctttggctgcaagtaactgaatacctaagagtgtcttaaacagaaaggacatcatgcttgcttcagaagtttaagaagtaggctatcccaggatggaattgctaattcagtcatggcatcaggactcaggctcattccaccctttgccctgctatcctcagtatatggtaatgttttctctatggccacaaaatgggggataaagctcctgttaaagatgctctggtgccttctgcatgacaatctcagggtcttactgtatttttcatggggatgctgacctgtgatactaagagttccaggaaggagactcgaaaatgggattttggagctggatcacccgctggctcactagcaatgagcctttgtaatactgtaatcacacaattgttaaaaccgtctgcagaggtgaattgggataagatactggagaaaggaatacattggcaggggcaaaatctcaaatgcttgagaggtgtgggggaaacggttattataagcactatggaatttgaatgggtgtcactggggaccattagtaaagaaaggcaatgaaaaattgaggatgattaataactaatataaagtgagcatgaaagcaagagggcctccttggcaacatataaagacagtatacatctagatggcagaaaaagcttaggagacccaggtcttaattattagaatagcagagctccaaggaaaattgaattctccacccttgacaggtctgtcacactaaggtcagggtccagattgatgcacttgaaatcttgaatcctcagctttacctgaattctctgtgcctgcagaactggcctatttctccttgttaaaagctagcactgcccctcttgcttgaagacaatgcagaagcttctgcctacaaggaaacacatgcctccttgtgatatatccccacctcctgaccaccagatctataaatagggtaagtcacatcgtacaccagctagacatatgctgggcttgttaaggaaagaaggagaccacaggccaaaagagtggcaaaggcccagctaatatatataaaagctggaagattatacatgggtgctggataaagcccatctaattttcaaatcaagaagcaagaagagaagcagtttccattcacatggatggacagttgcatacatttatggtcttgccccaggatgacattaaattttctagcctttgtatatgggaccacgatcatcaggacattccctgggacattaaattggtccattatacccatgagactatgttaattggactgaatgaccaagaagtgacacttgtactctggagaatggtagataaacccatcaaaggcccaccacattagtgacatttttagcagtctggtggtctaggacaaggattggtgaaatctgtcccaccacttgtttttgtaaataaagttttattggaatacagccatgcacatttgcttatatattgcctatgactgttttcatgttataatggcaaagttagtagttgaaacaaagactatttggtacacaaagcctaaaattttttaccctttgaccctttataggaaaagtttgatgagggtattataggacatcccttcccaaataaaggacacattattgcatctcaagttttctaccactaggaagaaagcacagtgcttggtattctctttggttttggaagactcatattccacacatggtaatactgctccaacacatttactgggtggcaaggaaggcttccaactttgtgtggggcccagagaagtaaaaggcactggagtaggtccagactggatacaaatattccttctgcttgaaccacgtgaatcagcaaattctatgctattagagatgtctctgattggggaagatgctgtgtgggtccgtgaatggacaaaaacacactcacaagtatttattctctcagtcaacaataacaatcaacatagaacacttctgtgaccaaatgtttggggatttctctccaccaacaagcaagcaatcaattctgcagcaggcaccctttaagtatcctctaattccattctattcttactctatctacctagagatagcatcagatcccacaggttaaggaattaatgcccaagactgccaccaccgccccactccatgcagctttcagacaccaatctcaagctccaggttgttttacctgtgcttctgaccaactggctataaatcagggatcccacacacacccctccttgggttagattaatttgctagagcagctcctgaaactcagggaaacacctacttacattcagcaatctattataaaggatattacaaagggttcagatgaaaagatgcatacggttaggtatgggggaagaggcacagagtttccatgctccctccaacccccaggtgcaccatcctctaagagcctccataggttcagctatttgaaagcttttcgaacca

SEQ ID NO: 93816 - DNA, 87460 bp, Homo sapiens
  misc_feature (1)...(87460): n = A,T,C or G
attcttaataattttgaactgcattttcatttgcactgggccctgcaaattacacagccagttctgtctacagatgatgcacatactaattatatatataataacatatatgtaagatatatattatatataatatgtacattatatgtataatctgtgtcattaaaattctttgtaaatgttatttttttcttttttttgttcagtctccatagagactgtcaaaaattgcgaatgccaactatatttcaagtcattatggcggggtattgggaaaagttttcaattagcagtaatagcacctcggataaacctcattggctacgatactgccactgcacaaagctgtaaatgttatttttaacacatactatttcatcatatggaaacataatcatttatttaactatgtccctattttgttttaaattttaaattttttaaattttgttttaaattgtgtactgttataaataatgataagaaacatctttttacgttaattaaaaatagatttctgactatttccttaaaataacatcccagacataaaactgaagggataaaaggatatgaacattgttggacctttgtatttaaattgccagatagcattccagaaatattaatattatcagcagaaagtaagaaattctcttttcttactcttggtggcaaagaatattataattttaaaatatttggtaaatgagtaagtcaaaatattatccaattactttaatttccatttatttgactaccagtaaagaaggttttaaaatatacattttattagtcatttttatttcttcttgaaattgtccttagactctaaactcctcaacatgatttttaaggcacttggtgtcctaccactccgggtttatcttctaccactcctctccttcccattccccaccctattctaagctctagccatacttaattttatttaatatctacaatttgtcatgctttctcttgcttctggcactgtaaacattctacatactatttctggatgtctttttcaatatctcttgtctggttaatttctatttgtccttcaggtctcagcttaaacatcacttccccagaaagcctcccccacccccagattaggctgagtgccctgctaggagctcccaaatcatcctgtatttttcttcttcttcttcttcctcttcttcttcttcttcttcttcttcttctttcttctttcttctttcttcttccttcttccttcttcctcttcctcttcttcttccttcttccttcttcttcttcttcctcttcttcttccccttcttcccctttttcttccccttctcctccttctcctccttctcctcctcctccttcttcttcttccctttcttcttccttcctttctttttctttttcctcctcttccttcttctttctccttattcttgttcttcttctgtcttcttccccttctccttcttctagtacatatttaattttgaaatgattttagatttaaagaagagctacaaagatggtacacagagttcccatgtacccttcatccagcttccccagtgttaacatgttacataaccatggtaccatgatcaaaactaagttatgaacacagttatgatactattaactacagactttattcagatttcactaatttttttcattaatgtcccttttctgttctaggatctaatcctggatagcatattgcatttagttatcctgtctccttagtctcctgtacttcatatcttatagtgcttaatgtattttattacaatttcctcccattctagaatataagctctgtgagagtaagggctgttttttaaatttttcatttatttttatttttaaccattgcaacctcagttcttacagtcgtacagtgtccatagtaagcaggtggtttatatgactgaatagaaagcagaatttttccttaaagagtttctcagaaaagagggcaacaccttccatttaagttcttacgaaatatcctatattatgttacattctctcaatttttttatttagagcaataaagtactgttcaaggaactcacattagcctgaaaggacctcatagaatgcatggatgcttgtagagagcatctattggaatcagtaaaaaacggagacaaagacatttaaaaacctttaataatctgtgttttgggggctgtgacctcacagaggaaagggctggatgcccttgtaaacaggtttgtttgtttggttggttggttggttgggtttttttgagacggagtttcactcttgttgcccaggctggcgttcaatggtgcgatctcggctcactacaacctccacctcccaggttcaagcgattctcctgcttcagcctcccaagtagctgggattacaggcatgtgccgccatgcccagttaattttgtatttttagtagagacggttttcactatgttgatcaggctggtcttgaactcttgacctcaggtgatccccccatctcggcctcccaaagtgctgggattaccagcgtgagcctccatgcccagccgtaaacaagttttaaaagtagatggggagccaggcatggtggctcatgcctgtaatcccagcattttgggaggccaaggctggcggatcacttgaggccgagagtttgagaccagcctggtgaacatggcgaatcctcatctctactaaaaatacaaaaattagctgggcgtggcatgtgcctgtagtcccagctactcaggaggctgaggcacgagaaccacttgaacacgggaagcggaggttgcagtaagccaagatcgtgccactgcactccagcctggagcctcaaaaacaaacaaaacaacaacaaacacaaagtaaatgggggaatggtgggaaagagatggaggccgaagaacaatgctgattacaaagttcacttcaaaagcaattctgctaagtaagtggcttacttccctggtcaaagcaactgttatctcttgcctgaaactactgcaacagccttctaaatggtgtctctgaacccctcctatccatctacaatcttctgtccatgaacatccagagtgatcttttctttttctttttttttttttttttttgaggcagagtctcgctctgtcgcccaggctggagtgcagtggcgcgatctcggctcactggaagctccgcctcctgggttcacaccattctcctgtctcagcctcccgagtagctgggactacaggcgcctgccaccacgcccacctaattttttgtatttttagtagagacggggtttcactgttttagccaggatggtctcgatctcctgacctcgtgatccgcccaccttggcctcccaaagtgctgggattacaggcgtgagccaccgcgcccagccagagtgatcatttcaaaattcaaatctcctacttaaaaacctgtaatagatttgcaactgatctttgaataaaaatcaaaattactaatgactttaaaaaaaaccttgaatccttagtctctctctctatcttttttttttttttttttttgagacagggtcttgctctgttgcccaggttggagttcagtggtgtaatcatggcccactgctgccttgatctcctgggctccagcaatcctcacacctcagcctcctgagtagctgggactacgggcatgcaccccatgcctggataattttttaaaatttttttgtagagaagtctcattatgttgctcaggctggtctcaaactcctgaagtcaagcgattcccctgacccggcttcccaaagtgctacgattataggcatgagccacagcaccgtctcaagctttccttaatggcctttgttagaattatagttataactataaactctgtaagggcaagatacacgttaatttttgctcacctttgtctttccaacagctagcaaagtacctggcacaggtaatttgtaagcacttatgattatttgaatacatgaacaaatgagatccttcattgggaaatgaattatctacccagtggtctaagagagtaagctttaatatttgtactttttggcttctggaactccatactttactctgagccctggcatcatgagaattgatcatccagtttggttaagaccattcagctctaccattctggaatcaaatacctgttcagcttacatgatgccttatttgaagatattcatttctaggtgtccacatcaaacaggtcatcaatgactgacatctgctgtctgattctctgaaaagtccttcatctccacctaagagagcaacctgatatttaccatatgagaattcttcccctcagctctcttggtcaccaacgatatgggtcgtttgtaggttctccaagttcttctcatggttaagggcatttcaggtgccctgcttggaaatgatagctcagtttctagtatttgtagagaaggaacataaaacttggtgcagcacatacttcaagaaatcttggagaattaagtgttgcttctcagtatctcactccagtacagaactccagttctgtagctttacacctcatgttgtaagcatgaagagtaacttagagttatcaggcggcttcatcagttatatagaaaaaaatgtatattttccttctgtataactgatagaatccagctctctgtagtatgtactttctataatctgtttgtggagtaaagctgagttaatagcaattgtatctcacacagatacattgctctgtgtcatgtgtcttgcctattacttccttggagaaagttatgaaaagttgtgtcctgtacagagacgccacgatgctctacatcttccatgctacttccttactccctggtcacaggcctaactcagagttctaatcctactgaacacttcattgtctaaatgccccatttacatcttcttcctctctccctgaaggctttcgtagattgtgtattcaaaagatcactgaatcaaaaagaaaatcaccattctttattttttttcctggcacttataatcatccaacataatacacatattttgtttacattgtttattgtgattcccttcactaaaatgtatgcttcagggatccaggaatgtctgtctgttttattcgcagtagtagtattagcagttagtatagaatctaaaatatagtaggtgctcattaaatatttgttgaatgaattaatgatgccaaattgatataagaaaggatattcaagcataactttaccatgcacagggtttttcatcatttcaaattgctgaacaaaattctcaaagttaaaaaacaaaaacaaacattactactttggaagagaatgtaggcatttagaacaaacaagatgtagaattagggaatttatactaaaaataccaccgaagagtgagcacttggagacaatctacatgtatccatatgtcacacatgtgcctgggctttggttgctagaaataatttccctgaataatttctggggaggggatgtgtttataaatgccctccttggcagagcacggtggctcacgcctgtaatcccagctctttgggaggcggaggtgggtggatcacaaggttaggaccatcctggccaacatggcgaaaccccatctctactaaaaatacaaaaattagccaggcatggcggcactgtgcctgtagtcccagctacccgggaggctgaggcagaattgtttaaacccgggaggcagaaattgcagtcactgcaacccagcctgggcgacagagtgagactccgtctgaaaacaaacaaacaaaaaatgcaacaaacaaaaaatgccctccttgatctgcttggctctgtcttcctctcaggatctcggtcacttggctttcttccttgccagaggggtattaggagatggtagctgagtccagggttttataaccaagggaatagggagaggcaacctcttggtggtgaggactgggctgcagcagcagtttccggaacctactttctcatgactgaacgtatgcaggctctggcttccccagtggcttcttggagaagtcaggtaacgactcatgggagatgaattatttattcttcttctgtgtcctccaacagattattgagacccatacagccattccagagatgttctcatttgatcaggcaaccagttgtgtttctttgagaagctgtagccccgattcctccttctctaggatggtactcatcttcctccctctccccacatacaataaaaatgagctctatgagcgtttttttaggttctgttttccgggtaacccaagctagagcctagagaagagggaagtattctgaaacaactcactttcaaaagattacatgaaaccacaggcatgtcttagggttcaaatcttctttcatgtgccttgattcaaaactgtatatttctacttcaatatagttaagatattaatctgtagcaaaagtcaaataaccgtaaaatgaaaaactggtagaacttcaagtgaagactggaatagttggagatgagttgttgtagtcagaaagacccttttgtcaaattcattcattcattcaacagaatgccaagtattaatctaagtgctagagacacaacagtgaacaagacatatggatccttctgaaaggagcttaaaaacaatgtggggagacaaatgataaatacaaaaatactcaatattggtcgggcacggtggctcacgcctgtaatcccagcactttgggaggccaaagcgggcagatcacttgaggtcagaagttcgagaccagcttggtcaacatgtcgaaaccccatctctactaaaaatacaaaaattagccaggcgtggtggcacgcacctgtaatcccagctgctcgggaggctgaggcaggagaattgctggaacccgggaggcagagattgcagtgagctgagatcgtgctaccgcactccagcctgggtgacaaaaagagattccgtctcgaaaaaaaaaamcaatataatatcaaatagtaatcaatgattagaagaaaaataaagaagagagcatagagagtgatgagacactcttttaggtagcatcatcaggaaaggcttctctgggaaggaaacttaagcagagatcagaatgagggaggtatcagtgtagaagtctatgaaatagcatctactttagccacatatactcataggttgtttgtcagattcgctttgaattgagaataaataaatagagaagagaaggagaaaagtttttgcctttcttcttctttttttttttgtcacaaaaacatctaagcctgaatgtctcctaaattattctttgtggctggttagtcaatttagccaaagttgaaggtacttcctccttcttgaatgcaaaattacttctttttttctttttgtttttttaatagagacgaggtctatgttgcccagactggtcttgaactcctggcctcaagagatctgtctgcctctgctaacatggtgaaaccccgtttctactaaaaatacaaaaaaaaaaaaaaaaaaaaaattggccaggagtggtggtggacacctgtagtcccagctactcaggaggctgaggcaggagaatggcatgaacccaggagcagagtttgcagtgagctgagattgcaccactgcactccagcctgggcaacagagtgagactccgtctaaaaaaaaaaaaaacatctgcctacctctgcttcccaaagggctgggattacagatgtgagccactgcaccctgcccaaaattacttctagtcttattctagccctacactctgtctggtattattgctatttatttgcacatctcatatccatttaatatggcatatgatttttcttttaagaggcagaggctatgttgctctgttgctatgttgcccaggctggtctcgaactcctgggctcaagggatcctcctgccttagcctgccaagtagctgggactacaggcatgtgccatggtgcctgactaatgtggtatatgttttgaaagcaaagtctatatatttttagcattatagttcttgaaatatctagtacagtcctgtcacaaagtaaatacttatttgttgaatttaaatttagacagagtttcactcttgttgcccaggctagagtgcaatggcatgatttcagctcaccacaacctgcacctccagggttcaagcaattctcttgcctcagcctcccgaatagctgggattacaggcatgcaacaccatgcccagctaattttgtatttttagtagagatggagtttttccatgttggtcaggttggtcttgaactcccgacctcagatgatccgccctcctcggcctcccaaaatgctgagattacagacgtgagccaccatgcccagctgattttttaaaaaataaaatatctggactcagacaagtttacctaacctctcagagcctaagtgtaaaattgttattcctgtaaaaatcagaaataataatcatttgacagcatttattggtacaagaaaagagaacygggtgtggtggctcatgcctataatcccagcattttgggaggccgaggtgggcagatcacttgaacaaagagtttgagaccagcctgggcaacatggtgaaacccagtctctacaaaaaatacaaaagttagctgggcctggtggtatgtgtctgtagtcccagctactcaggaggctgaggcaggaggatgcttgagcctggaaggttgaggatgcagtgagctgagatccagcctgcactccagcctgggtgacagagtgagaccctgtctcaaaaaataaataataaaataaataaataaataatctagtacaggaccagatacatggtaatatttaataaattgttggtcattcaatcaagaaattaagcatttttaaaggcttgatctgaaaccaggttatttgttcatgtaaagaatgtggtagttatttgttaatagcatttgttgttagttatttcccataaggaaatgatgatgtcatcacaagatcttttccttaatcagctttattaaggtataaattaattataattacatataattaaatataacttacatgtaattaaattcaccaattttcagtgtataatttttgacaaatgcacaccgtaatcagcatcacaatcaatatgtagaatatttctctcactgtaaaaagttcccttgtacctctttgaaagcaattttccccttctaccctcagcccctggcaaccactgatttgttttctgcaaaagatactttttactttataagcaaatatttatgagggccttccatttttgtttgttttttttgagacggagtctcactctgtcgcccaggctggagtgcagtggcgcgatctctgctctctgcaagctccgcctcccgggttcacgccattgtccagcctcagcctcctgagcagctgggactacaggcgcccgccaccacgcctggctaattttttgtattttttagtagagatagggtttcaccgtgctagccaggatggtctcgatctcctgacctcgtgattcgcccccatcggcctcccaaagtgctggctcacgcctttacatgcccggtatgagggccttctacttagaagtccttgagctagatagatacttcatagaatacaaagataagtaagactcagtttatgtccttaaatagctaaaaatctagtctagtcgtatgtaattttgagattactctgtctacacataatatgggactgaatttcaatatgaattatgcccactaaagaagaataaggaagaaaaaatattgtaaatggttcctgaacttttagaatagtaaacaaaagattcatgagtgccactaattaattataatttattttaaaaggcacaaatttatgattacaggatttccagataatttttaaaaagtaaactctttaaaattaagtaacatacatacaggaaacaaaagtgcagaaatcctaagtgcacagcttgatcttttcagattatttatggcaacctagaccagcactgtgtgaccaatgcagtaaaaagacaacatcctgaagtcttatggtttagacagaataattacatcactgtaagaaagaaagagataagagaataatgttctgcaaaggctcacaaagaattgtggggataagtagtgagaaaatggatggcacattaaaattcatgaggaaatgccgtttaacttctatgaataacaaagcgattattatgcaggatcaggtttttctttcatcattacagaaagacacaaaatcattatcgtgatctgccatatgtttttcctttgttatcagatgctgggacaggcctattaaatgttctgtgttacccaggggaatggtcagggcggtgagtaatgatggtcacgatgcatatggttttctatagtcctaattgtcagtgcatttagatccgaggaaaggaacaaattaaaaagggcagaatggctgggtgagcactttcttgtgattgcaaagaactgggtctattcttaccctttctgccccttgctttatgctttacacctgccatttccagactgacaaggcgctttggtggcgccttggtcaatgcaatggggactacaattaatttaaaaaggggtaatgcatgcaaatcgcagaaaaatattaacaccaggagaaaaaacacagtgtggaaaaataatcctacaaaaatgtttatagtggggtcaaacatttacccacattataattccaatacatgcaaagaaaatactcctttttaatttctatcatggacctaatttttccttgcaagcttccaccttgctctataataagaggaaaaaaaccaaccaaacgttaaacttgtcattccaggcaacaatctttttttagtttaaatagtttattttggccctgcatggtggcttacttctctatttaatcccagtgctttgggagaccaaggaaggaaaatggcttgaggccaggagttcaagaccagcctgggaaacatagcgagaccccgtttctagaaaaaatttaaaaattagctgggtgtggcagtgcatacctgtagtcccagctattcaggaggccaaagcaggaggatttcttgagtccaggagtttgaggctgtagtgagctatgattgtgccactgcactccagcctgagtgactgagaccctgtctcaaaaaatataaataaataaataaataaatwgtcacttttgaataacamattttcttttggttaaatccagaatctttcacatttcttcctgcttccctctgcttctgttcaaaataatgtctagctgtacagagggatttgtgacctagggtggcaaggagaggaagggcctcagatctatgtgggggtctcaggatcaaatttgtctctataccagagtgcatgtttaggggagccagagatcaacccccttttgctcttagtggcctcttcagctagatctagaaaccaaattgacaccaggcagattaacaagggaaaagcaaacaaattgtattagttctacatgtacatgggggtattcacaagagcatgaagtctgaataagtagccaaagcaagatgcttttgtatttttagacaaaaaatgttacatttgaaaagaaatgacagaacaaagagtatctggccaggggcagtaaattttctaggggagtcactcggacatgtatggaggatgtaaaacaggtggaagaaaagggttacttcgtcaagtacatttattcgatccattgcagcctccaattctttttttttttttttttttgaaatggagtctcactctgcaccccaggctggagtgcagtggtgcgatctcactcactgtaacatcctcctccaaggttcaagtgattctcctgccttagccttccaagtagctgggactacaggcgcccaccaccacgcccggttaatttttgtattttagagacggggtttcatcatgttggccaggctggtcttgaactcctgacctcaggcaatctgcccgcctgtacctcccaaagtgctgggattacagtcgtgagccaccccgcctggcctgcagcctccaattctaagtctctggtgataagggtttgctcgctctggtatgcagagggtgcccctcccagaggcatctgtatctcttgctgcatgaaattacaatttctcaactgttttcaatttcaaataattactataccaatccggaatattttgggatggcacattcttcactccttcacatatctctgactaagttatttacatagtagaaataagttctctattatatcagaaaagttgcaaaagtaatttatttctattgttttttatttaatgttttttatctaccatgtatttactttttttatactttcctaccttctattgagttactgatttatttttcacccttactgacttgaaagttatgttaaaaaaattaacctttacttattatcgattaaaaaggagtttctctgataaaaaagtggggtttcaggtttataacgtaaagctttatgtgatatagaaaaatgtatcagtaaacaaagcatgttgttttcttacaggcttacacaattttgaaatcaatcttttcctcattgtaattacatagaagcttaaaatttttttaagtttgttttatccatttttccttgtatactttacctttggtggcaagttcacagttaccaagtatattttcttcacagtggtaaaattaacaagaacttacttttgctttttttatttataagaacaatatcacttccttttactgaatcaatgtttactcttaaatttgtaacatgcatggctcaacttggtctaagatactgtcagcctcttttgaacagtatacaatctgagaaactttattcctcccattcttcctgttattatagtaatttggtttcaccttttcaaaaaccctctcaacttagagtattaatttatttatttttatttttgttttattttttatttatttatttttgagacggagtctcgctcttgttgctcaggctggagtgcagtggtgtgatctcagctcactgcaacctctacctcccgggctcaagcaattctcctgcctcagcctcccgagtagctgggattacaggtgcacgccaccatgcccggctaatttttgtatttttggtaggacagggtttcaccttgttggccaggctggtctcggactcctgacctcaagtgatctgcccgcctcagcctcccaaagtatagggattacagatgtgaaccaccgtgcctggcctgagtatttattattattgcttttattttgttttattttgacacagggtctctctctgtcacccacactggactgcagtagcataatcacagctcactgcagccttgacttcctgggcttgagcagtcctctcacctcagcctcctgagtagctgggaccacaggtatgtaccaccacatggcactaattaaaaaaaaaatttttttttgtagagctggatcttgctatgttgcccagactggtctcttaactcctggcctcaagcaatcctcctgccttgggctcccaaagtgttgagattacaggcatgagccattgtgcctggtctattattgctttttaacagttaatattaatatagatttaccagtatttttactaacttctctgttcaccattagtacttacagcgggtcctttctcctgggtttaatttcttttctttctctctctctctctctccctctctctctctcctctctctctctctctctctctctctctttctttctttcgcaggcagagtgggcctggtgcagcagggctgaccaccagtttactttctttcattttaagtgtatatttgtgttttttttttttttgagacagagtctcgctctgccgcccaggctggagtacagtggcgcgatctcggctcactgcaagctccgcctcccgggttcacgccattctcctgcctcagcctcccgagtagctgagactacaggcgcccaccactaagcctggctaatttttttgtatttttagtagagacggggtttcaccgtgttagccaggatggtttcgatctcctgacctcgtgatccgcccgcctcggcctcccaaagtgctgggaatatttgagtgtattttttaaagcaatgacttgttactatatattattttagtatttgtcagaaaatatcttgaattctctcttgaatgttagtttgagtacagacttcttgattattttcgcttaacaatgtggagatgcccatcattgtattgtcttttccatttttgttgagaaatctgctgataatgtgttattgttccttcgtaggaaattttttgtttgtttgttttttgctttttgagacggagtctcactctgtcgcccagcctgggccacagagcgagactccgtctaaaaaaaaaaaaaaaaaaaattagccgggcttggtggcgggcacctgtagtcagtcccagctactcaggaggctgaggcaggagaatagcctgaaccagggaggcagagcttgccgtgagccgagatcacgccactgtactccagcctgggcgacagagcgagactccgtctcaaaaaaaaaaaaaaaaagaatttctctctttccagcgtggtccatgtttcattttggtcaggtgtatatggtttttaatttttcctgtctggggctcagtgattatctactcaaatattacttctttcctattcaaatagacattttccattactctggaactccttttagacatctattgaggcttcccatcccatcctccatttcctcacaggatactgtacccacagaatagctttgcattttctcgggaatttgcattccctcttcatttctggcatctgaagattcttatattttatcaagcatatctatatttttgttgcatcagatgagactggatcatccagatttaactcaccagactgcttgtagtcccatgcagcaaaaaaggtaaaatttctgtctaatttacaattaaatgaagaggtatagctaacttaatatgtaaagtaaaaattatgcatctgtgcaaagtcttagaattatgaattaaaatgtcagcattttggtaatccctagtgtctagactgtttcctttttgtgtgtgtgcttactttataatgagattgtaaacccagtggcattgggtaaaccttagaggtatcttgtaagaattctgtttaattttgctttattgaactttatgtactagaagggaagcaccaaaaatgaaattttagataaaagcctactattgaagcaattgtctatatttaatacatagaaataaagttagtgaaacatcaatatgaagcccataaacagttggcggaaaaagcaatggcctagagatttgggaagctgtaccctagactttgctctgcctctatgctgtatgaccttgggcaagtcattgaagatcttaaagtcttggtttcttcatctctacaaagtggggatggcagtctctatagtttaaaattgcattattctagatagtgcagagatagacagtgtcatttgaaaatgtcttaaaatcctgatacttctaatggaataaaatgaaagggataaaaaccaagacatggccaggtgcagtggctcacgmctgtaatcccagcactttgggaggccaaggcaggtggatcacctgaggtcaggagttcaagaccagcctggccaacatggtcaaaccccatctctgttaaaaatacaaaaattagctggagatggtggcgggtgcctgtaatcccagctacttgggaggctgaggcagaaagaattgcttaacacccaggaggcagaggttgcagtgagctgagatggtatcactgcactccagcctgggtgatagagtgaggctctgccttgaaaaaaaaaaaagaaccaacatcatacaaattgttccttttaaatagggtgtaatgtttggaaaataaagtaaaaaaaaaaatcaaccaaaaaaagttgaagaaactctcagacaagacctatttcagattttaattgtaaattttaagagtataagtcccttctggcccggcacggtggctcatgcctgtaatcccagcactttgggaggccgaagtgggtggatcatgaggtcaggagatcaagaccatcctggctaatatggtgaaaccccatctctactaaaaaaatacaaaaaaattagccgggcgtggtggcaggcgcctgtagtcccagctacttgggaggctgaggcaggagaatggtgtgaacctgggaggtggagcttgcagtgagcagagatcatgccactgcactccagcctgggcgacagagtgagactccatctcaaaaaaaaaaaaaagagtgtaagtcccttccttggctaaaattttcacttatggaaaaaaatggtgctagaacaattgtgtgtgtgtgtgtgtgtgtgtgkatataggtgtgtgtatgtatgtgtgtgtgtataccttgacccataccttgtgccatgtaaaaacatcaactcaactaaacatgcattgcaaatctcaatgtaagattctataactataaaaatacttgaagaaaacattggccaggtgcagcgactaatgcctgtaatctcatcacttcgaggctgaggtgggaagatccattgagcccaggagtttgagaccagcctaggcaatgtgaaaaaaataaacagtctctacaaaaaaaagtacaaaaattagccaagcaagaggggagggatagcattaggagatatacctaatgtaaatgatgagttaatgggtgcagcacaccaacatggcacatgtatacatatgtaacaaacttgcacgttgtgcacatgtaccctagaacttaaagtataataaaataataataattttaaaaaaattagccaagcatggtggcacatgcctgtagtccaatttctcaggaggctgaagtgggaggttcactgagcccagaagttcgaggcttcattgtgtgatcgtgccactgcattccagcctggaagacagagagagatcttgtctcaaaaaaagaaaaattaaaaataaataaaggaataaataagaaaatatatgaaaacatctttgtgacattggattaggcaaagatttctaagataccacaccaaaagcacaatttataaaaggaaaaaaattggtaaattgaactttatcaaaattaagaactttttgaaagacacaattaagaaaattaaaagacaagacatagactaggccaaagtatttgcaaagcatatatctgacaaaggactagtattcaaaatgcataaagaactctcaaaactcagtaagataataagcaacccttcccacacacatacaagtgggcaaacgttttgaacacacactttatgaaaaagttgtatggactacaaatcaataccttttgtaaaaatatgtttgatattgtcatagaggtatgcaaattaaaactgtaataagatactgttatcagtggaaggtagtccaagctaccggtggcaaatccgtatgggtctacggcaacctcagttcttgcctcctcagaacaaataattcgactgaggggcataaggcagaaaaaaagatcgaggcaagtttcagagtaggagtggaagtttattaaaaagctttagagcaggaaagaaaggaaagtacacttggaagagacccaaatgggcaccaagaaggtcaagtgcgacatttaaccttgatcttagaactttattttattttattttattttatttttgagatagagttttgctgtgtcactaggctggagtgcagtggcaggatattggctcactgcaacctccgccttccatgttcaagcgattctcctgcctcagcctcccaagtagatgggactacaggtgtgagccaccacgcccagctaatttttgtatttttagtagagacggtgtttcactatgttgtccaggacggtctcgatctcttgacctcgtgatctgcccgcctcagcctcccaaagtgctgggattacacgcattagccaccgtcccaggccaatcctagaactttatagactggcccacttctggtgtctagtacccctttcccatgatatttcccttagggtgggctgcccgcaggcgcaataccctctatatgcttgggaggtgagcacgcacagtgtgtttaggaagctgtaggcgtgcccatccgaagctttctttccttttccagtggagtgcccaggaaggtcatactccgtcattttgtttcccaatgtgcatgcctgtgaagttgcctctccctggtgtctgcattcaactaatcttttagagcgacaggtgtaaaccatcaggaaatggcctctccctggcaatttatcagcctctcatcaacaatattgatgatgaatgatttaatgactggtaactggctctgtgataattactcaaatcttaatatctggacactcaaaaagaatgagaagaaattgtgatgatgatatgatatcttttacttttggactgaaagttaggaatttctctaagttttatgatatggccatgccatctaattatgccaatgtgtcactgctgccaatttgtcacttttagaaaggcaatatgataattgccgaaccatttcctgacattcctggtgggtggggagagctctctcctgctctgctcatgcctgtctaactacctgtaacaataccattatctcctattagaatggctcaaacaaacgaacaaacactgacaatatcaagtcctagcaaggatgcagagcaactggaattttcatacatggctgatcgaagtgcaaaatggtccagctactttggaaaaacagtttggcagtttcttagaaacatatatttatctttgacccagcaattccactcctacgtatttaccctagagaaatgaaaactttgtcacttaaaaacctgtatatgaatgtttatagtgaatttgcacataatcacccaaaactggaaacaacatagatatctctcaactactgaattaataagtaaattgtggtacatccatacaatggaataccacttaataataaaaaggattaaactattgatatacactacaacatggatgaatctcaaagcaataatgctgaagataaaagaaggcagaccaaagaaggagtacatgctatacaatttcattcatatgacatttcgggagatgctaaactatacagacagaaaacaaattagtggttttgagggcctggaggtaaaggaaggagcggaccataaaggggtacaagggaatttgttaaagttatgaaaccattttttatcttatatttatagtggtggttacacaaccatatgcacttgtcaaaactggtaaaactcaaaaaactgtaacccttttccagggttttccttttccagaacacattatgaaaaagcacccagttgtgccgggcgcggtggctcatgcctgtaatcccagcactttgggaggccaatcacaagattaggagatcgagaccatcctggctaacatggtgaaaccccgtctctactaaaaatacaaaaaattagccgggcgtggcggcgggcgcctgtagtcccagctactcgggaggctgaggcaggagaatggcgtgaacccgggaggcggagcttgcagtgagcagagatcgggccactgcactccagcctgggcgacagagcgagactccgtctcaaaaaaaaaaaaaaaaaaaaagataaagaaaaagaaaaagcacccagttgtaactgctggagtttttattgtttcagaaaagttcaagggaccgggcgcggtggytcaggcctgtaatcccagcactttgggaggccaaggcgggcagatcacaaagtcaagagatcgagcccatcctggccaacatggtgaaaccccatctctactaaaaatacaaaagttagctgggcatggtggcgcgcgcctgtaatcccagccactgaagtggctgaggcaggagaatcgcttgaacccgggagctgagatcgccccaccgcactccagcctgggcgacagagggagactccatctccaaaaaaaaaaaaaaaaaaaaaaagttcaaggaagaaacccagccacagcaaaacaaaaaccagttggatccagagatgcctgagttggagatgaactttggagatttctcctcattagcatactaaaaatccacccaggaaggagctattctccatttgtatgtagaggcgtgatcgcagactgggcctgagctggctctactccacctctacatatgataactcagctaacctgcctaataaaagcctttttatcacctttgtttagggagacactgctttggggatttatccccgatatcctccttacttattgtaagtaataaaatccccttgttaaatcttccttggttgtggtattggactgtcactggctaagtgatcaaacccacccattgtgtgggtaacaaaactatacactaaaactataacatttggaaattatgccccaataacctgaccgccccctcaaaagccttctcacaatgcttttcacagattttttttttttgagatggagtctcgcactttcgcccggctggagtgcagtgctgagatcttggggctttgcaacctctgcctctggggttcaagcgattctcatgcttcagcctcctgaatagcggggattacaggcgcgcgacacatgcacagctaatttttgcatttttttagtaaagacggkgtttcaccatattggtcaggctggtttggaactcctgacctcagatgatctacctgcctcagcctcccaaagtggtgctgggattataggtgccaaccaccgctgctggtctttcctcagattttaatggtaatacttgacagagcaggaacattgccatcttggacaagcactgctattctaaagttccccttgatcaaaaactgcctaatccaaaaggcatcagcctaatggctaaggtcagcatgaccataaaccgcaaatgacatctctgaccggaaaccttccaaccataagataaacccctccccgactggagagatgtcagccccaagataaccttccctccaaccagagacattccaaccccgcaataaacttctccccgacacagaaatattacaagcctgtgataaattctcttgccctgaactcttaaataatcttagtctgtaagagagggcccctgactgaaatcggccaaaagcccctctcaggcttattctctaaaataaacctgtctttgactgttgagccgcttttaatgtttctttcctctttctttaattcttacaatacttaaatatgtaagctccttttttttcctatgaaaaaattgtatcataactgagaaatcaataaggacaataaaaattaagatattaaaataaggccaggtgtggtggctcacacctgtaatcccagcactttgggaggctgaggcaggtagatcacttgaggtcaagagttccagaccaacctggacaacatgacaaaaccctgtctccacaaaaaatacaaaaattagccgggcctgttggtgtacgcctgtagtcccagctactggggaggctgaggcagaagaattgcttgaacctgggaggtggaggttgcaattagccgagatctcaccactgcattccagcctgggtgacagagtgagactccatctcaaaaataaataaataaataaataaataaatataaataaaatggaaagaatttgcaatacaaaatctatgtgccttaaggtaagtcctactaaagacatgcagtaaatgtttatttatgtttcaatctgtttcactttttgattttatgagttaaatgtcaatgaaaaatttttttcagagaaatagtactgtttcatttttcttttaaataatgttgatctgaaatttctcaagtaaacccagcttgccaccttcaggtcactgaaagatttacagagactatagtcagaacactaatactgcatctttctcaataatccataattaataatatcttgatcactctattgtgcctttgtcaaatgcactctatctagaatctttccctagcatttactggaatcttcccaactttcaaagctcagttcaaatgtcactaactcctagaagccttcactgatcactctagctagtttttcctcctctaaatattttatttccttgattacttgtaatctcactgaaggtaataaccatgtcctacacatattttatgcctctgcgtggctattaaaaaaggtgcatataagaattgtgcattctagctggacgcggtggctcatgcctgtaatcccagcactttgggaggcggaggcaggcggatcacctgaggtcaggagtttgagaccagcatggccaacatggtgaaaccccgtctctactcaaaataaaaaaattagccaggtgtggtggcaagcgcctgtaatcccagctactcaggaggttgaggcaggagaattgcttgaacccgggaggcggagattgcagtgagctgagatcatgccattgcactccagcctgggtaacaaagtgagactttgtctcaaaaaaaaaaaaaaaaaaaaaaagaattgtgcattataatatttactgaatgaacacatgaatgaataaataggaagctagagtaaacattgagctttcacttggaagaggtcccattttactagtaaattaacgggaattctacacatttattaaagactatatgcatacatataaaagcacaattttcattgacaactagcagtgtctcaatctctattaagctctcaaacaatattgttgatgaatgatttaatgactatttggtgactggctttgtgataactactcaaatcttaatatctagacatttaaagagaagaaagtgtgatgatatcttttactttttttttttttttgagacagtctcactctgtcacccaggctggagtgcagtggcatgatctcagctcactgcaacctctgcctcctgggttcaagtgattatcatgcctcagcctcctgagtaagctgggatcaccggcgagcrccrccacggctggctaacttttgtatttttttgtagagatggggttttaccatgtcggtcaggcttgtcttgaactcctggcctcaggcgatctgcccgcctcggcctcctaaagtgctgggattacaggtgtgagccatagcacctggctgctatttttyacttttggactgaacgtgagatatttctcttgttttgtgatatgsccataccatctaattattttcctctaaacccccaagttgctaatatactataagcttattaataaaatatgtaaccgtggcatgtagtccaccaatacatgactcagaaaaattcccaaattttttgtctagttccatttagtttagggcatgaggttttctttcaygtttacattctctctagaatgaagttcccctctctctctttcaaggtctacatgtatccaggactactagatgaaaaactggtcatagatgtttgtttctggttttttaatggagaagggaatggtccacacttgagaatggtttatctccttgaattccttccattagaattttctttctttcttttttctttctttccttttttctgaaacagggtctcactctgtcacccaggctggtgtgcagtggcaccatcacagctcacactgcagtcttgtcctcctgggctcaagtgatccccctgcctcagcctcccaagtagctgggaatacaggcatgcacctccatgcctggctaatttttgtattttttgtagagatgagtcttgagatggggtctcactatgttgcgcaggctggtctcaaactcctggtgtcaagtaatccttctgccttggcctcccatcgtgttgggattacaggcatgaaccaccacatctggccccattagaactttctaacaaaagatgatctttctcctgccccctagagggctgtttatcccttctgtcagtccttcctttctcattatatcctctccactctctgccctctgcctaggcccagccttatccatctgagagaggaagtaaccagtaatttgagcatgcacagaaggctctgatttgggacctcatgtcagcagtgtctttggatttttgtttctgctttgttgagggctgaacaggaagataggcccatgggttaccagtgagatagaaaaaggggaggaaaatacagagaaacaatcggattcacattttgggatacaaatccaccacaaatgcaagtttataatacctatgtgggctaaaagtttgttctctctcctccagtcctttatctttcctcaaaatgtgaacttggtatttctccctcatcagtatcagtttcaactctcctaaacaaatcttctaattgtaccccaatactttcattgaccaagtcttctcttaatcaccacatacacactgtagtagcggcatctttttccagctattcttttctctccctttcatttaccctagttgattctaaccagccatccccaagtgtattaggtacattttcagtttgctcgcgaattctcatttactcacaatatggcttctgtctgcttccctttaccaagacaagtcttgttttggtccaattaatgagcttttaaaaaatccatgtagcttgataccattgctcactccttctgtgaacaattaggttctgttattaattaggtttgtacatatcaccatttttctagcattttaaactttctggttctgactgtaataatatctttgataattttcctttttttttttttttgctttatttactccttttaaccatcacaacagtggtcctatacttttctttctttcctgaagatgattttaaaattccattccatttttgtaaatctgtaatgttgagtctcttttggatgctctgaaacaggttgcttggattgtggaatattttgaaagactgcttatgaggcaatagcagcagggtgcaattcagacttctcacacttctttaaataccagttctttcaggagtttttttttttttttgagacagagtctcactctgttgtccaggctggagtgcagtggtgagatcttggctcactgcaaccaccacctcccgggttcaagagattctcctccatcagcctcctaagtagccgggattacaggtggctactaccaccctaggctaattttttgtatttttagtagagatggggtttcaccatgttggccaggctggtctcaaactctcaacctcaggtgatctggccacctcagtctcccaaagtcctgggattacaggcctggtctcaggtttttaatgtaacccaaagataagaaatagattcaatgtcgttagggacactgacctttcttcccagattcaacccatttattttctatttttactctgtacttgagttttgtttgtcattrtaatttgtaaactcactgggtaggaaataattgttgatcttctaatttagaatagccccaagcacatggttatcatggtaacatgctttaaatgtccttggttataaaatgaacaatgttaaacatcacttgaatttttcacttttatttttcttcattctttgcttgcaggttttatattctatactctcaataggtggttctcatacaagaatggggtcagttctattagagttacaaacaytggaagaaaatacattattttggtaccaaaatctaaatacttccatctcccaatgcagtttagtggttattagtgtgactttgaatcttggccctcttagttctttgttttgtcaccacaggcaagtttctaacacaaaaattagggatagtaataacctaactgtatgagtttttgtgaaaaatagaggaaataatttacagttgaaacctgaacaaggtggggttaggarcacgagccttttgcactgtaaaaatctgcatataactcttttctttttttttcttggagacagagtctcgctgtcacccaggctggagtgcagtggcgcgatcttggctcaccccaacttccgcctcccaggttcaagtggttcttctgcctcagcctcccgaatagctaggactacaggcacgcaccaccacacccagctaatttttttgtatttttaggagagatggggttttgccatgttgcccaggctggtcttgaactcctgaactcaggcaatctgcccaccttggcctcccaaagtgctaggattacaggtgtgagccactgcattgggccaaaatctgtattacttgactccccagagcttaactgttaataccaactattgcctggaagccttaccaataacataaacagttaattaatacgtattttgtatatgtattatatactgtattcttaaagcaagctagagaaaataaaacattaagaaaatcataagagaaaatatatttactattcattaagtttaagtggatcatcataaaggtttccatcctgttcagtaggctgaagagaaggaggaggaagacaaagggttgatcttgctatctccagcttagcaggtgcagaagaaaaaatctgcctacaagtggacctgcgaagttcaaaccagtattgttcaagggtcaactgtatcagaaagatttgactactatgagctaagtggtaatcatcattggtctgaaatgatgatttttagaaagtgactttattatatcactgatagagatgccctatactgaaatactgagattaccaataccttgcctgtaccacaaatgtatttttgccattttgctttctgtttctataatattttgaattcctaacatgatccagaaggctgggagatgctcctaatgaaagagagaaacctggaatgttctcctatttaccagattgcttcctctcatacccaggttttgagatataaagttgttacaaagttccaacttatttggtatcattcaaaatctgatgagcttgcattttaagaagtgttgatcagttccatttaaaagcagttggtatgagttcactttattttttgaggtggaatctcgctctgttgcccaggctggagtgcagtggcatgatcttggctcactgcaacccctgcctcctaggttcaagcgattctcctgcctcagcctcccgagtagctgggattataggcgcgtgctaccacacccggctaattttttttatttttttatttttaatagagacggggtttcaccatattggccaggccggtctcgaactcctgatctcaagtgattcatctgtcctggccccccaaggtgctggcattacaggcatgagccaccatgcatggccatgacttcacttcaaatgagcacagaaaaatctgggggcccaacaaccttatggtacatcttttgaagcctggtcagacaagagggtctttaggtgatggtgaagtgacagttttgagttgtcttctttggtagtaagtgttggctaattctaacagcaggaacaattgaggagtccaacaaacaatcttgttcacattgcaatgattttgttacagttgacactaatttaaaaattggcaggctctagaccagaaagacctgcccccaaagtaccttttctgaaaaagttgccctgcctcagatgctgtgtatctgttgaacttttcagctactgtggtttccaaggaatgcacctctatcaaaaatgagcttaattcctaaggaagtcaattattattcctccattccagcaaagtcaacaaatattgacagcccaccttgaatcactgtgctgggccctggatgtagcagtgttttaatatttcgactcttgtgggggggggctttacaatctagctgggcagaagaggaaacatgcaaataaattaaaatgcagggtcctatgagggaaatgaacagccttggtgacctaagttttgataataacataactaaaagttcggctccacaactcagtagctgtgtgccttggacaggtcatatcagattaggaaaggtgagaatgagttgaggaacgcagcactctgggatcatggttccagctccgggcagagggttacatcgtgtcaagtgtgtgaaggcagaatagcctgcagagaccactgtggcgttgaaaagaggtgtcgtcgcgaccttcggcgccggagaggcgaaacaagagggggtcttcgggccctcaggtatggctcagccgcccaaggcgaagcgcacgtggcagttggcgggaaatccctggggggtggagcctcggctcgaggtccggccgccccgtaccacgtcatcgagcagctccccctccccttgctacaagtcgcacgcgcggaagtaaacacctctacgtcatcagggcgcgtcctcgtctttcccctcccatctcctcagatcggtggacgtgctcgcctccactcggggccaggtctatgtcccggtttcccgcagtcgcgggcagggcgccamggcggcaggaggagggtgagcggtcaagagacctccaggaagagcggctctcggctgtttgcatcgccgatagaggtgcggtccgcgggacggtacggaagccagcgggagttacggcgtgggggttttggtggggggatgaaagtacgcctttggcaggctgagaagagtagtgaggaagccgtggcgttctcctggctttccaagcccgaggcgaactttgcgtccaatgagcactttgccttagaggggggcggtcccagattcaagttaggcgaaaaccttactggggggcgaaaaagtgaaccccaacgcccgaaatgcattctgttcttaaacaggctcatagaccctttgttctctacccattcatcccccccacccttcgtcgggccgccagcctgcctttgggtacagtatgaagggagccagtttccaggagccagtttccatggttacccaccacttggccttctgggatatcagtcgctctgaacagggacctaacttgaaccatgaatcagaagcaaacacaggtggcttctaatccagctgagaattttctgctgtgttccagtttttggtctattgttaaataaaattgagttttgtgcttctgtgtaagtatgcatgtgtatacgttgccttgagctatacttgctttgaaaagtactttgagttatgcgtgaacaaatgctcaagttgctggatttcaccaaaaagttgttctgggctcattaaccctcacttacaaattgcgctcattaacgctcacttacatgagcgatttaactgagaagtcatggatgatcccgtccagccctaaaattctattgcctttctggttttagtcatgagaaattgagtcagagatatctttacaagtcttttaattgacttgtttttctgttattacagaagagaaaggatgcacgtcccaggagggaggaactactccaacttttcctattcagaaacaaagaaaaaagattattcaagctgtgagggacaattcattccttattgttactggaaatacaggaagtggtaaaacaactcaactcccaaaatatctatatgaagcaggtgatttttttctgttgtaataattggaaatattttaaaaatatcctctttttaaaggccagtaggacttctgtactccatgattgcccagtatttgctttatagtcccgcttctcttggcacacccccttcccctatgtctcctttgcttctttatggtctatttcaggttcaagaattagttgggatggcaaattttcccatttttaattaccataataatctcaaatagaattacatctagatattccattttatagaataaagttgtctagcagtagactattaaccattggatactgaaataattttgaggggtaagagatatgtgatatctgttgctgccattagtacttcttggttctttctctagagcattatcaggtaaatatttatcccctgactttgccagcgcaagccaactaacaaattacctttaaaatacgttaagtaaagttaataggaggcctttggtttggactgatcccccgcactagacccaacagaccaaaccaaaatggagttactcatactgaagttccacgccaccaagtctagaaactaaatttttcatctactgagaaatcaggagaaagagataatagccaaatccccaaacagaccagttttaggagcatcaagaagtttcctctgctttaactttgacaagaaaagtaactttgaaatgagcaatctgctttttgttttctgtttctgctttcctcagcccttttctgtctatacaatcagcctcctctgctcagctcattggaacactgattctattttatgagacgatgggttgatgtgattccagagttagaatcacaaaagccaattaaaaagttttggctgggcacagtggctcacgcctgtaatcccagcactttgggagcccgaggtgggcggatcatgaggtcaggagatcgggaccatcatggctaacacagtgaaaccctgtctctactaaaaatagaaaaaaaaaaaattcgccgggcgtggtggtgggcgcttgtagtcccagctactcgggaggctgaggcaggagaatggcatgaatctgggaggcggagcttgcagtgagccgagatcgtgccactgtactccagcctgggagacagagtgagactccgtctccaaaaaaaaaaaaattttttaggccgggcgcagtggctcaagcctgtaatcccagcactttgggaggccagggcaggtggatcatgaggtcagcagttcgagaccagcctggccaacatggtgaaacccgtctatactaaaaatacaaaaattaggcgtggtggcgggcgcctataatcccagctacttgggaggctgaggcgggagaatcacttgaacccaggaggcagaggttgcagtgagctgagaccgtgctgttgcactccagtctgggcaacagagtgagactctgtgtcaaaaaaaataaataaaaataaaataaatttgttgtaattttgttttttgacaagtgtcattcagtatgacagaactttctgtcataaggtttgtaaagagcagtattatattggatatgatttgccttaaaaaataacaaatgtattattctaatgcttcaatctaaggtgccatctattaagatatatcactattttatgtgcagtaatcccttcttatccttgggagatgccttctaagaccactcaatgcctgaaactgccaataataccaaaccctgcatatactatgtgttttcctatacatacatacatacttttgataaagtttagtttataaattaggcatagtaagaaattaacaacaacaacaataaaatagagcagttatgacaatatactgtagtaaaacttttgtaaatgtggtctctctctgtctctcaaagtactgtaacatttttggacctccactgactgtaggtaactgaaaaattggaaagcaaaaccaaaggtaaagagggactactgtattagtaagaatggaaatgcgccatcgattttaagatgcagctccattcccaaatatattaaaatggtatatggaaggtgcatatatatatatatataaatatagatatatatatttatttatttttttgagatgagatcttaytatgtcgcccaggctgatctcaaactcctgagttcaagcaatcctcctacctcaaccttctgagtagccaggctcctgagtagctgggattacaggtgtgtaccactgctcccagcagaaaggtggcatatttaagtccagttttaggctgggtgcagtggctcatgcctgtgatcccagcacattgggaggctgaggcagatggatcacttgaggtcagaagtttgcgaccagcctggccaacatggtgaaaccccatctctactaaaaatacaaaattagctgggtgtggtggcgcgcacctgtaatcccagttactcaggcggctgaggcaggagaattgcttgaacccaggaggtagaggttgcagtgagccgagattgtgccactgcactcccgcctgggcaacagagcaagactctatctcaaaaataaataaataaataaataaataaataaataaataaatccagttttactcttgtggcaaaagtaaatttattttgggaagtgtgtggaattttatgaattcttatgtttcaaaattcttggcttacctttagagtagatttttagacagaaaaaaacagacaaagcctgaattctaatttaaaaaatatattttttacaaaaaaattagctgggcctggtggcaagcgcctgtaatcccagctgctcaggtggctgaggcaggagaatcgcttgaacccaggaagtgaaagttgcagtgagccgagatcgcgccactgcattccagcctgggcaacagagcaatactccgtctcaaaaaagaaaaaaatatatatatatctatatatatatatagatatatatataattttttctttctttttttttgttttggctgggcgtggtgtctcaagcctataatcccagtactttgggaggcagaggcaagtggatcacctgaggttgggagtacaagaccagcctgaccaacagggaaaaaacccgtctctgctaaaatacaaaattagcccggcatggtggcacatgcctgttatcccagctactcgggaggctgaggcaggagarttgcttgaacctgggacgcagaggttgcggtgagccgagattgcgccattgcactacagcctaggcaacaagagcaaaactctgtctaaatatatataatatacattatattataatgtatatttatatataatatatagtatatattataatatattataatgtatatttatatataatatattataaattatataatayatataatatgttatatattaatatatataatatataatatattataatatatattatatattaaatatatattagtatataatatatataatatataaatatatataatataaactggatttatattatatatatttatatattatatatataatatatttttgcatggttattaatatgtattattttaaattaatatttaaatttccatgatgcaaacatagcagtgtgtttttaatttgcgagatattcttttggaaacattcaagcagttttgtgttgattggccaaaaacaatttagctctaataggaagacaattgctaacattgttgtgtttcttyatctctggttttgatagggttttcacaacatggtatgattggtgtaactcaaccacgaaaagtagctgctatatcagttgctcagagagtagctgaagaaatgaaatgcactttgggatccaaagtaggataccaagttcgttttgatgattgcagttctaaggtacaaaagtcttgttggtatttgtttcttttcttttatgggacagggtcttgctctgtcgcccagcctggagtgcgtggcgcaatcatggctctctgtagcctctaccttctgggctcaagtgatctcctacctcagccccttgggtagctgggactacaggagcatgccaccatgcccagctaatgttataaacttaacagaaagagtggagagagttctgaaagatttttaacttcaaagttcaatatatattttaaagaatttatttttgttgttcattgttaatgctttagctctcaagtgtctgatgttcatcccattttctccttccttagtttataaatgacagtttattttcttaggattctcttatttatgttttttaactgtaaggattcttgacatgtaggtttttaaaatgttttwttgtagtaaaatatatataacttaaaatcgaccattttactattttggtatacaattcagtgccattaagtatgttcacaatgggctgggctcgatggctcacgtctgtaatcccatcactttgggaggccgaggcgggtggatcacctgaggtcaggagttcgagaccagcctgaccaacatggagaaaccctgtctcttttaaaaatacaaaattagctgggcacggtggtgcatgcctgtaatcccagctactcaggaggctgaggcaggaaaatggcttgaacccgggaggcggaggttgcggtgagctgagatcgcgccactgcactccagcctgggcaacaagagcaaaactccacctcaaaaaaaaaaaaaaaatgtgttcacaatgttgggtaaccatcaccatttctactttcagaactttttttatcatcccaaacagaaactcttatagattaaaacccccatttctccctccccctagcctctggtaacttcttttttttttttgagacgaagtctcacaccattgcccgggctggagtgcagtggcgcaacctccactccctgcaacctctgcctcccaggttctagtgattctcctgcctcagcctcccaagtagctgggtttacaggctcctgccaccacgcccagctaattttttgtatttttagtagagatggggttggtctcaaattcctgaccttgtgatctgcccacctcggcctcccaaagtgctgggattacagggtaaaccaccgcgccctgctgtatcttctgttctactttctgtctctacaaatttgcctactccgggtacctcattcaagtggaatcacacaatattttgtacttcgtgtcactcttatttcactgagcatgttttcaggttgatttattttatgtgtttgtattcttgaagtcaatggaaagctgaattaacaaaatcagccaattaacaaaatcagcaagtgttaaagcatcttctatattcatggcaccaacaaatttaaaattttctttttaatagtgaatattataatttacattccctgtggatttcttaatcctgtccagctacaaaacgatccctggtttacatatgttccctaatgggaatggccatcaaatgtggcacaagatgactccccaaaatactatctttttgccttcctagtggtcactgttttttctttcttctttcccttgttttatggatgtcgttgctgttattcctaccctttggacctttttctcaccctgttttaatgcttgttgagtaacacatttttatttggagatagtgtcttactaagtcacccaggctggagtgcaatggcgtgatctcagctcactgcaatctccgcctctcaggctcaagcagtcctcccgtctcagcctcccaagtagctgggactacaggcgtgacccaccacacctggctaatttttatatgtttattagagatgtggttttgctatgttgtccaggctggtctcgaactcctggactcaagtgatccgcccacctcagcaacccaaagtgctgggattacaggcgtgagctaccgtgtctgacctaagtaacacattttttaatagagaagaggagagagtgggtggaaagtatgcacctaccattttctcatttcccccgaatcctctaaaataggggctgagtcagaaagataaatctcatttcactgttgtttcccacaacttgcttacccaatgccattgcatcatcttgccactttcctctgactttattgtatttccttattggtgatttttgttgctttgtccaagaatacccaagtgagttatttgtccctttttctgtatagacagcatgttttgtaacttaccatcattttgtatacataagttagactatttttatgtacccttttgtttagtcagaktggtttgatcacttaatgtttgtacctcttgaggaaaaatttagttgggaaaatagtggtgaattcctgtgacactgctgtttgaacattaggagacagcaatcaaatatatgactgatggatgtttactgaaacatattctgggagacccaaatcttaccaaattcagwgtcattattttggatgaagcccatgaaagaactctaactacagtgagtattttaatttattattatttttttattagcaagtagtttgtttgggtagctttttattgtgtagagaattgcctcctcttactttttaatttaatttaattttttagagatggagtcttgctccatcacccaggctggagagcagtggcacgatcatagctcactgcacccttgaactcctgggctcaagtgatcctcccatctcaacctcctgagttgctggtactgcagacgtgcatcaccatgtctggctaatttttaagaatattttttgtagagacagtgtctcgttttgtttccctggcaggtctcgacctcctggcctccgaccttggcctcccaaagtgctgggattacaggtgtgagccactgcacctggctcctacttatattttaatgtattaaaataggaattccttggttagaatagcagtgtatctaaaatagtttggctgttaagtgtacttgtgacttactagaaatttacttttctttcaggatatcttatttggtttattgaagaagctatttcaggagaagtctsctaataggaaggagcatttaaaagtggtggtaatgtcagcaactatggaattagccaagctctctgcattctttggaaattgtccaatatttgatatacctggaaggctttatccagtcagagagaaattctgcaatttgattggtccacgagacagagaaaatactgcgtatattcaagcggtattacttggcattcatttaatgtcttttttaaatatctatgattcttactaattgggtggtttgataattcatttgttcactactattttaatgacagtcctcacaggtcctagaacttttaagaaccaaatttaatttttctgtggggcaagggaagtggtggtaagggaatgactgtatttccactagcatattatgcctgcatttcttgctttagattgtgaaagtcaccatggatatccatttgaatgaaatggctggagacatcttggtttttctgactggtgagcattcagtatcaagttaaaaaacttaagtatttgtaagtaaggaatgtggcacccagatagagtgctacctctgttgggaattctgtgcccttctcaagtgttgccctagctttttctgattatctgaataattttaggtaaaagatagataaaaattgtaagctagctgccaaagaggattatatatatttatgtcaaagacataatagtatgtatatatattttatgtcaaagacatagtagtatatgtcaaagacgtaatagtgtatatgtatatatacacacacatatatgtcaaatgtcaaagacatcaggctcattagtaaatatatgtaaaacacactgaccttttaatagaaagaaattaaatagtgaaatattgttttttgttggtctgtcttagatagaaatgwaacctgactaaacagacctgagttaattccattatttcaaaggacatttcaccaggttcttctttgggtggtggcattgtactgtgtgataacaacacataaggtgtagaatctatgtgtcgtagacaagcatgtggcatttttggagatcaaaaataaaatagttaaatcccaaactagtggcataacttttcaaatagcagcaccctcctaataggaattagtagtttccttgtttacctttttcctctgccttgtactaatgtcagaagtragggattgtcacaatctttgcctttttggagattacttaagtattttgaaatttaaccaaatgcaatagcacctggactagcttttctcctttgttaacaatttggtgagtcttctcaaatacagggtgaaaagcttgacgatgataaatatttttattcctttagagatttargtttcttagaaactgatgtttcttctacttcgaattttattgttgaaatatggtacagcttatgtgttcatctcctttacattaaatgagagatttacaataacttttaggcaaaattaattttaatcttgacattttctttatttttaaattaatttttctgttcagttgctgaagttatttttttcttcccattttaggccagtttgaaatagaaaaaagttgtgagttactttttcagatggcagagtctgttgattatgattatgatgttcaagataccaycctcgatggcttgttaatattgccgtgttatggatcaatgacaactggtaatttctcattagaatagaaaatttgatttttttaaaaaactttttattgaataatcgtgtttacagaaaagcagtcagatcttaagtgcttaggtaagtttcacaaaccagtctcacctttgtaacccacatccagatcatgaaacaaatcagtgagaaccagcattccttgacagtagtgatttttgcctgaagtctttttacattcacttttttgagagtcgtggatatcccccttattatcgtttagagtattgtttctcccagcaaaacaaaactattggtgagaattctttgaaatgaggacagtagtttcttgctggtattactgtaagtcaaaacctaatttgccattgccacagaatttttagaaattgtgtatatccagctatatctaagtctaaacacagtggattgttttgttttttttttgtgatggagtctcgttcttgtcatccaggctggagtgcagtggcgcaatctcagcccactgcaaccgccacctcctgggttcaagcgattctccttcctcagcctcccaagtagctgggattgcaggcgctcgccaccacacctggctaagttttgtatttttttttttttttttttagcagagatgggattttgccatgttggccaggctggtttcaaactcctgacctcaggtcatctgcctgccttggcctccagaattgctgggattacagatgtgagccaccatgcctggctgtggatcattttccttttaaagtagccatgccttagtctgcttttcaagaatgatcctgttctttggtgaattccaagagcaaatgcaaactcttgatttgacattttggttatagtaaatattgttgaatgaggtttagaatttgttttataaaacttttattatggaatttaacttgtaaagttaaagggaaattaaccttagcctcctatttggagttggaattagcatttgaatgtttttatattttacatgtatgcgtattaacagcttttgttgattgggtgattcttatccctatattaacaaagttttggaatatatgtgtcagtaaagaacatagatgtgctattttggaaatcttttttatgatgatattagcttcttactctctattraagcatagatatctattttagattttgtcatcttcagggaaattcttaggatcattgtttaaggttctcattgttttctcaagatttggttcacygatgcttttataatttacattgaaactgataaaaacccattatgtttggtttgttattaatcattaactaaatatgtacatagacatatattattctatacagagtaaataatttcattctttcttactgctacattgaaaataatgttctggattttctcttgcctctgtttttttttttttgttttttgagatggagtctcgctctgtcgcccaggctggagtgcagtggcgcgatcttggctcactgcaacctctgcctcccagattcaagcaattctcctgcctcagcctcccgagtagctgggactacaggcgcgcgcccccacgccctgctaattttttgtatttttcttagagacagggtctcaccatgttagccaggatggtctcgatatcctgaccttgtgatcctcccgcctcagcctcccaaagtgctgggattacaggcgtgagtcaccacgcccggcctagaaacatgacttgtaatgaaaaattaagttcttcaaaactcgagtttgacacatgcatgttgtaaattggtattttctttttatatatacttcagatcaacagaggaggatatttttgccaccaccacctggaattagaaaatgtgtcatatccaccaatatttctgcaacgtctttgacaatagatggaatcaggtaaaacttttgaactttctcttaaagtcaaggaagcctatcgttactaaacattagctaaacattactgagtttgcttttctgtgccctccactaattcccttctctcctactttttgatgttcttaacatgtaatcacctattttgttttgtaattattgattgctttgagcaggaaatggagtaggaggtacatactatattcctattcacactttttgtttttttagagacagggtctcattatgttgctgaggctggaatatagtgactattcacaggcgtgcagtcatagcacactacagccttgtatggagatcagccaatcctcccgcctcagtctcctgggtagctgggaccacaggcatgtgtcaccrtacttggctgttcacactttttaactacttggcaacttgaagcttcttttcaaatttaagattatgtataatgctttatgggtttcactaaataggaagccaaacctatttttctgtactcccattataagcatataccttagatgatttgatatttccttctaccttgcagcctcactcggtagagttagtttgtatatccartgtttatctggatgtattgtctctgactttttacctttttgtgaaaattaactatgattcaggtcccttatcttttctggatgtagtaaatagtgctatcaaatttttgggtaaatttagtaaggaaacacwaagaaattttaagtctggactgacaactaatgcaaagttctttaagactgggttatttatcatttaccgaatatattttatttctttagctaagtctgattgtctgtctccggaaggctgaacctgaatctcaaagatcctgtgtgtttcttctgggtaaaatgatcacccaggtctgagaggaagtctaatttcctctgcttttcttcgttactttaaaaataatggtttcactaagggattaagggagtgctctcctgggtaaattaacctctgtaattttctgtttcctgcacaggcaaaagccattaaatagcatgtttcagaatgttgtcttgttactgctatcctactttggttccttacctgacttgttcaccatttaattggcttagaatggcatgttaagggctagttgaaattagattctgaatctgtttaaatggtctgaagctgactttcaagtttgtgtatttttgtattgaggcaaaattcacataaaattaatcatttaaaatgaaaaattaagtagtacttagtacatttacagtattgcgcaaccactgcttctgcttagttctaaaatatttcaacacctcaaaataaaaccccatacccattaagcaggtactccacattcccctcttgaccccagcccttggcaactaccagtcttactttttgtttgtacgtattttcttttttaaaaaattctttagatgtgtcagcaggaagcagtaggtattttctattctggatatttcatacaaatagaatcatataatatgtggccttctgtgtttgctttctttcacttagcataatatttttgaggttcgtccacattgtagcatgtatcagtacttcattcttttttgtggctgaataatattgcatagtgtgtgtgtgtatatatatatatatattccattgtgtgtgtatatatgcgtgtgtatatatactacatacatatatgcaaagcaatttgttcatcccttcttccattaatggttaatggacatttaggttgtttttaccttatggctgtgattcatagtgctgatatgaacattggtctataagtatttgtttgagtacttgttctcagttctttttggtgtacacttagaaatggaattgctggatcatatggtaattttgtgtttaacttcttgaggacctccgaacaattttccacctcggctgaaccattttacattcccaccaacaacatacgagggttccaatttcttgactttcaagttttacacttaacataaaaggcattgtgtacctgctagtttgctagaaaaggagaaaccaaagtggttaacaattaacaagtcttcttttattttccagaaacttaacttgctttgattcttcttagatatgtggtagatggtggcttcgtgaagcagttaaatcacaaccccagattagggttggacatcctggaggtggttccaatttcaaagtaagtctctatgtcaaatctttttattcaaagaacaactgattaggtaatttctagctgttttggggagacaaagtaaattacctgagaaacccacagaacattttggggaatttttgggtttttttccttttgtaggagcgaggcattacagcgaagtggccgagctggcaggacttcttcaggaaaatgctttcggatctatagtaaagatttttggaaccagtgtatgcctgaccatgtgatccctgaaattaagagaactagtttgacatctgtagttctgaccttaaagtgccttgccatacacgatgtcataaggtatgtagacaactagaaaaaaaaggaaaaacttgttagcctggaaccaagttattggctcaaaaattattttgaaatatttgactgatacatccctgagagttgaggctaacctcttttacaggttggtttttatattggttgcttttcttttctttttttttttttttttttttttttgagatggagtcttgttccgttgcccaggctggagagcagtggcacgatcacggctcactgcaacctccgcctcccgggttcaagcaattctcctgtctcagcctcccgagtagctgggactacaggtacctgccaccatgcccagctaatttttgtatttttagtagagatggagtttcaccttgttggtcaggctggtctcgaactcctgacctcaggcgatccacccacctcggcctcccaaaatgctgggattacaggtgtgagccactgtgcctggctctattggttgcttttcaactaaactaacacagaagacttccttgcattgctttagtaggatctcttgctcatgtttaaccttggcttaatggcggggttagggggttgtgctgatgtttatgtggatcacttagtgaccactgtttatttgtaatgaaaggtatataatgagctgggcataacagcttatgcctgtaatctcagcactttggatggccaaggtgggagggttgcttgagcctaggatttcgagacaagcctgggcaacatagtgagaccttgtctctacaattaaaaaaaaaaaaaagtctgatatggtgcatgcttgagtcccagatatttggaggctgagacgggaagattgctggagccgggcaggtagaggctgcagtgagccatgattgcaccactgcggtccagcctgggcaacagagtgagaccctgtttcaaaagaagggggctgggcgtggtggctcacgtctgtaatcctagcactttgggaggccaaagtgggcggatcccttgaggccaggagtttgagacccgcctggccatcctggcaaaaccccgtagctactgaaaatataaaaattagctgagcttggtggcacgtgattgtagtcccagctactccggaggctgaagcacgagaatcacttgaacccaggaggcagagactgcaacgtgccaagatcacaccactgcactccagcctggtcaacagagcgagattctgtctcaaaaaaaacaaaacaaaacaaaagggtatacagttggaaagtggagtgttttttttgtatggccagcatcatactatataccatgaaagacagagtaatactctgtagttttttgctttcactaagcttaagttatattaggaaaacaaggttcagacacgtgaaataaaggaagaacagttaaattagccaaatattaatataatttattggtataagatagaatattgttatagatagaaatttctatcatacatggtaggggaattaatggaggaaagtactatcttctttattttggtcttaattgccttggaatgtaaaactgctcaggaattttgggggatggtaaccgtgcagtttttaaattcatagtaagtgattattaggtgcatccaaatatgtattgtaggccgggtgcggtggctcacgcctgtaatcccagcactttgggaggccgagacgggtggatcacctgaggtcaacctggccaacatggtgtaaccctgtctctattaaaaatacaaaattagccaggatggtggtgctcgtctgtgatcccagctacttgaaagcctgaggcaggagaattacttgaacccgggaggcagaggttgcagtgagccgagattgcgccatcgcactccagcctgggcaacaagagcgaaactctgtctccaaaaaaaaaaacaaccaaaaaaagcaaaaaaaaccccaaaacccacaaatactcattgtatactcttggaaagccaatttgccaatttcaaaatgttttgatagttatcattagactagagattttctgaatgagaatatgtagatactggaaagagaaaagcatgtaataaatgaaattctgactgtagcaataaattataccaatgaaaagaaggaaagcgccatttaaagaaatccaaagagcccaatagaaaactttcagatgaacccagatattaaaataatgtcttgatttttttcatttggggaaaaagggccatttttggaaatagctgctcagtaagtttgacattgactcttagtatattcacaaaggatagcagagcagcctctaaccaagaatgagtatatattagaaaaataggaacaataattaatatcatctgcattgaattatttttccatcttaagtcttaaaagccatagtgtactaaaaatcgcaaaattwtgtttcaaaatgcttgaaacaaaaaacaaagacttcctttttaaaaagttgtataaagaataaggagaggtagagccagtgtttggggtagatggtataggattcatagacgacagaaagaaaatggaccttctcaattattattttgctttccctttcttttccatcaggaagaataattttaaagctgaaaatgcaagaacaggtctgaataagaaggaattgatgactaaggtggaaggaaataatgagggaaaacctaccaccataagtgattttgtcttgagcatttagacattatttccgtggtgttaaaagaacttgcagatttagcgtcagagtcactgtaggtcatctatgagaaattatgcagaatacgttatcagaaaatggtgagaaaggcaaaagtcttaatttttttcatttggtaaaaagggcgggttctggaaacaactacccagtaagcttgacattgattactagcgaactctagtacagtttattgaaaaatggtttaaggaaatttaatgacgattaatgagtatgaattttaaaagttcacaatgaatatgtcattttttgttgttgttgtgtttggttttggttttctgaggcaggatctcactctgtcacccgggctggagtgcagtggcacaatctcagctcactgcaacctccacctcccaggttcaagcgattctcgtgtctcagccttctgagtagctgggattacatgcgtgtgccaccatgcccggccaaatatgtcattataagccatttccttttcagtttgaggacaggaccgtccacataatgggtgctccacaagaatttattgaaatttaacctaatgtcttttattttcagcacagtatttaacaatactgcatttgatatcttgtgaataaaaaagtagtctgtagatgacagtactgctgagtatagttgccagatagcccagtctagaaaagtattaattaattgcttagtgtagactagatgaagtttttactggtattgtgctgaacttagttttttcttgataaacatttttaatgatactgaataaaaatattgaagttatgattatatttttctggaaaatatcttaatatctaataggtagatgaccaagctttaaaatgactttaacagattagaaccatgggcaaaaatcaacagggtgtaaatttgaaaggatatatcttatatcctgtgtttgggatgtacaatagcaaatacatgtggtagagatctgaaattatcagatcatcacaaccttaatattggcttatacgtatggctctgtttaaaaaatttttttttaggccgggtgcggtggctcacgcctgtaatcccagcactttgggaggccacagtgggcggattgcgaggtcaggagatggagatcatcctggctaacacagtgaaaccccgtctctactaaaaatacaaaaaattagctgggtgtggtggcagacgcctgtagtcccagctactcgggagactgaggcaggagaatggcgtgaacccgggaggcggagcttgcagtgagcccagatcgcaccactgcactccagcctgggcgacagagcaagactctgtctcaaaaaaaaaaattttttttttaattccactggcatagactttggttacattaataaactaggtgatggggaattacagcattcctgttatgtgttggtcactcaacatttggagttcagttttggatataatcaagttttatgaggagtttgacatactagtgtttttagagaatggtacttaggtatggtagatctcttagaaaccaagtaacttataaggagtggttgacagaattggtaattggaggaatcaaggggggaaattaattgcaatattttagaataagtagtttttccttttatatagaagaagcagctgactggtttggtattgctctagcacaagggtggcaaactgtggtctaatctcactgactgtttttgtaaannnnnnnnnnnnnnnnnnnnnnnnnnnnnnnnnnnnnnnnnnnnnnnnnnnnnnnnnnnnnnnnnnnnnnnnnnnnnnnnnnnnnnnnnnnnnnnnnnnnnnnnnnnnnnnnnnnnnnnnnnnnnnnnnnnnnnnnnnnnnnnnnnnnnnnnnnnnnnnnnnnnnnnnnnnnnnnnnnnnnnnnnnnnnnnnnnnnnnnnnnnnnnnnnnnnnnnnnnnnnnnnnnnnnnnnnnnnnnnnnnnnnnnnnnnnnnnnnnnnnnnnnnnnnnnnnnnnnnnnnnnnnnnnnnnnnnnnnnnnnnnnnnnnnnnnnnnnnnnnnnnnnnnnnnnnnnnnnnnnnnnnnnnnnnnnnnnnnnnnnnnnnnnnnnnnnnnnnnnnnnnnnnnnnnnnnnnnnnnnnnnnnnnnnnnnnnnnnnnnnnnnnnnnnnnnnnnnnnnnnnnnnnnnnnnnnnnnnnnnnnnnnnnnnnnnnnnnnnnnnnnnnnnnnnnnnnnnnnnnnnnnnnnnnnnnnnnnnnnnnnnnnnnnnnnnnnnnnnnnnnnnnnnnnnnnnnnnnnnnnnnnnnnnnnnnnnnnnnnnnnnnnnnnnnnnnnnnnnnnnnnnnnnnnnnnnnnnnnnnnnnnnnnnnnnnnnnnnnnnnnnnnnnnnnnnnnnnnnnnnnnnnnnnnnnnnnnnnnnnnnnnnnnnnnnnnnnnnnnnnnnnnnnnnnnnnnnnnnnnnnnnnnnnnnnnnnnnnnnnnnnnnnnnnnnnnnnnnnnnnnnnnnnnnnnnnnnnnnnnnnnnnnnnnnnnnnnnnnnnnnnnnnnnnnnnnnnnnnnnnnnnnnnnnnnnnnnnnnnnnnnnnnnnnnnnnnnnnnnnnnnnnnnnnnnnnnnnnnnnnnnnnnnnnnnnnnnnnnnnnnnnnnnnnnnnnnnnnnnnnnnnnnnnnnnnnnnnnnnnnnnnnnnnnnnnnnnnnnnnnnnnnnnnnnnnnnnnnnnnnnnnnnnnnnnnnnnnnnnnnnnnnnnnnnnnnnnnnnnnnnnnnnnnnnnnnnnnnnnnnnnnnnnnnnnnnnnnnnnnnnnnnnnnnnnnnnnnnnnnnnnnnnnnnnnnnnnnnnnnnnnnnnnnnnnnnnnnnnnnnnnnnnnnnnnnnnnnnnnnnnnnnnnnnnnnnnnnnnnnnnnnnnnnnnnnnnnnnnnnnnnnnnnnnnnnnnnnnnnnnnnnnnnnnnnnnnnnnnnnnnnnnnnnnnnnnnnnnnnnnnnnnnnnnnnnnnnnnnnnnnnnnnnnnnnnnnnnnnnnnnnnnnnnnnnnnnnnnnnnnnnnnnnnnnnnnnnnnnnnnnnnnnnnnnnnnnnnnnnnnnnnnnnnnnnnnnnnnnnnnnnnnnnnnnnnnnnnnnnnnnnnnnnnnnnnnnnnnnnnnnnnnnnnnnnnnnnnnnnnnnnnnnnnnnnnnnnnnnnnnnnnnnnnnnnnnnnnnnnnnnnnnnnnnnnnnnnnnnnnnnnnnnnnnnnnnnnnnnnnnnnnnnnnnnnnnnnnnnnnnnnnnnnnnnnnnnnnnnnnnnnnnnnnnnnnnnnnnnnnnnnnnnnnnnnnnnnnnnnnnnnnnnnnnnnnnnnnnnnnnnnnnnnnnnnnnnnnnnnnnnnnnnnnnnnnnnnnnnnnnnnnnnnnnnnnnnnnnnnnnnnnnnnnnnnnnnnnnnnnnnnnnnnnnnnnnnnnnnnnnnnnnnnnnnnnnnnnnnnnnnnnnnnnnnnnnnnnnnnnnnnnnnnnnnnnnnnnnnnnnnnnnnnnnnnnnnnnnnnnnnnnnnnnnnnnnnnnnnnnnnnnnnnnnnnnnnnnnnnnnnnnnnnnnnnnnnnnnnnnnnnnnnnnnnnnnnnnnnnnnnnnnnnnnnnnnnnnnnnnnnnnnnnnnnnnnnnnnnnnnnnnnnnnnnnnnnnnnnnnnnnnnnnnnnnnnnnnnnnnnnnnnnnnnnnnnnnnnnnnnnnnnnnnnnnnnnnnnnnnnnnnnnnnnnnnnnnnnnnnnnnnnnnnnnnnnnnnnnnnnnnnnnnnnnnnnnnnnnnnnnnnnnnnnnnnnnnnnnnnnnnnnnnnnnnnnnnnnnnnnnnnnnnnnnnnnnnnnnnnnnnnnnnnnnnnnnnnnnnnnnnnnnnnnnnnnnnnnnnnnnnnnnnnnnnnnnnnnnnnnnnnnnnnnnnnnnnnnnnnnnnnnnnnnnnnnnnnnnnnnnnnnnnnnnnnnnnnnnnnnnnnnnnnnnnnnnnnnnnnnnnnnnnnnnnnnnnnnnnnnnnnnnnnnnnnnnnnnnnnnnnnnnnnnnnnnnnnnnnnnnnnnnnnnnnnnnnnnnnnnnnnnnnnnnnnnnnnnnnnnnnnnnnnnnnnnnnnnnnnnnnnnnnnnnnnnnnnnnnnnnnnnnnnnnnnnnnnnnnnnnnnnnnnnnnnnnnnnnnnnnnnnnnnnnnnnnnnnnnnnnnnnnnnnnnnnnnnnnnnnnnnnnnnnnnnnnnnnnnnnnnnnnnnnnnnnnnnnnnnnnnnnnnnnnnnnnnnnnnnnnnnnnnnnnnnnnnnnnnnnnnnnnnnnnnnnnnnnnnnnnnnnnnnnnnnnnnnnnnnnnnnnnnnnnnnnnnnnnnnnnnnnnnnnnnnnnnnnnnnnnnnnnnnnnnnnnnnnnnnnnnnnnnnnnnnnnnnnnnnnnnnnnnnnnnnnnnnnnnnnnnnnnnnnnnnnnnnnnnnnnnnnnnnnnnnnnnnnnnnnnnnnnnnnnnnnnnnnnnnnnnnnnnnnnnnnnnnnnnnnnnnnnnnnnnnnnnnnnnnnnnnnnnnnnnnnnnnnnnnnnnnnnnnnnnnnnnnnnnnnnnnnnnnnnnnnnnnnnnnnnnnnnnnnnnnnnnnnnnnnnnnnnnnnnnnnnnnnnnnnnnnnnnnnnnnnnnnnnnnnnnnnnnnnnnnnnnnnnnnnnnnnnnnnnnnnnnnnnnnnnnnnnnnnnnnnnnnnnnnnnnnnnnnnnnnnnnnnnnnnnnnnnnnnnnnnnnnnnnnnnnnnnnnnnnnnnnnnnnnnnnnnnnnnnnnnnnnnnnnnnnnnnnnnnnnnnnnnnnnnnnnnnnnnnnnnnnnnnnnnnnnnnnnnnnnnnnnnnnnnnnnnnnnnnnnnnnnnnnnnnnnnnnnnnnnnnnnnnnnnnnnnnnnnnnnnnnnnnnnnnnnnnnnnnnnnnnnnnnnnnnnnnnnnnnnnnnnnnnnnnnnnnnnnnnnnnnnnnnnnnnnnnnnnnnnnnnnnnnnnnnnnnnnnnnnnnnnnnnnnnnnnnnnnnnnnnnnnnnnnnnnnnnnnnnnnnnnnnnnnnnnnnnnnnnnnnnnnnnnnnnnnnnnnnnnnnnnnnnnnnnnnnnnnnnnnnnnnnnnnnnnnnnnnnnnnnnnnnnnnnnnnnnnnnnnnnnnnnnnnnnnnnnnnnnnnnnnnnnnnnnnnnnnnnnnnnnnnnnnnnnnnnnnnnnnnnnnnnnnnnnnnnnnnnnnnnnnnnnnnnnnnnnnnnnnnnnnnnnnnnnnnnnnnnnnnnnnnnnnnnnnnnnnnnnnnnnnnnnnnnnnnnnnnnnnnnnnnnnnnnnnnnnnnnnnnnnnnnnnnnnnnnnnnnnnnnnnnnnnnnnnnnnnnnnnnnnnnnnnnnnnnnnnnnnnnnnnnnnnnnnnnnnnnnnnnnnnnnnnnnnnnnnnnnnnnnnnnnnnnnnnnnnnnnnnnnnnnnnnnnnnnnnnnnnnnnnnnnnnnnnnnnnnnnnnnnnnnnnnnnnnnnnnnnnnnnnnnnnnnnnnnnnnnnnnnnnnnnnnnnnnnnnnnnnnnnnnnnnnnnnnnnnnnnnnnnnnnnnnnnnnnnnnnnnnnnnnnnnnnnnnnnnnnnnnnnnnnnnnnnnnnnnnnnnnnnnnnnnnnnnnnnnnnnnnnnnnnnnnnnnnnnnnnnnnnnnnnnnnnnnnnnnnnnnnnnnnnnnnnnnnnnnnnnnnnnnnnnnnnnnnnnnnnnnnnnnnnnnnnnnnnnnnnnnnnnnnnnnnnnnnnnnnnnnnnnnnnnnnnnnnnnnnnnnnnnnnnnnnnnnnnnnnnnnnnnnnnnnnnnnnnnnnnnnnnnnnnnnnnnnnnnnnnnnnnnnnnnnnnnnnnnnnnnnnnnnnnnnnnnnnnnnnnnnnnnnnnnnnnnnnnnnnnnnnnnnnnnnnnnnnnnnnnnnnnnnnnnnnnnnnnnnnnnnnnnnnnnnnnnnnnnnnnnnnnnnnnnnnnnnnnnnnnnnnnnnnnnnnnnnnnnnnnnnnnnnnnnnnnnnnnnnnnnnnnnnnnnnnnnnnnnnnnnnnnnnnnnnnnnnnnnnnnnnnnnnnnnnnnnnnnnnnnnnnnnnnnnnnnnnnnnnnnnnnnnnnnnnnnnnnnnnnnnnnnnnnnnnnnnnnnnnnnnnnnnnnnnnnnnnnnnnnnnnnnnnnnnnnnnnnnnnnnnnnnnnnnnnnnnnnnnnnnnnnnnnnnnnnnnnnnnnnnnnnnnnnnnnnnnnnnnnnnnnnnnnnnnnnnnnnnnnnnnnnnnnnnnnnnnnnnnnnnnnnnnnnnnnnnnnnnnnnnnnnnnnnnnnnnnnnnnnnnnnnnnnnnnnnnnnnnnnnnnnnnnnnnnnnnnnnnnnnnnnnnnnnnnnnnnnnnnnnnnnnnnnnnnnnnnnnnnnnnnnnnnnnnnnnnnnnnnnnnnnnnnnnnnnnnnnnnnnnnnnnnnnnnnnnnnnnnnnnnnnnnnnnnnnnnnnnnnnnnnnnnnnnnnnnnnnnnnnnnnnnnnnnnnnnnnnnnnnnnnnnnnnnnnnnnnnnnnnnnnnnnnnnnnnnnnnnnnnnnnnnnnnnnnnnnnnnnnnnnnnnnnnnnnnnnnnnnnnnnnnnnnnnnnnnnnnnnnnnnnnnnnnnnnnnnnnnnnnnnnnnnnnnnnnnnnnnnnnnnnnnnnnnnnnnnnnnnnnnnnnnnnnnnnnnnnnnnnnnnnnnnnnnnnnnnnnnnnnnnnnnnnnnnnnnnnnnnnnnnnnnnnnnnnnnnnnnnnnnnnnnnnnnnnnnnnnnnnnnnnnnnnnnnnnnnnnnnnnnnnnnnnnnnnnnnnnnnnnnnnnnnnnnnnnnnnnnnnnnnnnnnnnnnnnnnnnnnnnnnnnnnnnnnnnnnnnnnnnnnnnnnnnnnnnnnnnnnnnnnnnnnnnnnnnnnnnnnnnnnnnnnnnnnnnnnnnnnnnnnnnnnnnnnnnnnnnnnnnnnnnnnnnnnnnnnnnnnnnnnnnnnnnnnnnnnnnnnnnnnnnnnnnnnnnnnnnnnnnnnnnnnnnnnnnnnnnnnnnnnnnnnnnnnnnnnnnnnnnnnnnnnnnnnnnnnnnnnnnnnnnnnnnnnnnnnnnnnnnnnnnnnnnnnnnnnnnnnnnnnnnnnnnnnnnnnnnnnnnnnnnnnnnnnnnnnnnnnnnnnnnnnnnnnnnnnnnnnnnnnnnnnnnnnnnnnnnnnnnnnnnnnnnnnnnnnnnnnnnnnnnnnnnnnnnnnnnnnnnnnnnnnnnnnnnnnnnnnnnnnnnnnnnnnnnnnnnnnnnnnnnnnnnnnnnnnnnnnnnnnnnnnnnnnnnnnnnnnnnnnnnnnnnnnnnnnnnnnnnnnnnnnnnnnnnnnnnnnnnnnnnnnnnnnnnnnnnnnnnnnnnnnnnnnnnnnnnnnnnnnnnnnnnnnnnnnnnnnnnnnnnnnnnnnnnnnnnnnnnnnnnnnnnnnnnnnnnnnnnnnnnnnnnnnnnnnnnnnnnnnnnnnnnnnnnnnnnnnnnnnnnnnnnnnnnnnnnnnnnnnnnnnnnnnnnnnnnnnnnnnnnnnnnnnnnnnnnnnnnnnnnnnnnnnnnnnnnnnnnnnnnnnnnnnnnnnnnnnnnnnnnnnnnnnnnnnnnnnnnnnnnnnnnnnnnnnnnnnnnnnnnnnnnnnnnnnnnnnnnnnnnnnnnnnnnnnnnnnnnnnnnnnnnnnnnnnnnnnnnnnnnnnnnnnnnnnnnnnnnnnnnnnnnnnnnnnnnnnnnnnnnnnnnnnnnnnnnnnnnnnnnnnnnnnnnnnnnnnnnnnnnnnnnnnnnnnnnnnnnnnnnnnnnnnnnnnnnnnnnnnnnnnnnnnnnnnnnnnnnnnnnnnnnnnnnnnnnnnnnnnnnnnnnnnnnnnnnnnnnnnnnnnnnnnnnnnnnnnnnnnnnnnnnnnnnnnnnnnnnnnnnnnnnnnnnnnnnnnnnnnnnnnnnnnnnnnnnnnnnnnnnnnnnnnnnnnnnnnnnnnnnnnnnnnnnnnnnnnnnnnnnnnnnnnnnnnnnnnnnnnnnnnnnnnnnnnnnnnnnnnnnnnnnnnnnnnnnnnnnnnnnnnnnnnnnnnnnnnnnnnnnnnnnnnnnnnnnnnnnnnnnnnnnnnnnnnnnnnnnnnnnnnnnnnnnnnnnnnnnnnnnnnnnnnnnnnnnnnnnnnnnnnnnnnnnnnnnnnnnnnnnnnnnnnnnnnnnnnnnnnnnnnnnnnnnnnnnnnnnnnnnnnnnnnnnnnnnnnnnnnnnnnnnnnnnnnnnnnnnnnnnnnnnnnnnnnnnnnnnnttgttcttcctcttcaaaattgtttaggccattctgggtctttttcatataaactttagaaccagtctgttgaaatccacaaaataacttgctgaacttgctgggattttttttttttttttttttgagatggagtcttgctctgtcacccgggctggagtgcagtggcctgatctcggctcactacaagctctgcctcccagattcgtgccgttctctcgcctcagcctcccgagtagctgggactacaggcgccygccacaacgcccggctaattttttgcatttttagtagagacagggtttcactgtgttagccaggatggtctcaatctcctgaccttgtgatccacccgcctcagcctcccaaagtgctgggattacaggcgtgagccaccgcgcccggcccttgctgggattttaattgggattatgttttaattaagatagattaagttgcgaagaaatgacatcttgacagtattgtcttcctatccatgtacatggaatatctcttcatttatttagattgccagtaattcattgagcatttactgagggtttaccgtgccttagccctaggacagaaaactaaggataaacaagttttgttgttgttgtttttgagatggagtttcactcttgttgcccaggctggagtgcaatggtgtgatctggactcactgcaacctcctcctcccaggttcaagcgattcttctgcctcagcctcccaggtagctgggattacaggcatgggccaccacgcctggctaatttttgtatttttagtagagatggggtttcaccacgttggtcaggctggtctggaactcctgacctcaggtgatctgcctacctcggccttgggattgcaggcatgagccaccacgcccagcccggcgttaatttcctttcattagtaaaggaagatagtgcttttatagtacattagtaatttactaattttttttttgtaggatcaaaagaaaaggtagtttagcccttgcatccttagagaattcttttgaagtttccaggtctttaaacttctgcttctttcttttcttggtgtgtcagtataggacacaatttaatttgacatatgttagatttgttttcatgcagtggagtaattttttctttcaaggagcttccaagtgaacagtataccttgtctgcagccagacaacagaatgggttagctcactggctttatacctttgtaggctggaagtgtcgggtccagattaatttattattgccatgattataatggaggatacatttttctataaaaatactctaatcaatatactgtttcaaatagtttgcagtctttttttttttaatttaaaaaatttttaaattttattgagacaaggtctcactgtgttgcccaggctggagtgcagtggcgtgatcttggctcattgcaacctctgcctyccaggctcaagtgatcctcccatacctcagcctccccagcagctgggaccacagatgcttgctactatgcctggctaattttttgtatttttatagagatggggtttcactctgttgcccaggctggtctcraactcctgagctcaagtgacccaccagccttggcctcttaaaatgctggkattacaggcctgagccattgcacccagcagttgcagtctgaartgtcagaattttaattctrgtaatacccctaattgcaattttttgttctaataaaatgctgtataaaaataagtaatgttaactggttttcatgaggcagtatcagagctaaaaataccagtgggcacagtggtatcccagctccttgggagactgaggtgggatgattgcttgagcccacgagatcagggccagcctgggcaacatagcaagaccccatctctgataagaaattaaaaaataggccaggtgtggtggctcacacttgtaatcccagcactttgggaggctgaggcaggtgggtcacctgaggtcaggagtttgagaccagcctggccgacatggtgaaaccctgtctctactaaaaatataaaaattagccaggcgtggcgtgcacctgtgttgccagctactggggaggctgaggcaggagaattgcttgaatccaggaggcggaggttgcagtgagctgagatcgtgccactgcactccagcctgggtgacagagtgagactccatccccaaaaagaaaaaagaaagaaagaaataaacaagctaaaatatttcaaaacctattacagagtattgaagtaggagttaagagtgcagggttctgtccagctccactactacctaattatctgaccatggccctagyttttctagatttcatttttcatttgtaaaaccaagaagttggattaaggtgaccaactctaatagtcttttaaggctagaaaaagaaaaatgttttttccatgttggaatatttaaatagataaaatcagtgtggtgttagccttttttgggtgacatttattcttatataatttcaaataagaatagcaaaggaattcctttataccttctatgcagtttccgcaatttttaacattttaccccctttgctttattactctgtctccctctatatatgtatatataaacagatttttttctttttctgaatcatttaagaataaattggaagcattgtgctcccttaccacaaaatatttacatctgtattaggcaagaacaagggcaatctctcatttaaccatagtacattaatcaaaattmggaaattgttttgttttgtttgagagagagtctcactctgttgcccaggcagttagtgcagtggtgggatcatggctcacygcagccttgacctcccgggctcaagcaattctyccacytcagcctccttagtagctgggaccacatgcatatgctaccatgcctgactaatttttaaaaattttttgtagagatgaggtctccccatgttgcccaggttagtctcaaactcctaggctcaagcaatcctcctgctttggtctcccaaagtgctgggtttacaggtgtaagccactatgcccggcctaaagtttggaaatttaactttgatacaatattaytatctaatccagaatccatattgaaattgtccattttccctagaatctacagaaagtagtttgagaattggtaagttatagtactgtgaaaaacaaccctatataactacagtttgatatttgtttacagttaattttaggtaaaatttacatatagtgaaatgcataaattttaggtgtataattcaatgaattctgtaaaatgcttatacccatgtaacccaagccctgtcaatatatagaacatttttatcactagcaagttccctcagtgccacttcttagtcagatatcactctacctacctttggttaaacacttttcttatttttttctgattagtttgcctcttctgaaacgtcatataaatagaattttttttttcttttgagacagagtcttgctctgtcatccagggtggagtgcagtggcacaatctcggctcactgcaaccttcacttcctgggttcaagcagttgtcctgcctcagcctctggagtagctgggattagaggtccccgacaccatgcctagctaatttttgtattttcagtagagacggggttttgccatgttggccaggctggtctcgaacccataacctcaggtgatccatcagcgtcggcctcagccttccaaagtgctgggattacaggtgtgagccattgtgcccagcccaaaacttcatataaatagaattatacactctcctttcttgtgtctggcttctttcagtcaacataatgtatgttaaggtttattcatattgttgtatgtatgaatactttattctttttrttgttgactagtattccactttatgaacatacagttgtgcattatcctgttgatggacatttgaattgcttcttgtttagttctatttttgagtaaagttgttttgaacattcttgcacaaaaatttgaaggtgtttattttcatttttcttagataaggtaaatgcctaagaaagaaatttgctgtgccatcgagtaggtatatgtgaatctttaagaaactgccaaaccttttccctgaacagttgtaccatttaaaaatcacatcagcaatgtttgagagtacagcttgcactaaacacccctctcaacatttggtattgccaatcattttattttacacattctattatgtacctctttgtggttttaatttgcattttcctgatgactaataatgttgagcacttcttcatgtgcttattggccatttttctgtcttcctttgtgatgtcttttaaaatattttgcccatgtctttttatttttgagacggagtcttgctctgtcgcccaggctggagtgcagtggcatgattttggctcactgcaacctccacctcctggattcaagcaattctccttcctcagcctcacaagtagctaggattacaggcttgcatcaccatgcctggctaatttttgtaattttagtagagacgaggttttgccatgttggaggctggtctcaaactcctgacctcctgacctcaggtgatccgcccaccttggcctcccaaagtgctgggattacaggagtgagccaccatgcccggccccttgtcttaaattaaaacaaaaaaaaamaaaaactttaattcgtggattctttcttctgccagcccagatctactgttgagcccctctatggcagtttccattttgtttcttgtccttgtcaactccagcggtcagtcagtgattggtcggaggttgtacctagctaagccttttaatttaagccagtgatgttttcaccttttactgttgaatctgtgtttctggttaggagactactttcatggttgagggagttgatgaatttgtactgtgttcagccaaggagtmgaggctcagacrttccctctctatttacttctcagaaggcacagctttgggcatgagaacaatcttctagaacaccaggaagactatgctcttagcaggtctctgtttccttcattgatttcttcattgaatttttggctggtctgtctctattggtgtcacagcaagctgttagtctccactgattgctagctgctggctctgttgtttttgacagtgcccagagcataaattgckccatagtcttgatccaaataaagttgggcacctcggcaggggcaaggtattgcccgtctttgataatcctttccccwtcctttcctggaaacaatctctgtgctatggagcaggagttggagagggtggtggtggtaatgggggcctgttcttcagtggctctcctatctgggtcctccctaaatagcagaagcttggggttggggagttaggagctgatactrtggctcactttgcatcttcctcagcacaaagccttttgagatgcaatctctggatgttcactagttgcaaacrtacaaacctggaatagctctaggaaactgggagtagtgggaactaccactgagctgctgaacccattggaacaactcttctgcaacacagagctgtggggaatagaggacwgcgtaggctgtcattakctgttatgctttgatcttccctaccgagtagcatttaggagtcagggaaagggtgccgctttcaggctgccttgaaggctctcgcatagcccttccacacacacagctgttgagagtggggcattcttcctactgtccttaccgaattccatagattaggcttgtcttaagcattttaatcaatctccagagactttgaatgattgtctttggtaattttgactagtttaatagatgtctctctagaaaagaagttttacctaactcctcacatcaccattcccaatacagttgacccttgaacacacaggtttgaactgtgcaggtctacttatttgtagattttttgttttttgttttttttttttgagacagaattttgctcttgttgcccaggttggagtgcagtggcacaatctcaactcaccrcaacctctacctcccaggttcaagcaattctcctgcctcagcctcccgagtagctgagattacaggcatgtgccaccatgcccagctaattttgtatttttagtagagatggggtttctccatgttggtcaggctggtctcgaactcccaacctcaggtgatcctcctgcctcggcctcccaacatgctgggattacaggcgtgagccatgcactcggccaattttttcaataaatatattggaaaagttttyggagatttgtgacactttgaaaaaactcacagatgaactccgtagcctggaaataccaaaaaaattaagaaaaagtatgtcatgaaaacataaactatgtgtaggaaatgctgcaggataattaaggaatcagagagaccgaggggttgaggaggagttatttaattatttaggtgcaccaacccagttggattaacatccaaaggactgagccctgaacaaagagtcaagctaccttttaagcatttcgtggggcggggggagatctgtgcagggggaagcatattacagaagtgagaaacaaagacagttatttaattaagacgtgcattacattatttcttacttttcaaggaacaacatgttttacgacttgagattatctgtctagtgaccttgaagctgcacagctcgagagtcttcacaatgcctgggaaggggtgagataaggctcactagccacagagagaaaaacaggcagttaattttaaaggactccagctctttctcttcctcggggaattgggttttcttacatacaactgagtttttgcttatamagtctttaatttcttttaattcctgttccagtactagtctgttttataatttactaccataaaatatacacaaatctattataaaaagttaaaatttatcaaaaatgcatgcaaacacagactgcatggtgccatgattctagggattccaggaggcactgactcacaggtaggcttttctcctggtattgmgagccaggatggggtcgatgctggagtctagggcaatttgacttttggcatgatatcttctgggggatggcagttaggtgcttraaatgaaatattttgggttaaaaattagtatccctggctggcgtgttggctcaagcctgtaatcccagcactctgggaggccagggcaggcrgatcacctgaggtcaggagttcaaggccaacctggccaacatggtgaaaccccatctctactaaaaaatgtaaaaattatttgggtgtggtggtgtgtgcctgtagtcccagctacttggaaggctgagacaggagagtcacttgaacttgggaggtggatgttgcagtgagccaagattgcaccactgcactccagcctgggcagcagagcgagactgtctcaaaaaacaaaacaaaaaacaaaattagtctcccggagcagttcaagaaatggagattaataatcatttatatcttttccttaccagggtcatttgtatgtttgtatggtctgagataaatcrtattcttttttttttttttgtctctagctgcttcattcagttgctacctaggtaacatagttggaagctacttaaagcatgggatagaagactttataccttcatcagtgttttctttaatcaaattactttcctcctagtaacaggaactgctgctttgcagwttcacatcgtattctatagtaaatgctgctccctggattcaggcaacattgtgcctctgctagatctagctgtgataggtatagggaataggaattgtgatgtgacgtgttagattgaaggaaaggatccctatgcagttttgaaaaaatggcactctgaaagattagccctggataaagtgctgtatggggaatttgggcaatcagagagcacatgagtcctgaatgggatcaggggaagtggtatcgaagtaaktaacagataaatctcaaaaacgtaatgttgagcaagagaaaacagacacatcaagtacatactatacgattcatttatacaaaggttaaaaatgggcaaaacccatctgtaggattagaagtcaggatatagttattcttgtggaagggaatgggtagttactcgaaggagggcataaaagggggctgttgagatgctggtgatactgtttgttgatctgggtacattggtatgttgtgtttgtgaatattatatgagctacacacttacgtcctgtgtaattttctgtatgcatattatacttcaatattacattaaaaaagaaaatgttcgtagtaggtcagttctgcatatatggagatcatgtctaattgcccataattgggaattggataaataagaactggttaaattgtgttatgttccccatactcctggggaataccrtatcattgtttttttctttagacaaggtttcactctgttgcccaggccaaagygcagtgatgcgatcacggctcactgtagcctcaacctcctgggcttgggccgggcacggtggcttatgcctgtaatcccagcactttgggaggccgagacgggcagatcacaaggtcaggagatcgagaccatcctggctaacatgtgaaaccccgtctctactaaaaatacaaaaaattagccgggcgcggtggcgggcgcctgtagtcccagctactcgggaggctgaggcaggagaatggtgtgaacccgggaggcggagcttgcagtgagccgagatcgcgccactacactcagtctgggcgatagagcgagactccgtctcaaaaaaaaaaaaaaaaaaacctcctgggctcaagcgatcttcccacctcagcctcctgagtagctgggactacaggcatgcatcaccatgcctggctaatttttgtatattttgtagagacaggatcttgctttgttgcctaggcttgtcttgacctcctgggctcaattgatccacttgccttggcctttgaaattgctgggattacaggtgtgagctaccacacctggccctatattgctatttttgagaaagaataattctatatgtactgatatggagttgttattaaataaacaaattttcagattatatgttccatttatagaaaaatgaaacattatgtacatatgcttatatatacatagaaattacctggaaggacacacactaaataatgaacagtactttgycttgaggattggtttatgggtagtgtgactggggaacattgaacttttacatgatattcttttataccattacatttttttttctgtaagcatggattactcttataacaaaactaatttaaaaagtaaattacaaatactatttttaaaaggcaaatagattgggagaagtratgttgctattcaggtaaaatctccaaagtgatatgaaaagaaaaaaaggaattgtgggagaaatagagcttcctaagagaagttaagaagagttaatatagttctaccttacttcaccccagaggatgaggcagattttaatgagtttctgaaagcaaagtgattgtaggcacttaatgcaaagtataactgaattgcctctccaattcttttagttgatccagagtaccagaaggaagcagaacagagacatcgagaattggcagctaaagctggaggatttaatgactttgcaactttagctgtcatctttgaacaatgcaaatcaaggtatgtaaggtagtcctttgtcctgaaaaatgtcaatttgatgtrtagttccaatacgtacttatgatgtggcttgtgacactaacgttcagtgaagatgatattgacttcaaggtattttgaatttcagtgaaattatctatgtcagatgactattgcttagtaggcatttattatataacattgattctcttstttyctcctcaaacctttactgaaaatgaccttrtagaattttgcttctatataggtagcctagattaaaaaatgattggatatttgttattgcatatataagtaaagaaatccatttacaaattattttttaatttagtcaggggcacattcattaatttaaatgtttttttcaagtttcctaaaattcttttttagtacttggacaggtctcctgaaggaactgacagttgtttatgggtttccacttttgtaatagaaatgagaattttagattgtcttttacttagagaagatattttaaagataccagttttttgttttgcagtggagctccagcttcatggtgccaaaaacactggattcattggaggtgcttattttctgcatttcgtgtggaagctcaacttcgagaactaatcaggaagcttaaacaggtgattgccrtaatgttttttttcttgagtagcattttggacctatatatttcatattgaagtttcattgatgtacattagcaccctttctattctaccacccttccattctatttgtttctatgacctccttgaccccatgaaacattcctagtagtgataaaagaattgtcttcacagaaatgaagatatttaaaaattgctttcctgatatataattgacgtgtgataacctacacatatttaatgtatacactttgatgagttttgacatttgcgtaaaacaactatcaagataatggtacatatccatcatctcccagttttctcatcctcccccccaccyttttttttttttgagatggagtctcactctgtcacccaggctgaagtgcagtggcgtgatctcggctcactgcaatctccacctcccaggtttaagcaattcttctgcctcagcctcccaagtagctgggattacaggcttgcgtcaccacacccggctaatttttgtagttttagtagagatggggttttgccgtgttggccaggctggtctcaaactcctgacctcaagtgatccacctgcctcggccttccaaagtgctggaattacaggcatgagccactgcacctgtcctcattccctttcataatccattgtctcacctactaggccctcctgccccaccaacccaggtaaccactaatctgctttctgtcatgatacagtaagtcctcacttaatgtcatcagtaggttcttggaaactgtgagtttaagcaaaatgatatacagcaggccctagaaaaatattgttttattcaccattgttttaacactgatgagagaaaaaaaaaaatcttaaaaattttgcttaactttgcagtttttaagaacttatcattgacattgaagacttactgtatataagtttgcatttcctagcattttacataaatggaatcaaacagtatatgctcttttttttttggtctggcatcttttactcctcatgattattagtttttcaatttatatatcttattttggtaaaataattaatataaaatttacctctactgggcattgatgattaacccctgtaatcccaatgctttgggaggacgaagtgggaggaccacttgaggccaggagttcaagaccagcctgagaaacagtgagaccctgtctctacaaaaaaattaaaataattagcttgttgtgttggcacacacctgtagtgctagctactcaggaggctgaggcagaaggattacttgagtccaggagtttgaggttgcagtgaggtatgatgccactacactctagcctgggcaacagagcagcagcaccctgtctcaaaaaaatttttttttttttttttttttactgtttttatgcgtacaggtcactgcacacttaaaacatttacaatgttgtgcagcccttaccacttctccatctccagaacttttttttatcatcccatactataataaaactccataaccattcaacaataactccccattcccgacagtgcatggtagctcacgcctataatcctagcactttgggaagccgtagtgtggggatcacttgagcccagcaagtttgagaccagcctgggcaacacagtgagaccttgtctctactaaaaaaaaaaaaaaaaaattagccaggcgttgtggcacacacctgtagtgtcagttactcagcagggtgaggtagaggattgcttgagcctaggagatccaggctacagtgagctgtgatcacacaacttcactgcagcctgggtgacagagtaagaccctgactcaaaacaaaaacaaaaaaacctacccattatcttctttctccagcctctggaaaccactgttataatttctctgtttcgttatgagtgttttctgtttgccttatcttaaagttcattaatcttttctcctgcagtgtctagtctaatctgccattaatcccatctagtatatttgtcatctcaggtgttgtattttcatctctagatgttggatttcagtctttaaatttttacattttatttttcaggtctctactttttgaacatatgtaatccagctatacagaaaattataataaaatataattagatctgtgtcagttctaggttgattttgatagatgtcctcattatggattgtgtttttttgcttctttacatcatacctgataatttttcagcggatgccaaacattgtgaatttcaccttgttgggtgctggatatttttgtgttctagttacttggaaatggtctttggtctttcttgttgggtcttgcttgcatgatttgttaggtgggatcagagcagtgctcagtgcagggctagttattcccctctactgaggcaaggcccatctgagtactcttcctaacatcacatgaattactgtagtgtagtattctcatgtggcttataggaacaggcgccattactagccctgtgaaaacaccatgcccttacttatccttttaagaggttcttttcttgggctggtagtttcctcacattcatgtgctaatcactactcagctcaacacttgaggaggaccttctgcatctctctggagttgtgtctttgtgcacttctcttctctcctgaactcttgtcctgtgaattctagccaccttggtcttcctggactcccagctttctctccctaacccagggagttctctgagttccatttgggctttacttccctgtaccttggtctgcagtctttatcaaggctgaagttggggcagttgttgggcgtactgcgtttatttcctgtctctgtcctttattgcctgatattacagtgttttggaaatcattatttcatgtattttttccatttttttggtttcaggtggaagggtaaatctggtctctcttaatctatgttggccagaaacagaggtctttagaaatgtggatttttcaaaataaaagattatttcaaattgtactatgagatttaccactctctacatattctttttatagcaaagtgatttcccaaaagagacctttgaaggccctaaacatgaagtactacgaagatgtctttgtgcgggctatttcaaaaatgtagctcgaaggtaagcaataaagacttgagagatggatcaagatataatactgtatttgactataatattggactatttaatattaaacattgaagatttgatttaagctctgtgatgattatgacatgaattacagtgacgagggagagctacagtgacgagggagagctgcagtggctcagaatgtggtattagagctcaagtagggtaggaggggtatgtttgtagggtggctgtccagcatgggttatcttcacttaaggcaagtaacaagagttttctttcagagaggtggccctgtgtatagtgtgaaagccaagtaggttgagcatagcatccctgaggaagggtagcttggcatggagtgctagggcttgagcaaggtggggaggggttatttggtttggggcatcagtcagagtgtagtgaggaaggcatctttatagagaaaggggtaacagtgatggtgatggagattcattaaatacagaggaattgaacacataactctrtgagtgataatggtgaagggagttagaaatagcgaaagtgagaaaataggaatgatctctgtgctgttggattgaaatttcagtgtatcatgatgaagttatgggtttcattatagatggatgcatggatggacactggaataaaaatagatgttagtgtgtgtatatagaatgtatttgtatgtatgtaaatatttatatgtatatatgccctagctctgagataataacaatgaatagacatagtgcccagatcttgacttgggacatccatctgccacttaaaggagtcaggggtctttggagaaatggggctgggaaaatgcaagatgagcccagaatatcttattttgccagcaagtaaagaagtgattaacaaaggttgaggccaygtcagaagaacataggagccagcatgaagaggccccaagtaatcaaatatgagacactttaagcatcaaaataagtagtgatagtagcggattattatgcacttaataaaatgtgaaatcgtgtctatcgtggtataaataaatgagtaaaagtttattgagaaatggaattgtttacaagcacctctccataaaatttttgttaattacaaaagcaaaaagtaactttacagtggagaatcctggcatatgtgacctaaatcaagcaatcaaagtgaacataatgaaataaataaaaatcatgttcttcctgataggatacaatgagaaaaacacagcattatgtctgtgatattcctgctaaagatgcataacctgaatctaatcatcctgaaacagacaaactcaaactgagggacataccacacagtaactagccttgacatctttaaaggtgccaagatcatgaaagtcaaagactgaggaagtattccagaatgaaggagaccaaagggaaatgaaaaataaaggcaatgtatgattctgaattacatccttttgctataaaggatattattaagacaaattggtgaaatgtcagtggggtctgaggattaattgttagtaatgtatcagtgttaatttcctggttttgatggttatagtcatgtcggagaatgttcttgattgttgattgtaagaagtgcacagtcgagtatttgaggatgatggggtattaggttggcagtttgctgtcaaatgattcaggtaaaaatttttttactctcaacttttctgtaaatttagattgtttcacacttttaaaaatatggtatatcttggttaccctctgtatgccaaacactgggcaggtactaaaaatagaaaagtagagtaacatgagtccttacatcattcttgatgatacctgagtctaatggagggtacagatatgtaagtgaataattacagtgcagtctgatctgggttatactatgaatatatacaaagtactataggaaataaattatgacaaatgaactaggtttatttttttgacaagttttttggaatgacatttaggtagggtaatgtagaagaaaataagggcatgaatcggaaaaatgatagattaattgtcaagttttagagtagtgaaaaaatcatccctttaaaaagagatgcagcatagtataacataaagaaaccatatttaagtcagaagaactgtttaggacttggttttaccatgcgttagcgctggtgatcttgagaagtctagctaatttatttgaattttagttttgactttttaataaagttcctggctctcaaagctcatagattattgttaatatttgtactgattccttatacctaattgtagtgacttatacctaattgtagtgactgtttaacctgtataattaatttaagatgaattggtagagagcttgtagtgacagttgaataaatgtaaacctctgcttataatgctgtttgtagtagaacatattgtaattgttcattgctgaatgtaatgctccatttacttcattgctttactgttgtagtctttatcattttgtttttctgtttatagatctgttgggagaacgttttgcacaatggatggtcgtggaagcccagttcacattcatccttcctcagcagtaagtacttcatttttaataaagggaagaaatttgtaaagttgtagaaataagtaatatacaaatgtcttctacttttcactttggagttaaatttacatatatctatattacatagatctataagggtattggttggcctgtgcctcctgtttgaagaagataggaattaattgagaaggattyggactatttggttggtttaatgtggaatagggcaggttattgagttaccatcattaaaagaaatgttttgtatagcttcatgaacaggaaaccaaacttgaatggatcatttttcatgaggtattggttaccaccaaagtctacgcaagaattgtatgcccaatccgttatgaatgggtaagagacttgttacccaagttgcatgaatttaatgcacatgatttgagcagtgtggcccgacgtgaagtgagagaagatgcaagaaggagatggacaaataaggaaaatgtaaagcagctaaagggtgagtaaatcatttgttctactcttaaccactatgccatactgcttcccagtagtacttcactatttttgtttataaaaatgttgtgacccacctgggcaatgtggtgagatcccatctctagcaaaataaaaataaaaattagccaggcatgttggtgtgcacctgtagtcccagtgacttgggaggctgatgcaggaggatcgcttgaacccaggagtttgaggctgcagtgaactgtgatttcaccagtgcactccagcctgggggtgacagagtgagacactatctctaaaaaaaaaaaagtgatgatttatgcattattaactcagaatcccctttgtttccaaggggctttttctttctttctttctttttctttcttctttgagacggagttttgctcttattgcccaggctggagtgtaatggtgtgattttggctcactgcagcctctgcctcccggttcaagctattctcctgcctcagcctcctgagtagctggattacaggcatgcaccaccacgcctggctaagtttgtatatccaaggggctttttctatgaaataattaggaccctggttgggaggcataaatagttgtggtactgaaataggacagaaagtttttcagctcacatacacagaaaacttcttagtaaagctttttgaggctgaatgatgaagcatattgtattttctttatttgacatcactgcaaaatggaatggtgaagagttttgccgaataaatcatagaaaaatctttagaaatgttagccactagggaggccaggcatggtggctcacgcctgtaatcccagcactttgggagaccaaggcgggcggatcacgaggtcaggagatcgagaccatcctggctaacacggtgaaaccccgtctctactaaatatacaaaaaactagctgggtgtggtggcgggcgcctgtagtcccagctactcgggaggctgaggcaggagaatggcgtgaacccaggaggcagagcttgcagtgagccgagattgcgccactgcactccagcctgggcgacagagtgagactccgtctcaaaaaaaaaaaaaaaaagaaaagaaatcttagccactaggtgttctattacagtgtaataacactgccacatgcttgaattagggtcagtttttctgactcattggccttggtgctcttaattttgtaaccatagactacattgcttttgaaagggcaaaatttaatttttctctttattgtttttactttgttaacactgaaaaatcagggcttctctttctcttaacatttctagtactgaatctcaaagctaagttttattggattaatttgtaatgttttcagatggaatatcgaaagacgtcttaaagaaaatgcaaagaagaaatgatgacaaatccatatctgatgcacgggctcgtttccttgagagaaagcagcagaggacccaggaccacagtgacacacgaaaggaaacaggctaaggtggtgaaccctccaattcaggaagtgggaaaaggagccaggaaatgtgcttctactttgccagttatttcagacagcactaccaagaggaggtggtcagcacttgttattggcctatgaactaaaagcaaatcaaagctcataaatcaaagctcatcagttcccataaatgcagttgtcaaagaaaagatttggttgccatagtcataagcaatgatacatgaaaccaatgaaagacagtacatgtaataatattttcctcagtacaattttgctggccttaactggtatcaaacgctgtcattgagatgttttcaaagaacattgagttgtatttaatcagcgtgtactccatttgcattgaagcattaaaaattatttttcttaaaatctctttaaggccttcttgttgctgttagaatagtgctatatatcaggtatgtgaccatttatttcagaaggctgaacataagaggtttctactcagcaatacttagatgtctaactgtttaattgctacagagctttatagatatttagagaaaagacttaatcaattagtaaataaaattgcctatggcaggattctttcttgaattaatattaatccttaaattgatttttctgggattatacaaattcctttttatataaaagtatattgtttaaaacagtagctatagccattaaccaaaggacagatgatatatatatatatgatatatatatatatataagttcttttttagctgtacctacgtacttatatcagcmccatgtatgtaggtgtgatagtactttcaaacagcgcctccacctggcctactctgttatttccacctgtttgggtagggccatttaacttccattatgccaaacttgggatgggattttcgaagcagacaacactatttcatcgtgtttcaaattggaaccttgaggctagttagtatcacactcaggccacactcagcacttgcccactcttgtttactgccttgtattctagttatttgtgtatttgtctccctcactagattatacgctccttgtgggcagggactgtgtcttttttcatctttgtatctttcatgcacctagcatagtgctttgcacatagtagtcactcagtgtttgttaaataaagctattagtgtcattaaaattcaaaagacagtataatgtgtgtttttagatattttgtgtaaaaattaagaatctaaattttttatcggtaactcttctagttatttcctttggaatctagttttatgttcaataatagaaacttgaaatctttatcaaaaatcacaaggacccaaattcatgtatttgtccctaaagtaaggtgagtgatgatggtttctctaaacctttccagtgttttaatttgttaatttttttttttttttttttgagacggagtctcactttgtcgcccaggctggagtacggtggcatgatcttggctcactgcaagctccgcctcccaggttcacgccattctcctgcctcagcctcccgagtagctgggactacaggcatccaccactatgcctggctaattttttgtattttttagtagagacggggtttcaccgtgttagccaggatggtcttgatctcctgacctcatgatgcgcccgcctctgcctcccagagtgctgggattacaggcgtgagtcaccgcgcctggcctaatttgttcatttttatctttagtgctctagacactgttattagcacatattaatcatttagttctgtcagtttctcttctcaggtgtattgtataagggcatatcctcagatgtggtgggagtgtgtggattcttggaatgagagctcttctagtttagtaaatattaagcatatattctgaatctacacctcacactcaaattatatctgttgtttcagtaatgtcctttatggcatttttctgtagttcaagatttagtctaggatcacgtattgtatttagtctcttaatctggaaaaagtcctcagtccttgtctttcacaacattaacattttaaaataatataagctagttattttatagaatgttctcaatttgggtttctccaatgtttcttcatggttatgcatttttaactggaatactgcataagtaatagtgtcatggtatcacgtctggaggtacatggcattttccccttgctggtgttattaatgttaattacttattagggtgctttttaaattatatcaacctggttatccttataattcataaataatttgagggagagatactttgacattatataaaatatctcgttcctcataaaatatgacattttgtatttaccatcaattgatgattcttgcctgaatccattttattcttatggctgcaaaatggtgatttttttttctaattcttttctatatttgttggtattatattgtaaggaagagttttccttgaaggatgaatgtctgataaacgggtgggtgctaagaagagcatggatcaagacagagaagtatttatagaaagcccagggggtgtttgagatggtggcaaacagttgagtttacttggtgcatagaatatatataggagagtaggtggctcaaactgttaaggtcagattacagaaggctttgtaaaccaatctatagaatttggaattattttatggatttgttagaagggaaggacatcattacagttttgggataattgtgatagtgttattgataaaaaatttctgtatctcagtttgcattgagaggactgtgagagcagtagtatcaagggaatgctggatctagttaaggcaagaacatggaagcagccttgcaggaaaggtgggttttatggaggagtttgttcttagaagaatgggaatacaccttcaagttactaaatgaaacaaaacagaatcaaaaacaaatttttttttgagacggagttttgctcttgttgcccaggctggagtacaatggtgcgatctcggctcaccacaacctcggcctgccgggttcaagcagttctcctgcctcggcctcccgagtagctgggattacaggtgcgtaccaccacgcctggctaatttttttgtgtttttagtagagacggggtttcaccaggctggtcttgaactcctgacctcgtgatctgcccacctcggcctcccaaagtgttgggattacagacatgagccactgcatccagctgacaaatgttataatagaaaaatgggcaaaggacatggtcggtccttttataaaaggggaaacaggaggaagggtcagtaaataaaagacaatgaacctaacttgtaattagggagacggcattcatttccatcagattagcaataattaatactcctgaaaagtgttggtggtgaagaataaattgcttttatttaattaattaatttttcatacagttctgttgcccaggctggagtacagcatgatcatggctcactacttctttgatctaggctcaagcagtcctcccaccttagtctcctgagtagctgagagtacaggtgtgtgccaacacacccgactggttgttttaaaattcattttttgtatatatggggtgtcactatgttgcttaggctgggtctcgaactcctgggctcaaatgatcctcttgccttggcctaccaaaatcctgggattacagacgtgagccaccatgcccaggccagctcttattttagagaacattttggcaatatctagtaaagttgaagctgtgtacaacctgatacctagtaagtccacctctagacgtaggtggtctttgactagcgtatcacatctggaggtacatggcatttgccgcttattggtgatactagttttgtttacttagggtggacccagtaagtccacatttagacttaggggtttctctagactaggaactctcagactatatacaatattctgtgcctcataaaattggactcctatagatttagcgttaattgctgatgataaatacattaaaaatgttaaatacagcattcattacaatgtgaaatacaccattgttgctaatagaaatctgaaaacagcacatatatatatagctatatcagtagggaaaaggtttaataaattgtgatatgttcttactgttgaatcctacagcagtgaaagtgatttctgagattcctgatgtgtactcctatttagcagaacagatgaaccagttcatattccaaccagcaatatatgaaaatgccagtcttactacacctcatagttcctcagtcttctaattattgacaaaaaggtgcctcattatcttaatttacatatttagatatttaatgctttttccatgtgttcaaactgtagggaataataaaattatctgatttgaatttgataagccagatagtaaatattttaggctttctggacatgtaatttctgttgcagctactctgatgttgtagtatgaaagcaacaacagacagtacatgaatgaatatcactttgttccaataaaactatggagaatgaaattcaaatttcacatgtcagcaaatacagtcagccccctgtatctgggggctcagtatctggggttccacaaccacagattcaaccaaccacagatttcaaatattccaaagaaaatccaataaaaataatacaataatgaaagataaagaaaaaaagagtataacaactatttacattgtattagatattataaataatctagatatgatgtaaagtatgcaggaaaatgtgcatatatgcagacactacccattttatatgagaaacttcagcatcaaccagattttggtatcctcagggggaagtcctggaaccaaaccccagctgatactaaggaatgactggattattgttttgatttcaggttttttttctttgagatggagtcttactctgtcgcccaggctggagcgcagtggcatgatctcggctcactgcaacctccgcctcccaggttcaaatgattctcccgcctcagtgtcctgagtagctgggattacaggcacgtgccaccacacccagctaatttttgtatttttagtagagatggggtttcccatgttggccaggctggtctcaaacttctgacctcaagtgatccgcctgccttggcctcccaaagtgctgggattacaggtgtgagccaccacgcccaccagtttcagttttttaccacttgtatttgaatctagaaaagctactttttaatattcccattctaacttaaatgatcacttcatttgcaagaagaggtcttaatgaaatgtcagatttttctggcttttactttttcttcatagcagagttgatgagactaaacataatatcaaggaatcaataaatttaaatagtaatctttaatcacccaaagatttttaaagtaatccttattacttgttagctgttcctttaaacttaatacatgaataatacaaaattcccttgtgaagctgttaaagatttttcaaagaaaatgattagtcacagctgggcatggtagctcacacctgtaatcccagcactttgggnnnnnnnnnnnnnnnnnnnnnnnnnnnnnnnnnnnnnnnnnnnnnnnnnnnnnnnnnnnnnnnnnnnnnnnnnnnnnnnnnnnnnnnnnnnnnnnnnnnnnnnnnnnnnnnnnnnnnnnnnnnnnnnnnnnnnnnnnnnnnnnnnnnnnnnnnnnnnnnnnnnnnnnnnnnnnnnnnnnnnnnnnnnnnnnnnnnnnnnnnnnnnnnnnnnnnnngagaatcgcttgaacccatgaggtggaggttgcagtgagccgagatcgcaccactgcactccagcttgggcaacggagcaagactctgtctcagaaaaaaacgacaatgattagtcacattctttgtccagataaaatccacatatttttcccacctattaatattattacttggttctcagctaaaatacaggaaatgagatgagtgaacccaaaatacagcctagcacccagtttggtgctttgtatatgggaggtatttataaatgattgtgccaactccagatgcgattactaacaacataaagtagcctaggcttcaaattaaatgggtcatgtaatcaataaatgctttaatagctggagaagtaaggtaaattgaatttttttttttttttgagacagagcctcactctgttgcccaagctggagtgcaatgacgccatcttggctcactgcaacttccgcctccccggttcaagcaattctcctggcttagcctcctgagtagctgggactacaggcgcccgccatcacacccagctaatttttgtatttttagcagaggcggggtttcaccgtgttggccaggatggtcttgaactcctgacctcaagtgatccacccacctcggcttcccaaagtgctgggattataggcgtgaggcaccgtgccttgccgataaatggattttaagctgagtctttgagggaagagtaggacctgcactgaaacaaaaagacaatttgtggggttggggagaggaaccagatgtaaacaatggaaaggttttggtgtcactttgagaaggattttttggaagggttttgcaatgtccattctgtatcttgggttaacactagtaagtcaaatggagaataatttgagtgtcactcattcctacagatagaaaaattttaaagtagcttgggccgggattttccttttatcatgtgccattgtgtacgtgtctgctacttcatttagttccttttttaaaaatggaatttttatcacttctgtgcaaaggttaaatttttttaataaattaataatggaatgtttaagccttcctcagtaatgagtataatcttatctctccatctgatctgatgggtcaactatatagtaactaaaatagactgtaacagctgtcttcatcattagtttttattttcaccatgcatgtagaatgctttatattgtagtcccttattatctgaggtttcattttctgatgtttcagttacctgtgttcaactatgtccaaaaataggtaactacaatgatattttgagagaccacattcacatataacttttattatagtacattgttataattgtcctattttcattgttaatatcktactgtgcctaatttataagttaaactttatcataggtatatatgtatagaaaaaacatagtgtatactgtatggggttcagtattagctgtggtttcaggcatcctctgtagaggtcttggaatatatcccttgtggataatggaggactacatatttgactggttggtggagttaacctaaggagaccttttcatgactctttaaacttttaggtttaaaggttgactcggaaaagaaaaacaatttatatcaataaatctaaggtaggcttatatgaatgctgcatacttttcatcactgcagtgttgtggaatgaaaagtaattgtatggattttatactatacaacattaaactcatagttatttggaatatgagcaaccaggaaaagaaaataaccaggtattttgtttgatttacatagtaatctacttttagtagtcatgacaggatgaggtatggcattttaaaaaaagtaattcctagtattgcctaggtttggtactactcagattaggttacatttgcaggagtactatacaacaactgttcactttgatgaatctgaggcctttaaggttcagaactgctttccctatatcaatttttttttttcaaaaaaggctttacaaaataatttaacattgagtatttaattttacattgcaggtactggaaaatatttgttgaagaaattaattattccttaaaactttattattgagttaaccaaaactttaccaaatctcagtccttagctattctgttgcgaagaagtgagagtttactaccattaacaaggctgcagatgtacactgctactggcagaactatccctagagtggcaaaactctacatttcccaagggaacatatctgtgggtcatgttttgctttggagacagtagtaactctaggaggtgaacacagaacgttctacatatttagaaatagaaaaaagaaatagcccttaacaattaatcccacactctcaccctcattacctcttcattctatagatgctctcaagcttcttgtgacttttgttgcaagatgttgtgacatggcatctgactccctattgatcagcagggttaaaatcctcctgggttttcctatccacaatgttctgtgaattgctatatttaaactagcttttttttttgagacggaatcttgctctgttcccaggctggagtgcagtggcacactgtagagtggcaaatgaagacatatttatctgatcctctgatatgaaatcccctattaataaacacctttcttaaaagtgctatataaaagtatgcttataataggaatgtttcctttaatttgtctagaattgaaagggaaataggcaggggggttcaaaaaacaaaagggaaattgaaggcatccagaaacttattttatttttgagaccgagtctcgctctgtcacccaggctggagtgcaatggtgtgatctcggctcactgcaacctccacctcccaagttcaagcgattctcctgcctcagcctcccaagtagctgggatgacaggcacctgccacggtgcctggctaatttttgtatatttagtagaggtgggatttcaccatgttggccaggctggtctcaaactcctgacctcaggtaatccgcccgcctcggcctcccaaagtgctgggattacaggctgagccaccatgtcctgcctaaaccaacttttgtgaaatggctttttaaggtaatgtcatgaaccacttcattcctctgccagggtcttatttaacccttcaaaaacatgggtgggccctatataatgtgacttcattctacattggatccccacaaagctagtcttggcttttcacttggaacatgcccaatgctgatacaaagtaaagattcactatagatcttattgctatccatcgtacgttataaaacttgtctaaatatttaaaggtttaaaacaagcctgcgcagtggatgtcaagagtaaagtacgtttcatagtaaaattaaaatgccattaaaattttgttcttgtggggctgggtgtggtggctcatgcctgtaatcccagcacttgaggaggctgaggcaggcagatcacctgaggtcaggagttcaagaccagcctacccaacatggtgaaacccctgtctctactaaaaatacaaaaataagccaggcatggtggctggtgcctgtaatcccagctcctcgggaggctgaggcaggagaattgcctgaacccaggaggcggaggttgtggtgggccgagatcacaccattgcagtctggcctgggcgacaagagcaagactccgtctcaaaaaaaaaaaattgttcttgctttgtaaatgctgctttcttttcttcattttggagcggggagccttgccgatagtcagtgacttgtacatttgtttactggcatttgataggctgctccttatcttgcatgaaaaaataaagacctagccagtctaatcctgctgggattcatatcagtggccccagggggttgagatgcttcaaagctactgtttaaatggcaaaaccaagtatcttacttggataatactaaagtatgtcctttatggctttattggaatctgaattgtaaacatttggtacagtggattaaagttctgctttaaaattaatttctgagtatgtgagatatgccttttctttgtgacttttgcagtgcagtgaattcaggctgtttttaaaaggtcaagtttttaaaaggcaggggcattagtgctagggctgcttgaagatgaacagctaatggagaaatcctacagtgaaaggggttgtttttttttttgttttttgtttgtgttttgaggtgtcattctattgagtgtttatatatatatatatatatatatatatatatgtatatatctccatcctaattgttggcataacattaaaattagtgacacaacacaggtttcttgtataggttttcagaaactagcagtcctcaaaataacagaccaagcaatgtagtttttgctaatggcacttgctgtgactcatgatagtctactgttgatgagcattccaactaaaatagctttcacttcaccattgattaacatggctaccttgctaaaacattttctgaaaccaaaagctagagtgatcattcatagcattgtcttattaaaagactatgtcatactgtatcgtagaaaaagccattctgggtagtaggatttgcttcctggtctattaggttatctgttctcccttctaacttgaggtaatgtctgaaaacagtgccattcaggtattgcttaggtaactaaaccagtgaaaccagtgaaactgcctttatactgttaccaagaacagcagactcccattaaaaaaaaaaaaaaactcttattaccctactcaaattattcatctttaaaaaggcatagggtttttttttaatgtttatcatcttgactttttttttctcttgaaaatttttggattaatttgaagatcatttcaaaatgacccaggatatcacgatctatttttcctcttcctaaattatttctcaaaacagtgtaatttctatgtgtgatgacgtagcagtcactaacaacctcagcgcactttttggttagatattccactccaaatagctaaaatcaactgcttttgggattctaaatgtacttaaagttacagggtctgtatgaaaatgccagacactaattaaattttggtggcccattcatgatacggctcttttatctccggattctgagattgaaaaggtgacttgatcaagctattgaattactgtaataaaacaattactcccttagaattttaatttagaatttgtctacttccaaaaagggtttaaagcagttattactagactggcattaggttatttcaaatgttgcggaacagaggatcttcgtgtatttagcttaacaatacaaaaagaaattttgcaagcataaatattcactcttacaacatggtggcaaggcttttctttgcagaacaatctttgccctcttacctgccagactcttctctcatgctcagtatgtgagacagttaagtaaagggaaaaacactaaaagcaactaaaatgattggcaaacttctcactgtaacctaaactgcttagcatacaaaattatcgtctacccaatagggttttatgtcctttaactgaaaaggacactaaaaataattattgtggacttgagcttttctctttcggcggggcggggggtggggggggagaatcacctctcttacaaagataaaaggcacagaactaacgtctttcatcctttattgtattggtgcgattatgaaatattattatggcttatactttagcaagaaagtaccaggaaggttattattaatcgacaatgaatgccgttgataccttcatgctctttgaagacaggatgctccggctttgaagcgctacatttctacattgctaacctacaggaacctatgttgaggtggtcccaccgaaatacacggctaatagttcatctctttcctccaggaaccttcaggtttttttttgtttgttttttttttgagacggagtctcgctctgtcgcccaggttggagtgcagtggcgcgatggaaccttcrrgttttactaagcatccttaccctaattatctaaatctttgagacgtaaattatttgatgtggctaaaaatcctcctgctagaatttaggtccaatcctttaatgttcggatactcaaattctttaacgaaactgatcactgagctaggccgacacaagtccgccaaaatgtccgcagaaacgttaagaaaagctgtcataaggccagcttgaaagacatcataaaaggccttcgctgtcctttgagttaattatctaacacccgaagagagtgccagttctagttagaatccgcgcgtcaggttctccaacagtcagaagggcttgtgtgagggcagggaagattttaaaccccgtttcaggccccctccctrggctgtaggaaaycacccactctgaagcccggcgggggaggagtgctgcagccagctgccgaggragcgctctgcggcgaggccgtttccctgagtcacggagagggcgggaggctgcgcccgtctgcccccgccacgtcctcctgtraggggctcagtcgaaacaggcagcggtcgcagggaaacgaagcggcacccgtcrtgcctcaaggtggcccaaaagcctcttcactcccaggagacgccgcatttccttaaaacgagctctccatttctggcagcaatcagccgacccttccccatcagtatcacgtgcacctggaagtacgtgsgtgggacctaaagcgyccacggaagtgacgtcggtcgccccgagtcgcatgatgtggcaaaatgaaaaaaaaaaagtggggggagaaagagaagactggcgaaagtgatgagtctaaaaaagtagtccctccggttcctctgtttccccccatgtggcgtcaggaagcgaggcaccgggcgcactgcgccccgaattcctgcgcccgccgcgcgcggcgctccgtggaggggtacataaggcggagggggtgaggcgactgggcggagttctgtcgccgggatccttccgctgggctcagccgtttccggagtctgcgctgcgcccggttccgccattgcggctctcctggcccctggagcctccgcccccgacccgagctctttcgtctgcctgccagtttcctgcgtccccggagaggatcctgctgagcccagcctcccccctccccttctcctcctctcccttggagagcccgggcagccactgccccgcagccccagtgacaggaggagaccataacccccgacagcgccatggcccagattctgccaattcgttttcaggagcatctccaggtgcggccgggcccgggctggtgagggctgtggagaaggtggtaggaaggatggaagacgctggagtctgggcccgagcagtatcggagctggaggggcgggggggttgtcggtgattggggtaggtggaggagggggcactatcttggaaagcttaaaatattaaatgatgtggggcttggatggaaaggacaggagttggggtgcaaagagctgcaaggaccaggcctggatccaaaggcctctcgatcttgcttcctggatggccagaactgcgcgtacaaactctctccccattttattcatttcattcatttgggtaggggagtgggagggggattctcccttgtttctaccagagcaaggattcttatcccctgggccagtgcggggctgtcaccttccattgctctcctctttccctcatcgtgtctgcacccaggagttgtggggcgggtgggttggggaggagcaaccttttttttccctccctctgcggctctcaactgagaaaggcaccttctccggtggtgggggttgggggtggtggtgaggcggtggcttttctcttgccttccctgaggcagtagggacagaaggtcactgaaagaacggaacgagggtagaatgggagaacgcatttcttagagctatgtcaatctcagagtgtgtgcggtcaaactccctaaggaaactcgcctccccttccccctttttttatttctctggggatgttgtggctcttaacccctctttggttctggaaggtaggaaagagtgatacagaggttatcttttagtcttctcgagtagtagcaggtagttttgaatatcttcttcaggatcgcatggaattgaacagagccctggggacagcacagctgctctgagacctgcagggctatttggtctgtgactggcttccctttagtaagttctagagttcttccccatggttccttatcctggaggcaacatattgttatctggcaacatgccagtggcgggcctaggcaggtgaccattggaaggcttcactgaattaaacctcttcagagcttttgattttcctgtgtcaccaatcctgttttttactgtagcttaaataatttattcctattaatttgctttcttcccaaatatccccttaaagaaacctgcctcagctcagtcgtctgaagggctaattccataatgacagggaatgcagtggtttgacatgacactgatatcagtgacctattagacactttaccattgaagaccatttttatttacatttccccattggcatagcatacataaaggattcttgttaataaaaggttttaacattcaggctataagtaacataatttcatatttctttgcaagtattaccatgtttgcactagcaaggacttattttcctttaaggcttgaaatgtaaagaataataaatttttacccataaaatgagttaaataatgcactttcctcagtcatctataattttcaaataactcatctgaagtaatggaatataccttggcaataaaaacacttttacagagggttaaaaatgttaaataacaaaatggacatttttttttgatcaatccaagtttagttgctgtggttgcttttgttaaagtggggtggcaaatgaatgtggagagttgaggggtgctgttcttaagtgtgaggggaaaacgsgggcttattttcatattaaactgcatctgaaatatctttctgcagacaaatgtttataaaccacacagagaatcaagtacagctgctctttattttccacggcagatgtgtagctcactactaaatcttgtggtggttggagtaatagcttttcatttcttttaaagaggagacaagaattgttaaatgatcccaaagattcgaacccaaccttgtcacttattaaagacaaatttaatacatgtctgttttgtaactggatcaaagtttctgcagatgcttgaatgaagccattttcttctcaaataatttgaagattttgaatataaagcgatttgcaaattgaaaaattcagtcctctgtgttttggattgctatgtcatgcctaaacttaagcttgcttagctaatatgactgtgctccagttgattaattgtggagcccaaataactacagcctctttcatgataatatatctcctaacttcatatcattatctcctccctttttaaaaattaataagcattttgtttttttgaggagacagggtttttgctggaggtcagtggcaccatcacagctcactgcagccttgacctactgggctcaagccatcctcccacctcagcatcctgagtagctgggactacagccatgagccaccacacctggctaatttttgtattttttgtagagatggagtttcatgttgcccaggctagtctcgaatgcctgggctcaagcaatcctttgccttggcctcccaaagtgctgggataataggtgtgaaccaccgagcccaactaataaggattattttaattggcatctttggtctttgacctctgagcttctaccagtttgctaagtagcagaaaactttctgaaacacgtaggataaaaactggaaacaagaaatggggaacttaagtgtgagtgtagagttaccttgtgaaactgtaaatgaacttatttttataccctttaactacattgtccaactgaaggatct

SEQ ID NO: 93817 - DNA, 18564 bp, Homo sapiens
gcaccactcataggtggttgacttttcaaggaattcgctggagaaaattgtacgcaaggctgtgaacaaaacccccctccatctggtttcagtttatttaaaaaaacaacacacacagtcctccccaccagcaatcagaagacagccacagcttccccagggggcgtattagccaccaggggtggggctgaattatgtatatgcaaataaattaaaacagccagccaacagcaactaatttttgtatcttttgcagttgttgtgccaagaaaaggcctgaatcagggtgatggaagctgtaaggagacaagtttggaatgagttttaacaatcaagttgcctcaattccgtcgttgggagacttgtttttaatcgagcagcaaatagcaaaaggtcggtagccttatccttatgtataggataaggataatgatagtacctacttcatagtgatgacgtgaggatagtaaataaaataaagaccaagcaagctaagcacaaggactggcatgccacaaacacacaaccacactggaggatacaagacggatcctagaaggatttcatccagagtcagtcaagctctccctccaaatgctctcagctgaggcttgctttccgcctgggactggtccagaaagccctgcagaacatactctctctgtttcccaaactcaaggaccctaatccccaaacatctgcctttaatcctggagacagtaaaagttcggaggagggtgccagacacaggctgaaaacacaagtgatgctcctggctttctgtgtcttactgcctccctctctggtaactggaggggaggtttccttcagttccgtaactgaagggcctggtttccaggtgcccagcccagatgggatagctctgaaaaatggtggaggcaggggcgagttcagttcatgcctagggtaatcagaggggagtcggcaacctccagggctcccacgctacaggagcaacatgctggagcccacaggcttccacctgccttggggctcagcctttgcatgttcaggggtgcctcaagctcagtttgtttgaacagacctctgctccgtccctcatctggatgcaggaacaagactcccagcctcaagaatcacttgaagccagcagttcaagaccagcctgggcaacatagtgagacccctgtctctacaaaaaatttaaaaaacaatagccaggtgtggtggtgagtgcctgtagtcccagctactacggaggcctgagatggcaggatcgcctgagcccaggagttcaaggctgcagtgagccgtgattgtgccactgtactccagcctgggtgacagagcaagactccatctctaactaaaagtaataataataataataaagtaataatcataataaaatttaagagtgataataataatttagtcagcctccactcttccccagatccatttcctgtccacctgggatgggggtctcatttgctcaaaaccattccaagctctcctttgccctcaggatgaagtctaagatgccacaggtgaccaacacagccccgtattaacacagttctcaagagcccagactttgggttcaggtacacctgagtttgaatcttggggctggtccaagactccaacgcaagtggaacttgagagcttgagcaattcccttcacctctggaagcctcagttcccttgaatgtaaaatggtgataatgacaactactacaaaggctatgatgaggtatctgcacccaacccagggcttgggacacagcaagagatttggaggccagtgcatggcatgaagattgaggatgtggtggggcacgatggctgccaggaccagctttagacatgctgaggctgaggggcctatgtgtgtccaagggaagtgtccaggggcagctggacatgtgggcctgtggtcaaaagggagagcttggccagaaagcaagcagggaggtcgccagcatgtgagtagaaagatgagctcatggtgtggggagggccgagggtgaggcctctacagccagagcttcacccacaaggaagagaagctggagaaggaggctgagaaggagaggcagtgaggtcggaggaaacccggcagccgtggcttcgcaggcacccaagggagacagggcttggggcaggaaagagaggtcagcagggccgaggctttgaagaggccaaattagctgaagccagagatgagtctatgggatttggggactagggggttacgattgggagctggtcccaggcaaaggctgggaggggagagtggtgatggtgattatggacaactttagagaaatgcagctgaaaacagtaggagaaaacacaagagagatgctttttttttttttttttttttttttttgaaacagagtcttgctctgtcacscaggctggggtgcggtgagtagtacaatctcggctcactgcaatctccgcctcccacattcaagagattctcctgcctcagtctcatgagtagctgggactacaggcatgcatcaccatacctggctaatttttggatttttagtagaggcagggtttcgccatgttggccaggctggtctcgaactcctgaccttaggtgatccgcctgccttggccttccaaagtgctgggattacaggcgtgagccaccacgcccagccacaagagagatgcttgtggaaagggatacgggcttgaggttcccaatgggtgaggctagcgccagtacacttgctgctggggccagtagtcagttgctatatctgtggtgcccagcacagggcctggcatgcagtaggaactcaatacaagtttgttgtctttgaggacagggagcaatggggtctaggaccctggccactggcaggaagagggaccctctgccattctgccaagaggaggcatggtgggggtgaaggcgtgaagcagagtgcagggcaggggctccttgggaatctgcagcctcttagctgcagagggaagaggaggtgacaagtcagtgctgagtgctctgctccaggaacccaagtacagtcagaggacagagcgagagggctcctggagtctgccacttggtaccccctactgtagacatctgttcccctctcctcaacccagcagccggtgggttacctggtctttagctccttcagagccgtgctctccctacacggccagcagagggtaccagtgagctgctggactccgctggaggagaccagagcccgcctgcccacccctttgtcctccagagcctggggcgtgctaagggtttggttaaccaggtttctgaccaaggcgggttggaggctgggacaaaggactaagggaggctgtgggctgagggcttaggggccgagtggctcaggtgctctgctcctggtcacccttcattcctctgccctgccaggccctgctttatctgttgaggctcctgcccactgcccctctccgcttctcttccctggaggcccctgacagcctagactcctgcttctagcagaggctggttttctgcccctaggcaggcacgacttggcaacaggcctcagacagggctgggccagcttctgccagcaatgactgccctaaccaccttgtacttctagaacgtctccacctaataagggataaggggtcagtggttgaggaggccacaggagctggagcataggtcctgggaaggaggaggcttggactaggaagtgggatgaatgggcagggggagtttatataaaaatgtggcagatggtccagtcccaccaagacccaaatcccataagactaatggctctgcctgaggtggcacgaggttccagaagctgagctggaaacacccccttcctcatcctaaccatgttatactcttcagccaaacgcaaatcccaacatcgcctcctggcaagtctgtccccatggtggccttcacggttccttcccaggacagtgtaggaccctgcttctgcctctttccttatcttgccttcctgccccatccccctactcttcaactcctgctttagcaagtgctggttctatctgtgttgccttgaccttgaaggctccccaggaccctcatctcagcttctactcccttcctcactccaaggggaagactccaatggactgaggctggagaaaccacagccagactcttggtgtggtggctaaagctggggggtctggccaatccaatctctacagctcaaatcaggaagtcaggccaggggtgctgtgtctgcctccaagcctgggccatacattcaccgcaacaggaatcagtgactttggaaaaggaatgtttccctgagtttctagaggcaggatgacccagaccgaaggacagagagttaccagaaacacacacaatgcacacaaatgtactcacttgcacacacagggtcatggcatagggagtgacacaaccaaatggcctggacaagccacagagtcccatggacacaagtgcttacaaacacaggcacacaaggtcatgtacccaaggtcaggcacacacaccctcctcattcaagtcctgcctcccaggtctggggcttgcctgtcatctgtccttaggaggagggataggtggaggcacaggagtggctcagggcaaattggtcctccacccagagactctccctttaggtgggtctggctcccagcctcccctgagatttccctggctcaccagggggctgtgtctggtggcagagagggctttggaggaggcattgccctgaaaccctggcagagcctgggcacctaagagagaatgagcaacagggctaggaagtgtgacagggagtccacaacctcccaggatcttgggagggcagggatgaggcactgagcacggcctggaagcccacgggaagcagggacccctctgtcgagggctacacctactgctctcagcatcaagcctgcagccaggtactggcaccaactcccagtgcctggcagagccctggcatggatgctaggcacagggtgccagacacgggggtgggcaggrwggggggccactgggccacacacaagcatggagaccttcacacacrcaggcagaaaaatccacccacactcataccacttattttaccccctgggggttcaggggagcaaggcagggaccaccctgtcctagaggctgccttcaccgacgtccctctggcctggctcttggggttggcgggggtgggccataagtaatgggagacctaggtgcttcctctgacaccccaccctccactgacccccacacacatacatttgtgaggcaggaagtggggttgtgcgtccccaggtttaagccctggaaggaaagggaaagacggggcagagactccaagaaccgggagcggtcgtcctgttcccccgccagcccctgtcccaggcaggttttgtggccgcgagctgctcaggggtgagcgcgccttagggtgtgtgcgccagggacctggcgcagccgaccacgtgggagtgcggcgcgtgtacgggcgcgggcggcagcggcagcggcagcggagaccgggtgagcaccggctggttcctcgcggtgttcctgcaggcttggcggccgcggtggtgcgatcagcaaagggcaccgggatgccggttgtgcgtgtcctcaggtgtcccgaacaagcgtgagtggcatgtgctcacctgagcgcggcggcttggcggccccgggcgtgtgggtgggggcgcggcggagagctgaggccgggcacccgggctggaccgacgggccctctcccaagcaccgcccgcagycaggcggmtcctcgagcgcagcaactttgggactttgttccggctttttccaaatcgaatctggtcgmgggggcggggcggggggggagcacctgccctgccggggggtgccgggagagaagtgaaggaaagccccgcccccgcccctcccgctccccgccctctcccccgcccccggggctcttcataagctcggcccgagggcgagcagagaaagcgagtgtccctctcgcgccccaggccggtgtacccccgcactccgcgccccggcctagaagctctctctccccgctccccggcccggcccccgccccgccccgccccagcccgctgggccgccatggagcgctggccttggccgtcgggcggcgcctggctgctcgtggctgcccgcgcgctgctgcagctgctgcgctcagacctgcgtctgggccgcccgctgctggcggcgctggcgctgctggccgcgctcgactggctgtgccagcgcctgctgcccccgccggccgcactcgccgtgctggccgccgccggctggatcgcgttgtcccgcctggcgcgcccgcagcgcctgccggtggccactcgcgcggtgctcatcaccggtgagtgcgcgggtcgcggagcgcggggactccaggctcgagggcgggactggacactcaacaggactgactccccatgggcacagccaaggcgggctcctcagcgcaagagtgggagagttctccacccctgggtgcagggagcgagccaaatagggagcgccgggcacctccccaagcccgggttcactacctgccgctgcggggagtgttggagggaaagtgagacagggagtgggccggttcgagaaggaaactgactggtggctgagaagagggaacctcctggagtttgagagtttatgccattcccttccccaagagagcagtctcaggggacttcggaggccttgagaagggaggatcgttaccccttgaactctgcctgacatccccacctaagatacccatctcccattcctcgggccagagggaagagcttagatggggaacttccccaccccacccatcccccactggctgggatccttggagttcagaaaagctagaggtcaccgtgaggggcagctggacattcagctgtctttctgtctagccacccactgccaaactgctgaggcagtagtttggagcctacacccagcaccccacccccaagccctcctggtcctctgtgcccaggaaggagctcttagagagctgggctcaggtgcctctggccgcctagctgagctcctttgtctggagcagggaataaatctgtcaccagagggagggaaggggaaggggggggggggctggaggcccgccggaagtggggagggggagaaaggccagggggcactgactccattgcatcgtgggaggagcagcctggtctctcgccaatacccacggctttggacaggtgctccaggctttgtccttgcgctgggcctttgctggggcagccagcaacctggcttctcagagacctcggtctagtaggggccctgtgtgatcagatggggctgggagaattttccggaggaggaaatccttgagtggggccttggagcatgagtggagataagtggagtatgaaagggatctcggatcagagaaaggatgtgggacaaaggcttaaggcaggagtacacacggtctctgtaggggacagccagtctggtgggtgtgggggtggggagaaggggatatgaggtggtttccttgggaggggccatgaatcaggtaagaagccagactgctgaggcagagtaggggggaaggaggcacaagggccttgcactccagcaaagatggtagagatggggaagcattcgggctggacaggagagacccaggttccaggcgcagtgtgaagcctcagcagaccccagtttcagaggtttgaggaaggaaaatcaacagacaccccgggtatgaagtaggggccaggttgtgggctctgcctctggggacagggcagatcccttcctgctttatttgtgagccacctcaacaggacccaggccatctgcaggtactagtggcctagctgggtagtctttcctgaggtctcacctcaggcctttgtgctgctgctgttgcttctggccttgagcctgagagagaggtgagaggaaggatgctttctctaacttgggctcctccaatctctggttgcaaagctggggttgggggagagaggaccacccaacctgccctgtacaagcatcagtaagactccaagtttcccagggcccgaacacttgggggttgtctctcaacacccggctggaagacaagtaggtaaccaggttcagccccacctgccaagaacactgtgttttgggcctggcagagctgctactccccctctccctcctaagaatgcccagagaatcacttgccaaggctactcctggagctcagctgtgggatcagggtttgggctgaggatcaggtgcctgtgtgcacacatgtgcacatgtgtgtgccaatgggtggtagggattgagcccgttgtgagaacatccagccaggttggaagtgtgtacaggtatctgagggtgtgcacgtgagcaagagggtgtgcaagatgtgggtgactgttgggaccacagagctgaggcctgtggtcagctcaggtcagaactgggaggtctgtttcccttgggaggacctgtctgctctgagggggacccggacaagtgcacatatgcatgtgtgtgtctacacacacacacacacacacacacacacacacacacacacatatgcttgcctccctctccaaggcagacttgcctgggaagtacccctccwcagcaggagctcgaagacccctgcccagtgctgttttsagtagagggagtggasctgagatggggagaccgtactgagcggtccaggagtagggaaacagagctgctttgcagcttctgttccagaagatgggggttggggggcggggttgagggccaggggtgggagcaggagcagaacagaaagcctccctgctcactggcctttccccttccctcactggctgcccatgragccaggatcagcatgggaacaatcaaggaggcaggggcttatcagtactatggacccctacactggctctgcctggtggttcttctcttcgcataccaaagacagaaattaagcctccaagagtggtaactgacctcggtcacacttggtgggtgtgggaaaggattcaaatgtaggtctgttctcttcttcatctatcatggtccctgtcctggaggcaagtcgtctggggctcagaaaacacccctgttgccactgattggaattccaagggtctgggtgaagtggggatgggcctccagcttgcctccagcctgaaaaaatagtagagggtgttgaggctgggaagggaggtggggctcatgttgtacagggcctgagccagggagcttgggcttcattctgagtactgtggcagccctgggaaggtttgtagcacagagggatattgtcatttttggaaagatccctttggctgcttaggtagagaagggcttcaagagggcaggaagggacaggactacagaaggggctgcttcagagtccagattaaggaaggagaggcctgggcagtcagaaaggaagagaagccggatgtggtggcttgtatcttcaatcccagcactttgagaggccaaggtgggaggatcacttgagcccaggagttcaaaaccagcttgggcaacatagtgagactcccatctctccaaaaaaatttaaaaaccagccaggtagactgggcgcagtggctcacgcctgtaatcccagaactttgggaggccgaggcaggcagatcacgaggtcaagagttagagaccagcctgaccaacatggtgaaaccccgtctctactaaaaatacaaaacttagccaggcctgtggtgatgcgcacctgtagtctcagctactcaggaggctgaggcaggagaatcgcttgaacccgggaggcagaggttgcactgagctgagatcacgccactgcactccagcctgggcaacagagtgagactccgtctcaaacaaaaaaaaaaaaaaagaaaaaaccagccaggcgtggtgacacaggcctgtagtcccagctactcaggagaccgaggaggaaggaatgcttgggcccaggaggggaggttgcagtgagccaagatcatgccactgcactccagcctgggcaacagagcgagaccctgtctcaaaaaaaaaaaaaaaaaaaagagaaagggaggctcctactaatactgtgcctgtgcctgtgagctgtggcctgaaatcaagaaagcagaaccacactggggcctgggactgtcccagacctgacctgtgtgaatttgggaagcaacttagcattactaggccttagtttcctcttctgtaagccacattagtggggtagccacggggagtcaggcagatgacagctgtcacagagttactgcccagggctcagctagagggacacagcctgccagggatgggcctagggaaggagttagggttgttgactgctggtggcttggtttgcaggggcctggatcccatccagaccctggtgattctggggttgtctcaggctaggctgggccacagtggaagttcactgactgccctggcctggccaggctgtgactctggttttggcaaggagacggccaagaaactggactccatgggcttcacggtgctggccaccgtattggagttgaacagccccggtgccatcgagctgcgtacctgctgctcccctcgcctaaggctgctgcagatggacctgaccaaaccaggagacattagccgcktkctagagttcaccaaggcccacacmaccagcaccggtcagtggcaagtgtccaccaggcaagggcgtggcaggggagtgggaaggacacggggactggaagtttgctgctgggctgacctaaggcttccctcctctgctctgtgaccccaggcctgtggggcctcgtcaacaacgcaggccacaatgaagtagttgctgatgcggarckgtytccagtggccactttcygtagctgcatggaggtgaatttctttggcgcrctcgagctgaccaagggcctcctgcccctgctgyrcagctcaaggggccgcatcgtgactgtggggagcccagcgggtgagtgcccccccccactggagcaaaaaggagccccctggggtgggggagggcttagggagccccttgccaaagctgagctgccccactcccaatccatccgcaggggacatgccatatcygtgcttgggggcctatggaacctccaaagyggccgtggcgctactcatgracacattcagctgtgaackccttccctggggggtcaaggtcagcatcatccagcctggctgcttcaagacaggtgggaatcagggctgggggtggggtgggggtggggaatggggctgggaatggtcttatgggggcaggtcaggtttgatgaatggtcatggttttggttgggggtgtagttttggctgcagacctggsgcgggttaaacagtcctaattggctttggctcccctasstgatcccastctgaccttgccactccttccccagagtcagtgagaaacgtgggtcagtgggaaaagcgcaagcaattgctgctggccaacctgcctcaagagctgctgcaggcctacggcaaggactacatcgagcacttgcatgggcagttcctgcactcgctacgcctggccatgtccgacctcaccccagttgtagatgccatcacagatgygctgctggcagctcggccccgccgcygctattaccccggccagggcctggggctcatgtacttcatccactactacctgcctgaaggcctgcggcgccgcttcctgcaggccttcttcatcagtcactgtctgcctygagcactgcagcctggccagcctggcactaccccaccacaggacgcagcccaggacccaaaccygagccccggcccttccccagcagtggctcggtgagccatgtgcacctatggcccagccactgcagcacaggaggctccgtgagcccttggttcctccccgaaaayccccagcattacgatcccccaagtgtcctggaccctggcctaaagaatcccacccccacttcatgcccactgccgatgcccaatccaggcccggtgaggccaaggtttcccagtgagcctctgcgcctctccactgtttcatgagcccaaacaccctcctggcacaacgctctaccctgcagcttggagaactccgctggatggggagtctcatgcaagacttcactgcagcctttcacaggactctgcagatagtgcctctgcaaactaaggagtgactaggtgggttggggaccccctcaggattgtttctcggcaccagtgcctcagtgctgcaattgagggctaaatcccaagtgtctcttgactggctcaagaattagggccccaactacacacccccaagccacagggaagcatgtactgtacttcccaawtgccacattttaaataaagacaaatttttatttcttctaaaatgcggcaggtgctgtttggagggggtcactgactggctggctgagtgacacagtgtggccgtgtgacagggtggcaactcctggggctcagcgtggaggctgggattcccctggtagactctggttcacacctccccctcctccactgacctggggcaaatcatttcagaccatgggtttcctcatagtgaaatgggggtaatgacactgatcccaattgcttgaagcaactggggaggccaggggggcctccagggccaacatctagctccccaggcctgtatgcatctgagcctccagcagaagaaggggctatctccctgggactccccaaccctgaagaatctcggctgctgactgagggagggaggtggaggcttaggcagggttgcttagcaaggtggggtcacgagggaagttaggggtcatggagaggtaccagggcctaaacgagacagcagacagttggccttagagagggcagttttattgtctcagaggggcagggctgagggagggagctgaggagcaacatccccccaggccccaaggacacacacactctgtccttcccatgggccatggctctgggagcgacccacagaagggagaggaggctcaaactgcccccaggccccagggttctcaggtcagggagttagggaggaacatgaaagtgacatgcttcttagatacatcagcggctgtaaccacagggctgagggggcctccttgctctggagggggtcttcgtccatccttggtgggggggggtgcccagccccttttcaggcctaagaacagtctctaagagggtcaggagaactgggcagccgctaggacagcgtactacaccccggacaggcaggtgagccacaggcttgtcacagaccacatacacacacacgcacacacacgcgcacacacacacacacacacacaaagagtgcaattgagagccttgggccaggacgctagaagatagggatgtagttgtcgattttggcgcggtggcgctgggcgatacattcagcgatccacacgatgttgcgacactcctgctccttgagcttcacgaaggcatagaagacaccaaagtggaactggttcaggaaggccaacttgttcagctttacctgtggacacgggcagatgtggtgtccaggtggccatggccacagagtcaggtctaaaccaccaggttggcctccctctgacaagcagaccctgcagactcacctcgtgctcaaagaatcggtcctccagcgtcttgtctccagggttgctacctgcaccctcgaagagcagcttgtactcctggccaggggggtggggggaagcacaagcatgagggttctgggtgggggtgcttggtgacaacacatccaaccgctgtcctgccagccggggcactcaccgggtagtaatcggccacgttcttgacctgttcatagtcgtcagcccgagccagctgcgccaggccctcagggtagagccgcccacagtgtggaaagagcttggcacggtcctctttggacagctctgtgccgaaagaattgatggtgatgatgaaggcgcggcggtctgcttcaaactgtggagccagtgcacaggtaagaagagagggaggaagaaggaggcagtagccagtcagttggcagagcctccccaggccagggctagcgggcaccagcaggcaggagggcgggcaggcactcacctccaggatggggcacatggcatcagccgtagtcccgcccagtagggtgcagaacttgtagaaggactccaggtaggcctgtagagagtatggagcttgctcagcacaggcaaggaagctctggagggcttgctaggcacaagccctcacagctccctcctcccctccctagcccctttcaaggtgggtacaagcacacccatggatgggccggggcagcccttacagcaaagccaatgaaacacttctgtgaatcagccaagtggcagctgcccacagcctcccacccaggagtgccagggcagggcccacccgactgtctgcttcaggctacagtctccttcaccccctcacctcacagaaggctgggctcgcaggggtcctctgactttcccctgctgctctgccttccttttccccaaatctttccaaacctccccttcctcagcctctgaaaaccaggtgtggctggacgcagtggctcacgcctgtaatcccagcactttgggaggccaaggcaggtggatcacgaggtcagttcaagaccagcctggtcaagatggtgaaaccccgtctctactaaaaatacaaaaaatttagccaggcatggtggtgggtgcctgtaatcccagctactcgggagactgaggcagagaattgcttgaacccgggaggcggaggttgcagtgaactgagatcatgccactgcactccagcctgggcgatagaaagagactccgtctcagaaaagaataaaaaaacaggtgtccgtaggctggtgaggaaaggccacgcctgaaagtccacagggatggcagggactgagtgcccccggccctctctgccaccttcccttacagaacacctcctcctcccatcctccaggcagcccctcagcatcacagagcaggaacaaaattgtcaggccagttcctgctgagggatggttattgcctacacggacgtcagctgggcacagtacaatggcaggcacatgggctgccggcgggaacaagcactccctgcccaggcaaattggatctgctgggcatgaggaaagaagaggtcagcccaggccccaggtccctcccaacgctcactcacaaaagcagccatgcttcctcccaacacctctccatgccaaggaaggtggatgatcttacgggccccatggggagctcccttgtaatggccaccctccactcagacctccctggtcccatctgctggcatgggctcagagaccctggctccacaggctagagactattcttctagattgtaggcaagggttggatggcatggaaagcttttcataccgaggtctgaactccaaggtgtggagacctttccaccaaccatcagccaacttgggctcacaagctctgctgggtggtgctccaagagagatgagatgagacccaggagtctgtgagcccaggcctgccctggccagcaatgctgggcaagcccaactcaggggaaggcctgagagtgacctctgggatcacgggaaacaaaaatctaggacaggtcaggaagtaagaagcctggaaaagagggttgaccccagcacagaggatcccaggaatgagagggcctgggtggcagagacagctgccaacccctcccatggcttggtggtacctttcacagtccctctaggggtctgtccccagccacctccttccctgtggccagccaagctggatatgtcaaaaatcccacagcctgccccagtggggccctgcacttcctatttgtgggggaaccaaccaaccaggtattgggctccatgccctgctacccacccaattgcttagccaatctgtaccaatcccaggagaggctgatcccagggtcagggaggctggtgggactctcctctggaggctagggcagctaaagaaactggcaagatcccagcaaccccggtaccaaagtcaccttcccacccccgccctgtcccctggagtctgccaatccacggctgctgcaccagctgcctactgttcccacctgctgggtggttgagggtccgcctaatctcccatctgtggtcaccgggctgggacatcgcctgacaggctggcagtcctggcacaaggcccacagcattgggtctgtgtttatgagctagtgcctgggcagccctcgccggcgactccagctagaaccagtcaggcccggtgagggcatgggtgaggctggcggacagccgcacccctcaccctgtctcagggcaggcaacccggcaacaggccagctaggcgcgtgcgtacacacacacacacaaacacacacgtgtgtatgctctctctcctctcagctaactggctggcctgtgccctattagcggagtgggtgagagcactcacttttgcaaacaagctgagccaggtgtgatccctggcgctgccagtgacttattatgtggctttaggcaacccaccctacttctctgagccttcggtttccccattttcacatggggataatgacaccttcctagttcctagcgcagtctgaaggattaaagaagctgacgaccttcccacctctggtttcaggccctctaatctgctctccacattgtggctagaaggggctttctgagaagactctgctctgttggaaacctctactggctgaccctgcccacgggactatgttcaaacttctggccttacattcaaagccctgggtaacttgatcccatgcctgccttttcttctagacttctcccctgtccatctggaatgtgtccttccacagcaaactgcctgccacttggcccatgctctatgctttccttctgcacgtgctggtcccttgccgacaccactgcaacctccaggcaggcccttcccctaccaccaaccctcactgtgctctggcccaggcccctgcagggagattggcaggcctgggctcaggctgcagccaaatgtcagccagctcgctccaaccagggcaggagaggactctcacccaatagacaggtgaggtcagcaggtccctcggccagggccatcctcagccctgctttggggcctgcccactgcggatccatgttcctgactgcagcccatctggggtcctggcgctatagctcagtgcctcaccgcagccagagcagagtctatcccagacacccctaacctaactggtctcgggctttttttttttttttttaaatttttaaactttcctctcctctccggtcccctggctctttaatctctttgggccagggtagtgctgacccagaaatcctcaggggttgcccagtctatgctacagcctggtgggaggcaagaggtgggcaggggatgaggacagtgggaagtggcactgactccaagcttgggaacctacgagggacatgaggacctagctatgcctcgccagatccctccccccaccataagtgagcacactgttgcctttgctcaagtgcctgtccttgctggcaatagcttaggtagggcggttccaggggccacggcctgggtggtagtccatgaccctcctggatgctgggggagcggctgtccaggagccagctgtaacaggccagcggtggagcaccagccactcctgctgattttatctgagcccgtcacaggcactatgggatggagaacctgttccacacagccttgtgcccagcatgggagccagagaataagcagtaagtccctgggataggagcctgacatagctgcatcctgtcccagcacctcacataaatcaccaccctaccacttcccacagccccacccaccgacaggccaatcccccatggcttgtgtggggcattaccttgtagagggtgttgcggatgatctcgatgttcatctcgtcaaggtcctgctctgaaatgcagtcctggaaaaaagccgctggggaggaaacatggtttgaggggtgggcaggtggcctaggccagaatcctgatgttcaaatgccctacacggcacagagtgcccgtgccacaaggcccacagggctgggtattgaggggtccccagcctaggctgttgccttggaagtggcagaagcaatgctctgggccatgtacactgacctgagcttctcctgcctccttgctcctaaaattgatttataaaggaggcagctagccataacatgatctaatcaccgctggggcagacccaagctcagaccatgccaaagacaggcttgcataagaggccatgacatcctcccttctggaggggcagctgtggattcggggcctaacgcctacttctctacacctcccaggaaggcctggcgtccacatttggaaaaccagcctcctccttaggacaagtccaacagcagggtaggcacagaccagcgacccagggggccactgtggggttggaaagagaggccagagc

SEQ ID NO: 93818 - DNA, 24187 bp, Homo sapiens
ttttctttagagacaggatcttgctatgttgctcaggctggtcttgaactcctgggcttaaacaatcctcccgcctcggcctcccaaagtgccgggattatagaagtgagccggtgtgcctcgccaatatacgcaactttattaattcatcagtgtaggggtggcctgcccctccacacctgtgggtatatttcatcaggtgggatgagagactgagaaaagaaataagacacagagacaaagtatagagaaagaaaagtgggcccaggagactggcgctcagcatatggaggacctgcaccggcaccggtctctgagttccctcactttttattgattattattttcaccatctcagcaagaggaatgcggcagaagagcagggtgatagtggggagaaggtcagcaagaaaacatgtgagcaaaagaatctgtgtcataattaagttcgaggggaggtagtatgcctggatgtgcacgtaggccagatttatgtttctctctgcccaaacatctcagtggagtaaaacataacaaagcagcattgctgccaacatgtcttgcctcccgccacagggcgttttttttcctatctcagaattgagcaaatgtacaatcgggttttataccgagacattccgttcccaggggcaggcaggagacagaggccttcctcttatctcaactgcaagaggccttcctctttkactaatcctcctcagcacagaccccttatgggtgtcgggctgggggacggtcaggactttctcatcccaagaggccatatttcagactatcacaggcggggagaaaccttggacaatacccggctttccaaggcagaggtcccagcagcttttcgcagtgcgttgtgcccctggtttattgagactagagaatggtgatgacttttaccaagcatactgcttgtaaacattttgttaacaaggcacgtcctgcacagccctagatcccttaaaccttgattccatacaacacatgtttttgtgagctcaaggttggggcaaagaggttggggcaaattggctggggcaaagttacagattaacagcatctcagggcaaagcaattgttcagggtacaggtcaaaatgaaatttcttatatcttccctttctacacagacacagtaacagtctgatctctctttcttttccctacaatcagtgggtgcacatttgagtgacttccatttttggggtatttttataaagctgctgtgaacattttcagacaaacctttcatttctttggggtagatagctgagattggacactcaccatataatgccattctgggtcatatggcaagggtgtgtttcacttttaaagaaaacgccccctatttaaagatctacactaggctgggcgcagtggctcacgcctgtaatcctagcactttgggaggccgaggcagatggatcacctgaagtcaggagtttgagaccagcctggccaacatggtaaaaccccgtctctactaaaaatacaaagattagccgggcatggtggcgcatgcctgtaatcccagcttcttcagaggctgaggcacaggaattgcttgaacctaggaggcacaggttgcaatgagctgagattgcaccactgcactccaacctgggcgacagagcaagactctcaaaatacataaataaataaatatctacactacacgacaaatacatagattttgtgtgtgtgtgtgacggagtcttgctctgtcacctaggctgattttttaaaaaaaataaaatgccaaactgttttccaaaatgactatatgatttttgcaaccctaccagccatctgtgagggttccagatgctttctatcttcactaaaacttggtcttatgggccttaaatctgattttttcaggtttttgttttcgtttttatagagtcagggtctctctgtcagcaaggctagggtgcagtggcatgatcatagctcgctgtaaacttgaactcccgggctcaaggaatcctcccacttcagcctcctgagtagctagcaaaacaggcatttttaaaaattctgtagccaggcgtggtggttcatgcctgtaatcccagcactttgggaggctgaggcaggcagatcacgaggtcaagagatcaagaccatcctggccaacatggtgaaaccctgtctctactaaaaatacaaaaattagctgggcgtggtggtgtgcacctgtagtcccagctactctggaggctgaggcaggagaattgcttgaacccacgaggtggaggttgcagtgagctgagattgcacaactgcactccagcctggcaacagagcgagactctgactcaaaaaaaaaaaaaaaaaaaaagaaaagaaaaaaaactgtagagatgggatctcattatgttgcccaggctaatctcaaaatcctgggctcaagctatcctcttgtctgagcctcccaaattgctaggattacaggtgtgagccatcacacctgaccctgatttttttaaatgcatgtttagtggcacctcattgcaattggttccttggacttttagcctctgcttttgactatctctctctctgtgtctctatctctctatatttactatatatgtaacatttcctcacacacagagaaatgtgctcccgagatgactcttcttttcctttcacttctttttcttgagacagagtctccctttattacccaggctgcagtgcagtggcacgatcatagctcactgcagccttgacttcctgggctcaggcaatcctcccacctcagcctcctaagtagctgcaactaaaggcgtgcaacaccagcctagcgaattaaaaaaaaaaaaaaatctgtagagatagggtctcactatgttacccaggctggtctcgaactcctgagctcaagtgatccttctgcctcagcctcccaaagtgctgggattacaggtgtgagccaccatgcctgcccttcatttcacatttttatgattccctcagtcatcatcgatgccaagacctctgaaccatagcacagtaaatggtggaatccatgggcatgttccccccagtagtcatggacagcagcccagggatttggaagaagttgacctgttaatgtaaaggagctttgtcactggactctgagctgggaggagctggggacctcttagcacccacaacccaggtattaattaggacatgagaattaagggcagagttagcatctaccaaggcaggaggctgggaggatggctggggccacagtgagttggatgggagacattgaatcaacaacaggccatgctgttgggtggaggtcgagagcaacttctggtggagactggaaggagagaaactggagacagcaaaggtggatgactagctttcctagaaataagaacagaagggccaggcatggtggctcacgcctgtaatcctggcactttgggaggtggagggaggaggatttcttgagcccaggagttcgagaccagcctggtcaacatagggagatcccatctctacaaaaaacatacaaaaagtaaaaaaataaccaggcatgatggcacacatgcacctgtagtcgcagctacttgggaggccaaggtgggaggatcacttaaacccaggagattgaggctgcagtgagccaagatcatgccactatactctaccctgggtgacagagtgagaccctgtctccaaaaaaacaaaaaagaagaggaagaaagaaagagaggaaggaaggaaggaagtgggggggagggaaagaaagcaagaaagaaagaaagaagaaagagaaagaaaagaaagagagacaaagaaaagagaggaaataaaaagaaagaaagaaagaaaagaaagaaaaagaaagagagaaagaaagaaagagaaagaaagaggaaggaaggaaggaaggggaaaaacagaagaatggagcaatagctagagggcaaagtgggtcaaggcaggctttgatggtggcatttacacagaagctgtgtttgcagctgatgggagggatgctgctaccaaagagacagccctggggacgtgggaggggaccagggtctagtgtccatgggtaggtcccagagctgggactagagcaagacaagcaagtgtaaaatttagaaggcattcattctcaggtgccgaccctctactggtatgaccccgggggtgagtgactctttaacttttatgccctgggcgccttgctggcctgtctcaccctagtcctggccctggtaggcccatccacaatgctaggagggaaggcagacctagctgcagggagttgggaaacgtggccttgggagcagatggagagctctcctggcagcatctatacccgaagatggaaggtaagattgtgggcggagaagagatccaggtgccttgatgtgagtgttgaaggtggaaagcatgccagagccaggtgctaaaatcttcagcaaatgatcaagggggtgtggctggggggtggcagggctgtgatggcaacaagaagaggaaggtggaatagggaaggacaaagtctggaggcagctctgaaaaggagaccccaccccaggctgccggggaagattcaggaagctgcaatggttttttatgaatttttttttagagagagagtcttgctatgttgcccaagctggcctcaagctcctgggctgaagcaatcctcctgcctcagccgcctgagtagctgggactacagacttgtgccacaatgcccagctggcactagttatttttggcagaagggaagtttcatcctaaagcctgtctcttcagctctgggtgccagctggagccccggaagaggatctggcatcgtgtttaggcacaaccctcactctgtctttcactgggccagcaaatatctatccatcctcccaccgcctactcccagccagccatgttcctgacactgaggcccagaagtgagtcctgccctccctgggggtgggagcctcctaagccagcagagagacagatgccctgcagatccccgccccggtcaagagcaggcttccatcagttctggttcccagactctcctctcctcaggcttccatgagttctggttccaagcccctcccctcctctcccctcccctccctccctccctccctctctctctttctttctctctctatttttcttttttctctttttgtttctttctctttttctgtctctttttctttctctctctcctttctctctctccttctttctctctctcctttctttcttctctctctctctttctctctttctttgtcttgctctatagcctagcctagagtgcagtggcattatcacagctcactgcagtctcgacaacctgggctcaagtgatcctctcacctcagcctcccaagtagctgggaccacaggcatgcaccatcacacctggctaattttttttattttttctagagacgtgtctccctgtgttgcccaggctggtctcaaactcctgggctcaagcgatcttcctgccccatcctcctaaagcactgggattacaggtatgagccaccacacccagtcccaagcctcatgttttcacacacacactcacacacacatgcaaacatgtaccctcacttcaatgctatgaggtgggtcctattatcatcactgttttattttctttcacattttaacatgagatttggaggggacaaaacatccaaaccatatcaagccctcacctcaggctgggttgcccactcggagtggcaccccagggtcactggccaccacttcctagggtcagtgatgtggtcaccttgggatgaacgcacaggatttcatggagatcaccaagtcaggagagctggaatttgaaaacagtgggacggggagggctgtcatatcaaccaggcctctgcagggcactcatctagccctgcctctggctcagcctgagcatggggctggccaccagctaggtggcgctgtccttggaggttctatatcacagccctttagagatcggtggtgctgaagggcagggatcttattccaccttctgaagcttctgtcgaaccagttgtaaggagaatggagagagcagtgagagtggagtccggggtcctggtcggggtggtctgtctgctcctggcatgccctgccacagccactggtaagacacacctgctgggcctgcagaggtacttggtgtggaggagtcaagagtgagacagggacagggagcagtgggccgaccgctcaggaaacagtcctgtttggaggcagaccaggggttgtgcattctctctgggcaggcgctctgctcttgctgtatttgtttcgttgtttttgttgttgttgtttgagacagagttttgctcttgttacccaggctggagtgcaatggcgcgatctcggctcactgcaacctccgcctcctggattcaagcgattctcctgcctcagcctcctgagtagctgggattacaggcacctgccaccatggccggctaatttttgtatttttaggagagatggggtttcaccatgtgggccaggctggtctcaaactcctgacctcaggtgacccacctgcctcggcctcccaaagtgctgggattacaggcgtgagccaccgcacctggcctgtctttatgtcttaagggggcctgagatttgttttaatgaagtatagtaagacaagcagatatgcaaatgactatcatgagggaaggagtttgctcgtagttccctgtgaacaggaagcaggccatgccacatagggccacagagggaagcaccaggtggcatcagccaggaggcagagggagcagggggaaaatgtgggcaagcccctttgacacggttgccacgggaaggaataggcaaggcaggctaaagaggtttacgattggcagcaggctctggggaaaggggctgtccccagccagcttcctggtacccggctctgtggtgattatggctggtggatggcagccaggagctgagagctgtataaaggaggtggttgggtatggctctggactggtttgcctttgctccctagagagatgcctgccaattccacctccccagagagctgcctcctatctctaggaattgtctagcctgggagaggcagtcctccagtcttagtctgtttgtgttgttgtaaaagaatayaggaagctgggtaattcacaaagaaaagaagtttagttaggccacagttctgcaggccgtacaagaaacatggtgccagctgggcatgatggctcacacctgtcgtcccagcacttggggaggctgaggtgaaaggattgcttgagcccaggggtttgagaccagcctgggcaacataatgagaccccatctctactttttaaaaaataattcagggctgggcatgatggctcatgcctgtaatgccagcactttgggagccccaggtggatggattacttgaggtcaggagttcgagaccagcctggccaacatgatgaaaccccgtctctactaaaaatacaaaaattagccaggcgttgtggtgcacacctgtaatcccagctacttgggaggctgaggccctggagtcgcttgaactcgggagtcagaggttgcagtgagccaagatcgtgccactgcactccagcttggtcaacagagctagaccctgtctcaaacacaaaaaataaaaacaaagaaatgggcaagtggctggccccaaggcacaaggccctagtggcaggcccggtctggcctggagtggagtggtagtgactctcaggcaggcagggaggaggaagttgggcgtcaacctaagaccaggctcaccggcttgctgggaaggttaccaagatgctgtgtggtaagtactgagaacagcctgagggtttgtctttcactccttcccctcatgggggctgcaaactcaccccgtggcctttctgtccttccctcagggcccgaagttgctcagcctgaagtagacaccaccctgggtcgtgtgcgaggccggcaggtgggcgtgaagggcacagaccgccttgtgaatgtctttctgggcattccatttgcccagccgccactgggccctgaccggttctcagccccacacccagcacagccctgggagggtgtgcgggatgccagcactgcgcccccaatgtgagtagtgctggtggaggcgggcaaacaggmaggttgcaggagaatcctgctgctggggcttgtggggctgaacagctggacctcaggcccacccttggccacaggtgcctacaagacgtggagagcatgaacagcagcagatttgtcctcaacggaaaacagcagatcttctccgtttcagaggactgcctggtcctcaacrtctatagcccagctgaggtccccgcagggtccggtaggccggtaggcaccccagagggccctgtccacctgatccagctccactatgcctacctgtcccctccccgtccctgtttccaaagcaccctagcggtcctgagactgcctgggctggcaggtgggcagctaaggtctcaggagcttgggggtcagtgccccatggccacctctgcaggtcatggtrtgggtccatggaggcgctctgataactggcgctgccacctcctacgatggatcagctctggctgcctatggggatgtggtcgtggttacagtccagtaccgccttggggtccttggcttcttcaggtgagacgacaggcatggccagagcactgcctgcaccggggagaggccagctcaccagagcaactggggatctaggttggggtccggaacctgaagggagggccccttacccatgatgtctgaggcagagaagggcaccccccaagcctccaccctgggagaggggtccagccaaagccagaattatacagtgaacttggtcccttgggcagagggcattgattcctgggctgaagcccaggttccagcaggatatgggacaaagagcaacaggctgtggagatgccaaccacggctcccagacaggccagacctggggagcaragaagggtctggcatcctggtggctaawtcaaagcaaacctgcagaggctggcgaggagccaggctgaactaaccgttgccccaacactgcccccagcactggagatragcatgcacctggcaaccagggcttcctagatgtggtagctgctttgcgctgggtgcaagaaaacatcgcccccttcgggggtgacctcaactgtgtcactgtctttggtggatctgccggtgggagcatcatctctggcctggtaagtcactatagggggctagtgatggtggccaggagggctccggtggtctcagaactcccagctcctctgccctcctctgacagccacctcctctctccaatgcacccaggtcctgtccccagtggctgcagggctgttccacagagccatcacacagagtggggtcatcaccaccccagggatcatcgactctcacccttggcccctagctcaggtctgtatttccttccctctcttactctatgtgtgcctcccataccccactctgtgctggccctggggtctcagagtagcggggtttgctggcagggagctccctgttagcaaagagaagcccaataagacgaaggagcatcagaggaaacaactgctgcattccagcatattggcactcagggagggcttcctgaaggaagccaccctgaagcatatcattgttggccctttctccagggtggggtcttcaggagcacccctctctgccccaggcagcatggtggagggggtctccattgccagccacctgctgcctgcgagctctccattcaggctccagatccccaccctagatcctcattgtaaggccttgtgaagaaaatccaggggaagccacagtgggaactgcatctgcaaaggctgcaggtgtgggagagagtgacaggtcctgcaggagcaagctcgcaggttagggaacagggcaggaagtgaaggtgctggagaagtgggggccatgcctgggaatctggactttctccagagggcaggaagaagttgggcaatgacaaggttgagctacctggagtagaaggtgggttggagggagccgtcctgaagatcaagacaccagtgaaatgaccagggcagagtccaggagaaagagacaggatggaatagggatagagccatcggggagagagggggcaaatgtgagcaggatttggaagactgggtcaattccctcacctggccccagatggtggccaaggcagtgtgggctgggcattttaaccactgtgtacaagatgattctggaacctctgcgtgggcatgttgactcttgtatggacaacagcatcctcctctcaacctccccatcccatcctctccccatggccaggagagattttctcaaccacagacttgaggtcattccctgtctctcctgtgtccaaagaaaaacacagctcaaggctgaggttggcggatcacaaagtcaggagatcaaggtgatcctggctaacatggtgaaaccccatctctactaaaaatacaaaaaattagccgggcatggtggcaggtgcctgtagtcccagctactcaggaggctgaggcagaagaatggtgtgaacccgggacgcagagcttgcggtgagccaagatcatgccactgcactccagcctgggcgacagagcgagagtctgtctcaaaaaaataataataaaagataatgacactattcttagagggcaatgaggactcagtgsccccattcccccagataataaaattatggtataataggggacgcaagggggcccttgggaccacccaagctgacgggcagggcaggcttctcaggagtggtgacaagtctgtgaccagtctcgaggccgatctgtgacatcacatccagctgtcctacagatgcaccctctctgtgggaggcagaaggctgcaaggtggggctgagtggctgagagggaggcatgactctttcatttgtccccagaaaatcgcaaacaccttggcctgcagctccagctccccggctgagatggtgcagtgccttcagcagaaagaaggagaagagctggtccttagcaagaagctggtatggccacccttttggrgatggtgccgggcaatggcacagagggggttctatccatcccctgcaggagcagaggggcagtctacccccaggtggggctggggacagcagctcatgaggggaaggggctgagggcttggagacagaaatggagggccatctccatccccacagcaggcctgtcttctaggaaagaaactggacgcatctgttgccctgatctcctggttcccccgacccccttaaccctggtgatcttcatcccttcactttccctccaggctcagacactcaggcctgcagctcagtggctgctggggtcctagcctttgaggcttggccctaacttgggagcctcctgcattgctttctcctgcagaaaaatactatctatcctctcaccgttgatggcactgtcttccccaaaagccccaaggaactcctgaaggagaagcccttccactctgtgcccttcctcatgggtgtcaacaaccatgagttcagctggctcatccccagggtgagttgctcccacccctgtgcccttcaaggccctgccccagccagtacctgccaccccagcatcaacactacagccttgtgaacggagcactcccgttactcccatttgataagtgagaaagcagaggcccagaaaggtttgagggacttgcccaaggtcacccagctttgttttgttgtgttgttgttttgcttttttttttctgtttttgtttgtttgtttgtttgtttttgagacagagtctcgctctgtcacccaggctggagtgcagtggtgcgatctcagctcacttcaacctccacctcctgggttcaagagtttctcctgcctcagcctcccaagcagctgggattacaggcacatgccaccacacccagctttcaccacgttggccaggctggtctcaagctcctgacctcaagtaatccatctgctttggccttccgaagtgttgggattacaggcgtgggccacttcaataaagcaaatgttttcttttggggaacaaggtttttgcacaaactggccttctgggcactgctgatctgggcagcatattcctgccttggcgtctggtttatacatcaggctctatgagactggttagtgtgactctgtgccagagcaattgactaaaactctcaggttttagatatcaagccaccggggacttcatgagccaagtcccttccattcctttccaggtgcatagaacttcccacaagagtgtcagcactgtgctttcatcccgagcatcttgtttctgtcattcttattcttctacccatcttcacagcaatcattttcttcacttttctttttttttttttttcgtcttggcccattgcacaccytaagacaaagcaatccatttttgttgttgttgttgtttgtgtgtttgtttgttttttgagacagagcctcgatccatcatccaggctgcagtgcagcagcgccatcatgactctctactgcctcaacctctcaggcccgagcaatcctcccagcttcctgagtagctcgggcctcaggtctgtgccaccatactctgctaactttttttttcttccgtgtatagtcaggtctccctctgttgcccaagctggtctagagcacctggcctcaagcaatcctcttgcctcgacctcccacagtgctgggattacagacatgagccacagcacccagccaacaaccacttttaatggctgcaaatcttccacaaatggagcgtctcgttacattgttctttcatcttggcatttgggcatcttctagtttttttgtttgtttgtttgttttgtttttgagatggagttttgctcttgttgcccagggtggagtgcaatggcgcgatcttagctcaccgcactgcaacctctgcctcccaggttcaagcgattctcctgcctcagcctccygagtagctgggaytacaggcatctgccaccatgcctggctaatttttgtattttttttagtagagatggggtttctccatgttggacaggctgatctggaactcctgaactcaggtgatccaccagccttggcctcccaaaatgctgggattacaggcatgaggctgcacccggycctggcaacttctagtttttaccactgaggctaatagcgcagtgaatgtcttcatgtccatggcttttgtcctctgacttagccctttggaatcaatcccctcatattggtcccttggtatgtgagagagaggctcatgcaatcttgacattcaaagacaaagcttaagccgggtgcggtggctcatgcctataatcccagcactttgggaggctgaggtgagtgggtcacttgaagtcaggagttcgagaccagcctagccaacatggtgaaaccccatctgtactaaaaatacaaaaattagctgggcgtggtggtgcatgcctgtaattccagctactcaggaggctgaggcacgagaatcacttgaacccaggaggcagaggctgcagtgagccgagactgtcccactatactccagcctgggtgacagagtgagacactgtctcacaaaatacaaagcttgtaaaagttttcaggtcaatgccctcaactctggcaggcagcctttaccccacaccatcaacttacagttgtatgagtgaaaccaagggaaccccaacctggctgtgccccaggacctgggtagatctgcctggcgtggaaggctgtgcccaggacttgttgctgagaatgtttcttagaagttgggtgactcaggctgggcccggcggctcatgcctttaatcccagcactttgggaggccaaggcaggcggatcactcaaggccaggagtgtgagaccagcctggccaacatggcataaccccacctctactaaaaatacaaaaattagccaggcacggtggtgcacgtctgcggtcccagctactcgggaggctgaggcaggagaatagcttgaacccaggaggcggaggttgcggtgagccgagattgcgccactgcactccagcctgggcaacggagtgagtctctgtctcaaaaaaaaaatgttgaagaaatttttcattctctacagttgcctttaaccacttgcctgttgtatttggggctgctctccccatccacaccaaccacctcccaccaatttgcggtttatctttttggatctgtggacttttcggccccattttggccaagtgctccatgatgagtttctggcctcaggaccgtgaacactctcttgcccagggctgggagtcggggtgagccggtggtcaggctccactgagagggccttggtgtccacacagggctggggtctcctggatacaatggagcagatgagcygggaggacatgctggccatctcaacaccygtcttgaccagtctggtgagacaagaggcaggagggaggaagctagggcaggagggaggaagctagtgggtatcccatccaacagcacagtctctgcccctaccttccgacacccacagctacccacctaccaccaagcccctttgtctaactgatcaattttacttccactccggaatctccttagatatgagccagtgtggttctcaaaggaaaaccatcatcaccatcatcgtcaacatgaaactgcccgttaatgagcacatattacgtgccagggactatggtgcactgagcgccgggagagggtttcatctccttcaatcctcactgcaactctgttttcttttcttttcttttctttgtttttttttttttttttgagacagagtcttgctctgtcgccaaggctggagtgcagtggcccgatctcggctcaccgcaacatccacctccctcattcaagcgattctcctgcctcagcctcccgagtagctgggattacaggcccctgccaccatgcccggctaatttttgtgttttagtagagacagggtttcaccatgttggccaggctggtctcaaactcctgacctcaggtgattcacccgcctcggcctcccaaagtgctgggattgcgagcgtggagccaccgcgcccggcgctgcaactctttacagaggaattctcgctagccccattttacacatgaggaaactgaggcttgaggtgtcatgctggggaaggggcagaggcagagtttaagccagttttgtctgaccctagagcctcagctgtcagatgtggagctagatagacctggggccaaatcccagccctgggcacttgcccagttatcctatcccctctaagcccatctcttcatctacacatggggatgacactgcccactcgcctgggctgttgtaaggagactagacgttgcatttgaagagtctacctgggatctcaataccaggggctgttcaatctttgtccatttcccttctttggaagccccagaacccttcccattcacgcaatctcatcactgccctctggagctgaggggagcccctatcatttctgctctcacttacttcccagttaacttcaaccgagcacctgcttccaggccagaccctttgctggggacttcacataggctgccaggcagagactgactttcagagaggtttagccacctgtctgcgatcacacagccaagcagtggttgcagagctaagatctgactccaaacctgagcttatgccaaactcccagggaggcagagaggcagctggctgtcccctggaccatcagccctgggatttgagggaagctatgctggagagtttggggcttcctgggatggtctgccacatctgtgcaccctgagcagggctgagcctggcctcttgccccaggatgtgccccctgagatgatgcccaccgtcatagatgaatacctaggaagcaactcggacgcacaagccaaatgccaggcgttccaggaattcatgggtgacgtattcatcaatgttcccaccgtcagtttttcaagataccttcgaggtaagcctgtccctggccacctgcccaacccctcccacttgggcccaggagctgggtcatcacaggtgacatggcatgatagggtgctggttccctcaatgccttgcaccccacaccccactgccccccaccaaacctatctttctctgggatgcagtgtcatagtaatgagaggtatctccagcaggaaactatgcagaggagaaaacctcagactcagagaggtacaatgactcaccaaaggtcacccagcagggcctatcactaattctcagggattcactcaaatgggtgatttcatcctctttcagcacttctggggggaaagtcttgcttccttcaagcctagtagctaatccctgatgcagacccagaacagttccagacccagaactttgtgaccttgggcaagatacctaccccctctgagcctcagtttcctcctttgtaaaatggaaataataatagaatctaatctattaattctattaatacagaatctattgtgatggggattcaataaatgatgacactggccaggcgcggtgggtggctcaatcttgtgatcccagtactttgggagaagcgggaggatcgcttgagcccaggagttcaagaccagcctgggcaacatattgaccccaatctctacacaaattttttgaaaattagccgggcatggtggtacacacctgtagtcccagatacttgggaagctgaagtgggaagatcacttgagcgcgggagtctcaggctgcagtgagctgtgatcatgccactgcactccagcctggtcgacagcaagaccatttcagagattaaaataaaaatattaaattaaattaaaatgatgacacaaagcacacagaatggtgcctgtcacctagcaagcgctcagtaaatgtttgcagctagtcattttatcatcatcatcatcatcatcatggaaattggtgttattatgagcatgtgctgccaaaggcagcatcgaatcaggccatgagtgcctaactcccatcccatcctttctctgtagattctggaagccctgtctttttctatgagttccagcatcgacccagttcttttgcgaagatcaaacctgcctgggtgaaggctgatcatggggccgagggtgcttttgtgttcggaggtcccttcctcatggacgagagctcccgcctgggtgaggacagacagacagacatgtgatccctaggctgccagactccaaggggcctgggcagggcttgcaggaacacgggtctccagtcagcactgaggatccttgggtcccttccaggtcccacctgactctcrttcagttctgtccctctcacctttccagcctttccagaggccacagaggaggagaagcagctaagcctcaccatgatggcccagtggacccactttgcccggacagggtgagtgagtgacagggcatagctcgctttgggcctgggatgctcaggtcggcccctctgggggacagcacaggaagccttggtcctcattcattcctcccacccagggaccccaatagcaaggctctgcctccttggccccaattcaaccaggcggaacaatatctggagatcaacccagtgccacgrgccggacagaagttcagggaggcctggatgcagttctggtcagagacgctccccagcaagrtacaacagtggcaccagaagcagaagaacaggaaggcccaggaggacctctgaggccaggcctgaaccttcttggctggggcaaaccactcttcaagtggtggcagagtcccagcacggcagcccgcctctccccctgctgagactttaatctccaccagcccttaaagtgtcggccgctctgtgactggagttatgctcttttgaaatgtcacaaggccgcctcccacctctggggcattgtacaagttcttccctctccctgaagtgcctttcctgctttcttcgtggtaggttctagcacattcctctagcttcctggaggactcactcccccaggaagccttccctgccttctctgggctgtgcggccccgagtctgcgtccattagagcacagtccacccgaggctagcaccgtgtctgtgtctgtctccccctcagaggagctctctcaaaatggggattagcctaaccccactctgtcacccacaccaggatcgggtgggacctggagctagggggtgtttgctgagtgagtgagtgaaacacagaatatgggaatggcagctgctgaacttgaacccagagccttcaggtgccaaagccatactcaggcccccaccgacattgtccaccctggccagaagggtgcatgccaatggcagagacctgggatgggagaagtcctggggcgccaggggatccagcctagagcagaccttagcccctgactaaggcctcagactagggcgggaggggtctcctcctctctgctgcccagtcctggcccctgcacaagacaacagaatccatcagggccatgagtgtcacccagacctgaccctcaccaattccagccctgaccctcaggacgctggatgccagctcccagccccagtgccgggtcctccctcccttcctggcttggggagaccagtttctggggagcttccaagagcacccaccaagacacagcaggacaggccaggggagggcatctggaccagggcatccgtcgggctattgtcacagagaaaagaagagacccacccactcgggctgcaaaaggtgaaaagcaccaagaggttttcagatggaagtgagaggtgacagtgtgctggcagccctcacagccctcgcttgctctccctgccgcctctgcctgggctcccactttggcagcacttgaggagcccttcaacccgccgctgcactgtaggagcccctttctgggctggccaaggccggagccagctccctcagcttgcggggaggtgcggagggagaggggcgggcaggaaccggggctgcgcgcagcgcttgcgggccagagtgagttccgggtgggcgtgggctcggcggggccccactcagagcagctggccggccccaggcagtgagggccttagcacctgggccagcagctgctgtgctcgatttctcgctgggccttagctgcctccccgcggggcagggctcgggacctgcagccctccatgcctgaccctccccccaccccccgtgggctcctgtgcggccggagcctccccaaggagcgccgccccctgctccacagcgcccagtcccatcgaccacccaagggctgaggagtgcgggtgcacagcgcgggactggcaggcagctccacctgctgccccagtgctggatccactgggtgaagccagctgggctcctgagtctggtggggacttggagaacctttatgtctagctaagggattgtaaatacaccgatgggcactctgtatctagctcaaggtttgtaaacacaccaatcagcaccctgtgtctagctcagtgtttgtgaatgcaccaatccacactctgtatctggctactctggtggggacttggagaacctttgtgtccacactctgtatctagctaatctagtggggatgtggagaacctttgtgtctagctcagggatcgtaaacgcaccaatcagcaccctgtcaaaacagaccacttgactctctgtaaaatggaccaatcagcaggatgtgggtggggcgagacaagagaataaaagcaggctgcctgagccagcagtgacaacccccctcgggtcccctcccacgccgtggaagctttgttctttcgctctttgcaataaatcttgctactgcccactctttgggtccacactgcctttatgagctgtaacactcaccgcgaaggtctgcagcttcactcctgagccagcgagaccacgaacccaccagaaggaagaaactccgaacgcatctgaacctcagaaggaaccagttcccgacacgccacctttcagaactgtaacactcaccgggagggtccgtggcttcattcttgaagtcagtgagacaaagaacccaccaattccggacacagaagtaaacatttcttgctttgaggatcaatgtaccactaccttaaaacacctgggtttatttttgtttttgttttagagacagggtccactctgctgtgcatgctggactgaagtggcacgattgtagctctctgcagccttgaactcctcgaactcactgcagcctcgaactcaatcaagcgattctcccccctcagcctcccaagtagcggggactgcaagtgagtgtcgccatgcctggataatttttttagtttttgtagggacagggtatcaccatgttgccgagactggcctcaaactcctggcctcaaatgatcttcccggctcggccttccaaaacactgggattgcaggtgtgtcccactgtgcccagccaacacctggatttcaatacatatcccagagtcttccctgcccccgttatgccatcctaccagctccagtcgcacaaatgcccttcctcagtcagactgagctgctggctgctgatgggtgggtgaaaagcattttcattttcttttttctttcttcctttctttctgtcttgtttttttgagatggagtttcactcttgttgcccaggctggagtgcaatgacacgatctcagcccactgaaacctctacctcccaggtccaggcaattctcctgaatcagcctcccgagtagctgggattacaggcgcccaccatcatgcccagctaatttttttgtatttttagtagagacagggtttcaccatgttggccaggctggtcttgaactcctgacttcagatgatccacccacctcggcctcccaaagtgctgggattacaggcgtgagccaccgcgccyggccagcattttcatttccaactggaaccagctctgttctgggaagtccattttggggaggaaggagagacagaaagccagaagggctctgagtcatatcattctcctgctcgaaagctcctggtgactccctgtctccctgaagacaagtccaagttctccacgtgycactgaagtcctgctattctcatccacttccttccaccagggaagttcatccccacaagctggtagagcttgacaagtaggccctggccgggcacggtggctcacgcctgtaatcccagcactttgggaagccgaagcgggtggatcacctgaggtcaggagttcgagtccagcctggccaacatagcgaaaccttctctgtattaaaaaatacagaaatcagccaggcgtgctagtgtgcacctgtagtcccagttactagagaggctgagccaggagaatcacatgaacccgggaggcagaggttgcagtgagccgagatcacgccactgcactccagcctgggtgacagagtgagaccttgtctcaaaaacaaaacaaaacaaaacaggccccaataatacagtgtgtaactgggacacgaagggctgtgaggacacagagacgtagaccagcccagacttgggagacagggaaggagggacatctcagctgagacccgaggaataaacagaggttactcaaccgtgcagaccagcgtagaagactggaagggtggggagcgggggaagggcgtgcctggcagagggaacaacagcagcaaaggcctgaaggatgcaatgtgtggaggaatcgcggctctgcagggctggagaggtcagcaaagagcagacgtgagaggacttgtgggctgcgacaggggtcggcatggacttgacgctcatggaagccctgttgtatggaggagggtggctgggaggggggagaggagggggagagcagggagaacagggaggggaccagggtgggctgccaggtggatggagaggcactggtgggctctagatttagagtccgcagacaagaccgggcgactgaccagacacagaggttggggaaaagaagccccgatagggcagccttaaggcaagcaggagtggacccggaaatcaggggtctggtgtgggccacactggatgtacaaagaggcctcttcctctgggcctgatggtggcccccacagggcagccatgggagtgtagcgggggggtgttaccaggttgggtatcgccaacaccagcaggccctggagagggtgggcaagccggctgctgaggcctcagaccctgtcctagctccagccctctccgccaagggcatccttcacccagggagggaggagaatgtctggtactgccccaggggtcgggggatatgacctaccaggcagaggggattccaggcctcatgcctctgtattctctcttccctgaggctccctgaaggcccctccatgccctaggacccagcagccatgcagagctgaagggagcaagccaaagactcagacaggcgtggccctgcaggacagggactggtggacccgggagcctcccagtggaagggccacaggaagggccaagtgaacagtgcaggagtgtgagcaccagggggcgctgcaggatcagacgtgcacacctggaccccgccacaggatgaggtcctagcagatgcttccagtatctacccaaggccaaccttagttactcacacaacccgacagtctcacacacacacgctcacggatagggttcctacgagttccaccatttactgggtgtgtatcttctctttattttatttctattttttatttttgttgagatagagtctcactctgtcaccaaggccggagtgcattggtgtgatcttgcttcactgcaacctctgtctccaggcttcaaatgattcttgtgcctcagcctcccaagtagctgggattacaggcgcccaccaccacacctggataatttttgtttttagtagagacggggtttcaccatgttggccaggctagtctctaactcttggccccaagtgatccacccacctcggcctcccaaagtgctgggattacaggcatgagccactgcactcgaccacagatgtgtatctttgagtaagctgtgtatcctctttgttcctcagttttctcatctgtaaaatgagagtaaggttagtgactcccttcccaggtctggctgtgagtactgaaacatcattagccatgaagcacctagagtcgtgcttgacacacagccagtgctaaataagtgctccctggcacaggtataaacactctgctcgcaatgtccaaaaaaatcatatggctcctcgactacaactcaaacatggaagaattggggtatgtcagggagcatcataatattggcatgagtctcttccaccttaaaataacttctgggactaggggcagttgctcacacctgtaaccccagcactttgggaagccgaggtgggaggatcgcttgaggccaggaatttaagaccagcctgggcaacatcgcaaggccccatctgtacaaaaagttttaaaaattagccagatgttgtgtctcacacctgtagtagtgtgaggcaggaggatggcttgagcccaggagttcgaggttacagtgagctgattgagccacaacactccaggctgggcaacagagtgagactctgtctctaagtaaataaataacttctgagcctgtagctgcccaaaagaattggtcggtggacccctgggaggctctgaatggcaggttgagtgtcatatagagtctgtgtccctccctggggacttcagggaagccatgttcaagttcctccccagtctgtctatagccccacctcctgggttttagccaccccccatctccacttctgcacgcccccgcagcctccaccccagttcccagtccagcctgcccaggctccgggaaggctattccaagaacaggaaggaacttggcaggggaacgccagctctggttcttgcagtggcacccacatggccttctttccctgccctagcctgcctgccttccttcccatcacccccagacctcccacactttggggcatcgttgccactggagcctctcttcgggtgacgttgcccctccctgctgcccccaagctggccccttcccactcttcagacc

SEQ ID NO: 93819 - DNA, 55181 bp, Homo sapiens
aaacaccctcacaggcacacctagaaataatatttaaccagatatctgggcattcctggcccagtcaagttgacacacaaaattaacaatcacagatcctctctagctcagggctcaatacaccagcccgagagaacccccatccatcttctcctctccctgaatgactgaggagaccgtgcctctccaggcaacctctgccttaggaaatcctacagatgattcacaggaaacacatggctgtgctctctggggcaggggcaatgggctgggtaggggtttcaaaatcaaccctgattgacagagccacgggtgcttgcagtttttccctgcaccccccaccctctcccctggacaaggtgggaacagggcccttgaaggggagtacactgcaggaggaaaaagaagagaagggagagggtttgagcacccctctctgtcctcatgtggtctctggaacgagcatgcacactctcccctttctcctccctgcacagagtccctgtgttccgggcccacaccctcacttaggaggctctgcctcccccagggtttcccaaatcctcctcccagaacatgccacatatttctgaaggtccttttgccaacaagcattgtcctgggaatatcaggctggttccttaccgtaaaattacccacatagtgaaacttttttttttttgagatggagtctcactctgttaccaggctggagtgttaccaggctggagtgcagtggcacgatctcagctaactgcaacctccgcctcctgggtcccagttcaagtaaatctcctgcctcagcctcccaagtatctaggatcataggtgcgtgccaccatgcccagctaatttttgtatttttagtagagatggggcttcaccatgttggccaggctggtcttgaactcctgacctcatgatctgcccaccttggcctcccaaaatgctgggattacaggcgtgagccactgcatccggctgtgaaacttttttttttttttttgagagagtctcgctcagtcacccaggctggagtgcagtggcgcgatctcggctcaccgcaagctctgcctcctgggttcacaccattctcctgcctcagcctcccaagtagctgtgattacaggtgcccgctatgacgcccggctaaattttttttttttttgtatttttagtagagatggggttttgctgtgctaggcaggatagtctccatctcctgaccttgtgatctgcccacctcggcctcccaaagtgctgggattacaggcgtgagccaccgcacctggccttttttttttttttttttaatggggactgggtttcgccatgttgcccaggctggcctcgaattcctaggctcaagtgatctgcctgcctcagcctcccaaagtgctgggattataggcgtgagccaccaccaccatggctcactgcagcctcaatctcctgggccgaagctatcctcctccctgtctcctgagtagctgggactacaggtgtgcatcaccacattcagctaattaaattttttttttttggtagagacagagtctcactatgttgccactcctgggctcaagaaggtgtgaatcactacacctggccgtttttttttttttgtttagttttgtttttgttttttgagacggcaacttgctttgtcgcccaggctggagtgcagtagcgcgatcacagctcattgcattttggcgctgggttttcttgatatctcccccactggacctgaccggggcatgggctgccctgtgagtgcctcagccctcgtccatcactgcccatggggctgatacacctgtgtgcacacactcaggtgaagacagctgctgcccgtaggtgaggtaagacactgagcacctgtgtgggaggagatcttccactcccactctgtccacaccagaccatgaagagctctccatagcatgggtgctgaccaggcccagcctgggtgacagagtgagaccctgactcaaagaaaaagacataatgaggtgtgattttaatttcttggatgtcccagtatatataaatgttgggagtatggattgcttcatttcattttaaatagcattttttttttaagatggagtctcactctgtcacccaggttggagtgcagtggtgcgatctctgctcactgcagtctctgcctcccgtgttacaagtgattctcctgcctcagcctcccgggtaggtgggattacaggcatgtgccaccatgcctgaataacttttgtatttttagtagagatagggtttcaccatattggccaagctggtttgaactcctgacctccagtgatccgcccaccttggcctcccaaaatgctgggattacaggcgtgagccaccgtgcctggccaccctttatcttcttttctttttgagacaggatcttgctctgtcgctcagcctggagtgtggtgatgcagtcatagctcactgcactcttgaatccctgtgctcaagccatcctcccacctcagcctctactacaggcatgcaccactacacccagctatttttttattttttgtagcaacggggtctcaccatgatacccaggctggtcttaaacccctggccttgtgatcctcccaccttggcctctcaaaatgctggaattacaggtgtgagccaccatacctggcccccttcatcttttttccactgccttgtgccaacccagtttgtgcactggggccttgcgatcctctcaaagctgattcagcctgcattcctttcccagatggacacgtgtgtgataaacagctctgcagtggggtgagggaaggcaggggcagcagggtcctgtatgtcctgccatctccacaaaagggcagtccttaccccagccttgtgctgatgagaccaggcatagacagtcctgacgacacagggcggaagggagcagccattagtgcyaatgaggcaggcggcctgaaagctttgtactctgcagtggctcgcccacccagggaacagttcgttctgtttccttggcttccaggaaccctaggcagaaaggggtttggggacaggagcaggagtgggcggtcttggagaaacctggagggagaaagggaggggaggaccagaaatgtagtcaggagggcctaggattggttaggtgggcttttccttcccctttccctccaaagaaacccaggttctggttctgcacctacccctgcccaacagtggccattggcccatcacccgctccaatgtccttgacccgaattcttggaagcacaggaaacaacatgccacataggggttgagtaagcatctctggggccacaaattaaattaagctttcagggcygcctgccttgttattgctaatggttctagccctgctcagctcctaggtccctgtcctgtggaaatttgtggaccctgggcaccctctcttgctcccaaattttaatcggctcctggaaacctcaccccaaattggagataggcactcctcttgtagaacaaaaggctcaggttcagggagtgagggcctgaactgtgcccccaccctccaggaagggtccttcacggcctggctgcagggatcagtcacgtgtggcccttcattaggccctgccatataagccaagggcacggggtggccgggaactctctaggcaagaatcccggaggcagaggtgagtcctcaggttgggcagggactcctcctctctgtggggtctctatctgggcacctagaggggactccaaggataaggagggactaagtggtacatcttcctgctgagccaggccatgctgaccgcagcggtgctgagctgtgccctgctgctggcactgcctgccacgcgaggagcccagatgggcttggcccccatggagggcatcagaaggcctgaccaggccctgctcccagarctcccaggtcagtgtgagcaagggtgggactgggcggggcctgaataccctctggccacaaatagtctcccctggcataaaccctctttctcccttcccaaaccctcccctgggaggtgggtgctttgtgcatgggggttcctgccctcacatcctctgccccaggcctgggcctgcgggccccactgaagaagacaactgcagaacaggcagaagaggatctgttgcaggaggctcaggccttggcagaggtaactgctcagggaaaagggtaaggtggtggcccttgggagggggcattgggtattagctcctctccccagctccaaactccctcaccagcgacgacactaccgaccaccccttcccatgctccactgccatcctgcacaggttgggacaggtaagatccctggatctgtctttagaggcctgtgctggttccccacccctgcaggtactagacctgcaggaccgcgagccccgctcctcacgtcgctgcgtaaggctgcatgagtcctgcctgggacagcaggtgccttgctgtgacccatgtgccacgtgctactgccgsttcttcaatgccttctgctactgccgcaagctgggtactgccatgaatccctgcagccgcacctagctggccaacgtcagggtcggggctagggtaggggcaaggaaactcgaataaaggatgggaccaaccccaaggctgtggttatttcaaacgtggccgtcaaaggagggagggttcatggagggggtgggagtgtcaccaagccaagaaaccacacatactcttatcccagggcctgggctaccctatcataggaggcacatacacgggcgcttttaggggtcctggtgcccctgggaaaaatagagaagagccgcactccagctttcgaaaatcttgtacagcaagtgcggggaacgcaggacgcagcgtggcacaggggctatcactcctggctaacaaataagccttaggctccagggcttgctgctacttccacgcaaagcctgcccctcatcctgttaccagagggaaggccaggagtgtgcgttgttcaggtccttagcgtttcgaacaaagaattgaacaaaacccagaaagtaacaaacgaatgacacacaggaaggaagcagacagctgggatttgttaaagcgagaaagcactacgcagggtgggagtgggcctgagcaagaggctgaaggggctcagttacaaagttttccgggttttaagtactccttttgcggtccctgtccgttaccccttatctggatgaagggtttggtccatggctaattaatccatttatgcctgaggttgcaatctttttgaatttttgcaatcagaccttggccatgaccttgagcagtaggatataaataactcccatatgcttagcgttccaataatggaacacaaggcataaatggggctaaggtgaattggcgccctatgcagatgaagggatggcccgtgcttggcccgcagccaatccaaggcactctccctttcaactgagacgtggtggaagggggagggttgtggggacagtggcctttgatcctttgttacttggacatggggagatggggtttttctttttggtttagctttagtaagctcgccttagttggcctccggttccctgcccccagaccttggtgttttcccttgattcagcttcagaattcagcacgtattggcctcaagttccccgcctccagaccctattctcctacctcaatcggacctcagtttccctctggggaggaggctggcccagcagtctggaaactttccaagcttgagaagggctcgctcccttctttaccccgcccgccctgcagcgtcaagtgcagcaaaccggggaaagctagagaaggcccagtcaaatccctgcggccacaggcgccaccaagcggccggcctcaaacttcctctttttagcgcgcaggcgccgcagggccagcccacgcctgcaccgcgcttccgcgcagccacccggaagccgggcaccgctcagagccacgcccccttatggtcacgtgaggcgcttgcgcgtcacctgacgcacttgacagcccgctgaggacgcagcgtcagctgacctggggagtcgcgattcgtgccggccggtcctggttctccggtcccgccgctcccgcagcagccatgtcgttcttcccggagctttactttaacgtggacaatggctacttggagggactggtgcgcggcctgaaggccggggtgctcagccaggccgactacctcaacctggtgcagtgcgagacgctagagggtgagccggggccgcgaaaggcggggatagaggctgtccggggcctgagggttcagaggtgtaggccgggaagccggaagggggggtcttgaagggcctgagaggcctctctgggaatcctggggctgatagcggacgcgcaggagcgggatctacctctagctgtggctcggcgcgggcccaaactcaaacaaggctttaagaaccgcagttgttcgcctctgcttgggccaccttttctctcgctgtgctcaccctgcagtttgggaggagggggtgtttcgggggtagttggtcggtgcgaggtgtggccatacaaacctctttaccctgacgtagcccgagagctgtcgcgtagcaacccttagggaagctaagcggaaaagtcccccacctcttccccctccccccgccaagacactaaggtctttgggatcatcgtgtcttcgcgttggcctgcggggtgagccttcctggggaattgctgagccagtttatcgagggttttctcccaactctgaactgctggctgggcagtatctcctgaaggcaatgtttgggagaacaagggtggcccttgcaggtctggaagttcatatacaagtatttggccaattaatcccaccccctcagcgagggggatgcctgttgggacagggtttctgagcacaagagtaatgagaaaccgagttcccctttcttctcagcacacagctccagagtggcgttgacttctttttttttttttttttttttttgagacsgagtctcgctctgtcgcccaggctggagtgcagtggcgggatctcggctcactgcaagctccgcctcccgggttcacgccattctcctgcctcagcctcccaagtagctgggactacaggcgcccgccactacgcccggctaattttttgtatttttagtagagacggggtttcaccgttttagccgggatggtctcgatctcctgacctcgtgatccgcccgcctcggcctcccaaagtgctgggattacaggcgtgagccaccgcgcccggccgtggcgttgacttctgaggcacagctccaacagatgtactgagttagaggtgtccctaattccagtctttgccaaccactcccgctccaggtggtagggaagggaagggtggccaggatgtgaggggattcctgatcctcaagtggtactcttgagcagaggtgctgatagcctcgtaattggtagctgggtggggggaggatggccagatgtttcacccactagagaacattttctcgtcagaaacttcgtgaggttaaaagtgagctcaaatgaaaaagtcatttattgtttgccttgcaaactggaccagtaaagtgaaaataaatacctttaaaatagaaaacttaccgttaaaatacaataattgtaggtgttatgattttaatgtaaatctgcagtacaggccaggcgcggtggctcacgtctgtaatcccagcattttgggaggccaaggcgggtggatcacaagggcaggagttcgagaccagcctggccagaatggtgaaaccctgtctctactcaagatacaaaaaattagctgggcgtggtgacaggcgcctgtaatcccagctactcgggagactgaggcaggagaattgcttgaacctgggaggcaaaggttgcagtgagccaagactgcaccactgcactccagcctgggcaacaacagagcgagaccccgtctcaaaaaaaaaaaaaaatcggcagtacaataattgtaggtgttatgatgttaacgtacatctgcaagaaaagttgtttaccttacttatgtgagtggaggtggggaaggagagcactttaggatgctgggtagtaggcatctgccagcaaccgattacccttactgtggtaaaaaggggagaatagagggaggctgcctgggacagggcctggcacacagttggagcttaatgtgagttttgtggactgcctgggacttgtcgaaggtctttatttgcctaaatctaaggtgaacatcattgatcatcaatagacattcggttggttgtttcccttcttgactttcctcactcctgctgctgtccgctctcctgtaacagcttctgggggcacagggttcttcccatcttcccaggggaccctctatcatcccccatgaacatgttaggccattctttctacacatttttcctataacactgctcaacataggcacccaccctcccgccctctgccccaccttgtagaataccatccagatctttagtgtggcattcaggtatcctttgctcattcacacacatttctttctttctttcttttttttttttttttttgagacagagtctagccctgtcacccaggctggagtgcagtggcgcgatctccgctcactgcaacctccacctcaccagttcaagccattctcgtgcctcagcctactgagtagctgggattacaggcatgtgccaccatgcccagctaatttttttgtattttttagtagagaggattttgccatattggccaggctggtctcgaactcctgacctcaagtgatccacccaccttggcctcccaaagtactgggattgcaggcgtgagccaccacgcttggccattcacacacatttctatccctcatatccctcatgcaagccatccctccagcacttggtgcacaaagtgtggtggactttggagttaggcaaacctgggttgaattccaatcctgccaattactggactactttagataacctatttaacacctccgggccttgggtttttcaactggtgtattaacagcacctatctcatacaggttgtgaaatgtcaacaagctacaacatgtaaaacacttagcccagcaccaaggacagaataagcgctaggtaaatgttagcccttgttttcagtattgtttgtacctgtaccctccagaatttcgctttcctcttttctctttaaaactgtttattgacagggcgcagtggctcatgcctgtaatcccagcactttgggaggctgagacgggtggatcatgaggtcaggagatcgagaccatcctggctcggtgaaaccccgtctctactaaaaatacaaaaaaattagccttgtgtggtggcgggtgcctgtagtcccagctactccggaggctgaggtaggagaatggcgtgaacccgggaggcggagcttgcagtgagccgagatcgagccactgtgctccagcctgggctatagagcaagactccgtataaagaaaaaaaaaaaactgtttattatggatactgtcaaacatatacaaataagaagcaataatataatgagcccctaagtaataatcatctaactacaacaatcataaattcttattgataaaataattatctgtcttgtttcaatactagttccatttatacccccactcccaaattattcagaagtaagtcccagacagcataccctttcagttgtaaatatttcagcatctctgaaaaaagtcatgagtattttaaaaaaatgacaatattattcctccttccttaaaaacagtaatttgttaatgtaatcagatatccatttagtattcaaattcccctgattgtctcaaatttttaaaatatgatttatttgtttcaattgggatgcaaatatgatccatacatttcagttgatactctctcaagtattttaatatatagattgaagttagatcacttgattaatagattttccatccatctcaattttactgatcccatctctgacatatagttgaacttgttcctctgtcccttgttcccactttaaattagtagtagatctagaggcttgctcagattttggttcaattcttttttttttttttttgtaaatacttaataggtgatgtttgtacttcttttttttttttttttttttaatttgagacagagtctcactctgtcacccaggctggacatctcggctcactgcaacctctgcctcccaggttcaagtaattctcctgcctcagtctcccaagtagatgggattacaggcacccgccacctggctaattttttggtacttttagtagagatggggtttcaccatgttgcccaggctggtctggaactcctgacctcaggtgatccacccacctcagcctcccaaagtgtcaggattacaggtgtgagccactacacccagccaatgtttgtacctctattgggaggcacataatacctagtttctctttttaggatgtaaggaataattgacatttattgactgaagccatcgtttcatcgggggttgcaaaatagtgctattctaattctgtttccttctgtagttgccagcttgactacttctatgcctgtaaacttccagtaatcaagtacttagttatcctgagatacagtctgtataggagaggttaagataaatgcttatttctttccaatagttaccaggtttcaaaataaagagttgtttcactgacatcctccaaaaatgactaatgaggttttgtgactaaaccaaccaagatttgtttagtattataacacactaatggtttttaatgtatttgttatgtttcagttgattaatcttattgatgcttaaattgtctcttggccagtggaagctttttcagttgactkccaagtcttttttatataaccctgtagccattgaaagcttccttactatctgagatgtctggttttttttttttttggaatggaatcttgttttcttgcccaggctggagtgcagtggcacgttctcagctcactgcaacctctgcctcccaggttcaagtgattttcctgcctcagcctcctgagtagctgtgactacaggcctacgctaccacgcctggctaatttttagtagagatggggttacaccatgttagccaggctggtcttgaactcctgacctcaggtgatccacccacctcggcctcccaaagtgctgggattacaggtgtgagccactccatctggcctgggatgcccatatgttctaatcttaccttgaagatttcttgacccagacctagagtcttcatttctcttaggagacttggttctttgtattacaaaattgtatttagagaccataatctgagtcatatggggttctcattgatactgtattggacatcagtcttggttttttccatggctagtttagctcttctcttactcagaaacttggaaaatacagagaagcaaacagcttgctggattatgtagcaccacttcagctgatgagtaccagaatgccagtttcctaatttggaataggagctctacctgatacttgggccagtcaggacatcttcctcctgttgcaaagaaatataattaacactcaagaggagtcctgtgaccttctcagcttccatgtgagctagtggtcctggaaattgttcttctcagccagagagttagatygttggaggccatgggtgaagggcccatgtttgatgtgctggctgttgtccagaacacttttatccctctctaccctgattgatttgtcttctgtccattacatctctttgtgcctttcaacattatttcacaagagacaattttatgcaggaagaagagagactccaggctggacttggccaatcgccagtcgcaatgtcacatgaaactgcagatgcaaatgttgatggtgtggcaggtcgtttagcacagactgtggggtggttaggactgtggctggaaagttaaggagagattagctctagaaggatcgtaaaaaccatagaaaggactctgtcctgagtgcagcggatgggatagtaaaactattagacttgtactttaacaggatacctgcaatttgaaggtggaggccaccctggaggcagaaagaacagtttgcaggttcttatagtaatccaggctggcggtgaaggcagcttgacctcaagcattggctgggagtattgtaggagaattttaggaaggggatttgataggacttgagcgttgggcaagaaggctgggggaagaataagtcaaggtcgatgtcctcatcttggcttaggcaactgtgtaggtggcaaaatgaaatgatggtggcatgtaggagaaggaacacgttgtagaagtgagaagatgaaattgagggatctgtgagccatctgagtggagatatgaaggctatttttggtgctcaggtgtgacagttctgagcttgggaaattgagatagcggtgtgtccacggtccccaagagataaccatggaatcagaagactagaggctgaagatgggaccctcccccaggaagcacttcagttgatcacaggacttgggggaaaatgatggtcctgccaaaaaggccaaaggcattccctgaaatgtgggtagctccaaaggagagcctgaaaataaatgaggtagtgagtgccaaatgtggccaagagattgataaagtcagccttccatttggttttgccattcagaggtcataggagaccttaatgagaacagaagaaggtgaggctagaaggtgaccgcagtggatgggcagagacaatgtctagacagttagagaagaccttactgatggactgatcccagcgcagccacttaactggttttgtgaccttggacaagtcatttatcctcagctgtaaaatgggaataatattagggtctctgagatgtttgtgaagtgtaagcacagggcctgggaccaagtgaacagttggagaggccaggtgctccactgtggtcattccctgctgtcactcctaggagacaggtgccatggtgggccttgagtggctaatacaagtatgtcacacaggtcttgcttagggcaagtgtgcctgtctaacaggcagactgagtgaccatcaaaacagcattgagtgcacagtaagtgcagggtactttagggaggggatgttatgtggtgggtgacggttaatgggtatgggctttatttttggggtgataaaaacgtcctaaaactggccagaaacggtggctcatgcttgtagtcccagcactttagaaggccgagtcggggggatcacaaggtcagttcgataccagcctggccaacatggtgagacccccatctctactaaaaatacaaaaaattggctgggtgcagtggctcatgcctgtaatcccagcactttgggaggccgaggtgggcagatcacgaggtcaggagatcgagaccatcctggctaatgcggtgaaaccccgtctctactaaaaatacaaaaaattagccaggcatggtggtgggcgcctatagtcccagctacttgggaggctgaggcaggagaatggcatgagcctgggaagtggagcttgcagtgagccgagattgcaccactgcactccagcctgggcgactgagcgagactctgtctcaaacaaacaaacaaaaccacaaaaaattagttgggcgtagtggcgggcacctgtaacctcagctacctgggaggctgaggcaggaaaatcgcttgaacccggaaggtggaggttgcaatgagctgagattgcaccactgcactgcagcctgggtgacagagtaagactccatctaaaaaaaaaaaagtcctaaaactgattgtggggcggttgcacaattctgtgagtatgcttaaaaccatgaattgtacactttaagttggcaaattgtatggcaaatgaattatatctcagtaaagctgttgctgcgccaccccccccagccccaaattagccaggccaagaggtgggaagagcatagggagaaggaatggcattagtagtctcagaaacacgaaactgcctcgtgcatgacagcagccttgggaggtggaaggagaaagtagagtgtgtgtcgaggatttgcagcagcgaggtctggatagatgcattgggctggttcctggaaggctgtgggtgtcttagaaggacatattgctcaggaaggatgaaagttatggtaaaaaattgttttaaaaagagagagattcttagattaaggttaatgtgtaggaaatgtcttgtttaggattttctgtgtatgctcttgcctggaaatatatatatatttttttgagacagtcttgctctgttgcccaggctggagtgcagtggcgcgatcttggctcattgcaagctccgcctcctgggttcacgccattctcctgcctcagcctcccgagtagctggcactacaggcacccgccaccacgcccggcaaattttttgtattttgtttagtagaaacggggtttcaccgtgttagccaggatggtctcgatctcctgacctcgtgatcctcccgtcttggcatcccaaagtgctgggattacaggcatgagccaccgcgcccagccgcctggaaatattttatacatttcattttgtttgtcaaaggaaactctattgaattggtgaaattagatgaccacaacttggacagcaagatgagcttagctcagtcctaaattcctctgagtcaaacgtgatccaaaggaagagatgacatggtactggcaatctagtgactacaagcaagagagaggagctgggggctgggggagggcattgggagaagggtgtgcagaaggcaataatggaaggaacatttactctgtggaagaaagggaatgagcatgttgagttgtgagagcctggaccccacacaagcctgaagtttttccctcttgttggccccactgccctgggcagtggcattgctgcacaaggggaccccagtgctcagtggcggatgaactggcacaggttgttggtggtgtctggcagcctgctgcacctgttgctcccctccagcttgctgctgctgctgcctgcgagaatgaggccccagagcaggaatggaggctagggctaggcaggggggaggtttggcatctcgctgtcatgagccagtgtgggaacctaacccctcactgggtgaagaaaaggggaattgtggaggaggtagggttggtggtatgatacaattagaaactcactgggcctggtgtggtggctaacgcctgtaatctcagccactgaggaggctgaggtgggagcatcacttgagcccaggagtttgaggccagcctgggcaacatagtgagaaccaccccccggcccaatctctaaaaaaataataatatgggaggctgaggtgggaaggtcgcttgggcctgggaggttgaggctgtagtgagccgtgatcacaccactacactccagcctgggcaacagagagagaccccgtctcaaaaaaaaaattaataataattttttttaaaaaagaaacttgctctgagggaggggatgattaatctgtataaaattacagctagataggagaagttctattctataccatagggtgactgtatttaacaataattcattatatattttcaaactgctgtaagagaggattttgaatgttctcaacacaaagaaataataggccacgtgtggtggctcatgcctgtaatcccagccctttaggaggctgaggcaggtagatcgcttgaggtcaggagttcaagaccaccctgggcaacatggtgaaacccccatatctactaagaatacaaaaattagccgggcgtggtggcgcatgcctgtaatccccagctacttgggagggtgaggcaggagaattgcttgaacccaggaggcagaggttgcagtgagccagggtcacccccactgtactccagtctgggcaacagaaccagactctgtctcaaaaacaaagaaataataaatgtttgagttgatggatatgctaattaccctgaattgatcattcattacacagtgtatatatgtatcaaaatatcacatgtatcctataaatatgtgcaattgttacacgtcaattataaacaaaaaagaaacttgctctgaggctctagaggatggatttgtgggagcaggccagaagcaggacacttgctagctgctcttgcagctctctaggtaggagaatatggactaaccagggctggagtggaatgaggggggatgaaggaccaggtcagagatcagcttgggagatgaaacccacaagattggtccagtttttattagatgtgggtgaagagggttagaagtcaggctgctggcttaataaatgactgggtggatgctggagctccttttgagatacgggctaccagagaagggataggaaagttaggggtgcagattggggggtgggaggggaagtattctatctcagatgtctgagggagtccggcaggcagttggctgtgtgagatagtaacactaaagatattaacctggaagtcaccagtacactggctggtggcagttaggcccgcgccaggccatctgttggctcatagccgggcaagcctgccttggaagcctagctctgcccacaagtcctgccaggaggctagagagcagccttaactgtgggccaagtggacacaagtgtggcctaacgaggacacctggcatggagcccagtttggcaagcggagcagagagagggacagctgggctctccctccagattcctgccgtgtctcttcctgcatgatgctggggcatggtggttttttgttttcttgttttctttttgactaaatataattttttaattccaaaaagttggtagaaggatgacttggtgtagactctccaaggggtatacattgtcacccctttgtcaaaacactgcatgtatataccgtgcgaccctgcaacccaacttataagattgtgtcccgtagattaacatgggatagcatgtacagaggtgtttatgccagccttgttggtagcagcaaactattagaaccaatggaatatccggtgatttggttatggtctggttaagtaaaccatggtctattcttacaatggaatactacgagagagtgctcaaaagcatgaagttccataagggctgatttagaaatatgttgttaggtgaaaagttgcaaagcgttacatgtaatccctcatcttggtagactaccagatggacatatatgcatgtttttggaagcataggygccaagttgtcatgagtgacaacctctggggagagggatttatagaggctggtagggggaagatttcaatgttgactttttatgtactcttctattgtttaaatgtattacagtgaacacattttataatttgatacattcaataaagatatttaaggaaaattaggacatataggtaagcaaagagaagggtacccacacccagcagccatcaaagctgaggcctgtgctggagagcctgggacctttgtggtccaggttttgtttcgcattgtggggcattgtagggctggtctgagtcttagggaacccccatgaagccacttctctttacacctgaagactcccaagtcctatgggggtgcttgagggcccaggccagagctggacccttctcatgtcagctggccagagctgcagggcccctgtccaggtatagccactgtgagcaggtgaccacttaactggctgtttttctgtctgtcctttgcctcttcctcctgacccctactcctgtattccctttgttggttacatcttgcactggcatatactttagcccgattttattatttatttatttatttatttattttgagaaggagtcttgctttgttgcctaggctggagtgcaatggcgcaatctcggctcactgcaacctccgcctcccaggttgaaacgatcctcctgcctcagctttctgagtaactgggattacaggcgtgtgccaccacgcctggctaatttttgtatttttagtagagatgcggtttcaccatgttggtcaggctggtctcaaactcctgaccttgtgatccacctgccttggcctcccaaagtgatgggattacaggtgtgagccaccgcgcctggcctttagcccgattttatctgagaagctatttatggtcaagtcagtaagagtccccacaggagccaataactgctgtttccaaatccctgccacaggatgtcttgtcagaacttgctctggtgggtgataacatatactttttcttgggtttactcagcgatttcttgggcctggtttccgaggtggagccagtgcttgaacccctgctaggccttttgaagtaccctcagcctaggcagatgtcagccattcagggcccttagtaaataaggctttctgggtgactagggtttcttgatggcagagacggaaatgcttcaacaccttattttaaacattgcataatacacttctggaatatattagtctcatttccctgcttgcttgcttcctttcctttctttctttccttccttcttttttttttttctttttctttttgagactgggtcttgctctgttgcccaggctggagtacagtgacccaaacacaactcaccgcagccttgacctcccaggctcaagcaatcctcccaactcagccccccaagtatgtagggctacaggcatgcaccaccgcacttagctaatttttgtatgttttgtagagaaggggttttgccatgtttcccaggctggtcttgaactcctgggctcaagtgatcttcttgccttggcctcccaaagtactgggattacatgcatgagccatcacgcttagctccttttccttttttaagacagggtctcactctgtcgcccaggttggattgcagtggcatgatcatgacccactgcagcctcaacctcctgggctcaagtgatccttctacctcacctttcccaagtagctgggagtacaggcatgtgttaccatgtctggctaattttttattttttagtggagacagggtctcactatgttgcccaggctscctgctttcttaagtggcatacactgaacatagcagagtctctcctgcattaacggctgttagacttggaatgagatggaacagaaccactgtccctgagggcccaggtctgcctcccatagttttgtccctggccttctgtcaggccacccattcactcttcctgctgtggtcaggatgcctgctatagcaccagggtccccttcccaacctgtagctgctcttgggctttgagctcagtgatcagacacactgcagcttgttaggaggatctgcatccagaatgaacaggtgcaaggacatgatatgactgtctctaagtcatctgcgcctgctcagggtcaggaccctagtgcccctatgggttgccagaacctttcttgagttcttctgtgtggagccaggcatcaggcagaccatggctcccttccggacagctgtgtgatgcagagatgtatttgcccacttgtaaaatgaaacagaaatcacttactcgtaggttgtaaggattcaacagcgcagtcctagccagagtggatgctcaatagatatttgcctgattggatgagtgacagctcttttttttttttgagacagagtctcactctgttgccaggctggagtgcagtggcatgatcttggctcactgcaacctccgcctcctgggttcaagcgattctcctgccttagcctcccaagtaactgggattacaggcacccgccaccacgcccgcctaatttttgtctttttagtagagacggggtttcacgatgttggccaggatggtcttgatctcttgacctcgtgatccgcccacctcggtctcccaaagtgctgagattacaggcatgagccactgtgcccagccatgacagctctactggcactggctgagtactaggctttgggggtgtgggggaggaaaagccaagtctcccaccccccaaccccagggatgcaccatatcatagatttccctgtttctgagttattaagcacttgcttttattagacacatactaggcagtagagacaaaaggagttgagacttagataaagggaattggagacttgggagggtctggctgagagggagagcaagagtgtagagggctgaggatgcccatgcttccctccacgtcctcttcagccttgtccctctgaaggctttgtcttcactcatgcaagacagaccagttccttatgaccgactcaggtctgtgtggtctccggtttggctttccaggcttatatccacctattgttctctttcttttcttttcttttcttttttttgagacagggcctcactctgttgcctgggctggagtgcagtggctccatcatggctcactgtagccttgaccacctaggctgcaaaccatgcaccacgacgcccagctgattttgtttatttttggtagagacaaggtctcattatgttggccagtctggtctcaaaacttctgggctcaagtcatctttcagcctcggccttccaaagtgctgggattacaggtgtgagccaccgtgcccggccaacttctgttcttttttttttttgagacagagttttattcttgttgcccaggctggagtgcaatggcacaatcttggctcaccgcaacctccgcctcccgtgttcaagtgattctcctgcctcagcctcctgagtactaggattacaggcaagcgccaccatgcctggctaattttgtgtgtgtgtgtgtgtgtgtgtgtgtgtgtgtgtgtgtgtgtgtgtgtatgtgtttactagatacagggtttctccatgttggtcaggctggtctcgagccctcgaccgcaggtgatctgcccatcttggcctcccaaagtgctgggattacaggcgtgagccaccgcgcctggcccaactcctgttctttatgagacattcctgcatagctctgtgggtacctgtagtcccactccctcagaggttgatgactgggagatgctgaccaggagtctgaggcagtgattaaattggagggatgtgttgaaggggaactggagctggcgtaccctcttcccaccagaggggcccctcgctgtggacaatgccatcctcccaccacaagggggtgcgccaggatcactccacttctcaaggagcctggggagggaggtgtggctggaccccgtgagtcatccaggctctctctctgcttttccgtggggcagctgccaccagcactgtcccttgggtctctgctctgggccctacttccctcacttaagtctcagttggccttctcrgatgaggtagggcttgtcgcttagtgtctcctgtctgtgtacctctacccatcctcacctccctgtgccctatcttcctgggttgggaaggagaaggccaggggacatttcctgatgctctttgccttggtgcccagtgcaggctgctccagccttgcccaccacaccgtcctcatttaccctcacctgggtcatgccagcagctcagagttggagctgcaggtacagcacagtgtgctatgaacccatgggtcttgggagctccaagtaggagcttgaggcagcccagggatcagggctacacttctcaggctcctagaaccatgcacctccctaggtagtcaccactcttgtcttgccaccctggcctctccaggagagggaaaatttgtcttcaggacagaggatgaatttttctctctcctcaacctcatttggcactccctctgaggggcatgtaggatgtatgtggcatgtataggtacatatatgcagggtgactccgggagatggccaaaccaggcacctgaacaccatgtaagcactgcaggtccacacggtcaggctggcgatgggttatcagttgattgacaagtctctcctaccctgtaccccagtttggaggcctctccattgggctccttggcgtctgcctcatccaacacctactccctggctgatgttttaaaaaatctatcctgcactagaatgttggtcttcctccttttcagaggcaggaaagtcaaggccccgaagggtgctttagtaggctaggctgctgctttgtggcctgggcacctgctctgtgtgtccaaacctagcaactcccctgaaggaccaaggagtaggcacaaggggcagtgctgggattgcccctgtgtgaatgtgtgtggtcctgaggaccgctgggcagattggtggcaggggaaaggaatatgtggaggagcagccctgactggtgctggacactgctttcctggccagctcttgcctggccctgggcacttgcccagaccttgccccactttggatgctcaggcaatggttttcaggccttgacctcaacagaggctttcgtgcttggctggtggatggggcytttccctctgaggagtcatctgaaactcagcttttactgcctgcccttgtccctgtgctggtggccactcagaggctccacagccccagggtctcccctgcagctgtcatcagttcttctgaggctgttccatgggtatccaggccactggtctcactgggagcccctgagtggccctcaggggctgggttgcagggagtcaatgtggtctgggcctgacgaggctagaacagtgtcatagctggacaggctcctggaggtaccgttatccagctctcttcatctgggaagctgggtccaaggtaaggcccaagggcgtaattatggtctcctgacacctgtcttggcagttcctgaccaatcactctatgttctttgatttttttccccctttatctattcttccatttgttcactcaaggatgcctggactatatctctgtgaactggcccccaactcaggaacgggtagtcatgcaaaaaggaccctgtttctggggcccttgtcttttcctcaggccttgccacatgggatctagcttgaaacttgaagggttgggagctgatgaatacagatgagctgcagtccatgatgtagcacacaaggccctgaggctgccaggtcatgggttcagctctgcctgttttcccatgcccccaaccctttaaccttcaaactagataccatatcacaaggcctgggagagcacagggtcctggaatgtcacccttcggtatctgcccaggctccatgcctcccacctcccccagtggcttcagtcatttggacctagcttccactgtgtggtcaagcaggtgaccacgtccctcccaggggccagcccaggtccacagcactggctcactctggcatgttactgttgcccccgcacctgtcccacaaggcccttgagcagggccgctgaggggagggctgaaaggcagggtgggtggggtcctgggggtgctgtactggaccagcttgtatagttactgcttctgccatcttcttgcctggaccaagcctcttggctctgccagcgaaaggtatgggatggattaactctacctctggcctgggctgctctgtccagtttcttttttcttcttttttctttttctttctttttttttttccccttcttcctccctccctccctctttcttttttctttctttgtttctttcatgaaagagtctcattctgtcacctaggctggaggacagtggcatgaacactgcagtcttgacctcctgggctcaagtgatcctctcaccttagcctttcgagtagttgggaccacaggcacatgctgccacatctggctaatctttgtattttttgtagagacagagtctctctgtgttgctcaggctggtcttgagcttctgggctcaagtgatcctcccacctcagcctctcaaagtgctgggattacaggcatgagccaccacgcccagcctctgtccagtttttatgagccgcagggaatgggactttatgctgacagtgcatgagctcacagccccagatgaggtttgatcccacgagcccaaacacagggcctaggtcaaagcaaaatgagtatttcctacttttctcctttgggctggctctaggcaccgtggaactggcaggatgctcctgccaggatccagcctgacctgcttattctcactgagaacagccacctctagggagccctagaaatcccctccacctccaactgagtgagccccaactttccttcgtgtccttctgaagatggctgtgcgtgtggaacaggagcccagcatcaagagctgacaggattgctcaggtggtgcaggccagcagacccagaagctagacatgggcatgggccaggttttttttttttttttgagacagagtctccctctgtctcacaggctggagtgcagtggcatgatcttggctcactgcagtctcaacctcccagactcaagccatcctcccaccttagcctcccaggtagctgagactacaggcatgtaccactgcgctgggctcattttgttttattttttgtggagactaggtctcactatgttgcccaggctggtctcaaactccctggggtcaagtgattccctcaccttggtctcccaaaacgctgggattataggtgtgagccactgtgcccagcctcggccagcttttgagcacagcacattgccataactggccttccttgggctacctggcatctggccaggccagaccactttacctcttactcatgcccaggcaaactcacatctttgggaaaatgaaaagaagctcttcttcacagttccagatccaccccaacctgccggttctataaccgtggtggcaaacctggagaagaaatagcttgcttcggtcaaagtgcagggcatcaacagaggagggtgtggcccccacctcccagggtgaggctgggttgtctgattctcaggctgggctgtggccagggaacataggaaagctgccctgcaagccctgtgtctcctgggacatgccagtcccatggagccttcaggcctgggtggggacggcctggtgacgggctgtccaggcggatctccactcagtcagaggagagcttcttggaacttgccctgggtgcagcagtaaccagttctgcccctccctttggcacatgggactgtcgcctgcctggcaccctcctgactgtcaaacgagttgacttcctcctaggatgtgagaaatgctttcatcctcccagcctcagggacaaggtgttcctgagagtatgagggtaattaaatgtgtctctgccaccacctaccacctgtcccagagcagggagtggggtgatgaacccagggcagacatccttttgcttcctggacttgggaggtgactctcccatttgatccctgtgtctgatgttgctgatggtcggtgccgctggcccctggtgtcagctggaccatctctgcagattggccccattcccctactgtgagtgcctcacctcactgaaaaacctctagcatgaaacaaaatgtaggtccagggaccgaggaaggagaacttactgtcttttccctgcaggagctctgccttagccacctgaaacctagtaacttgcatgtgaccgtgccagcaggagactccaggttcttcccaagactactggcctgccagcccagaggtttcccatgaagcaagagctgtccttggctatactacctcctacctgctcctgagaccctcagggcaactcagggtgtggtgggtggtgcagagttctgtccttgcctctctctatccaggttgctggggctgctcagagctctctatgatcttgctgataggtgagatgtaggtttggggacagaagccccggctcttgagccagccctgtttctctttccccaggagatagcagagtgttagcatgctcatgctgcacaaggtcccctgcaggctttatgacagggaggacagcatgctagaggcctgggaaagggttgggacagaccatggagaggaggaacaggtaccttctgtacaggacttagtaggacagcctaagcaacagcctggagtcaaggctacacactgctgggctcatggtgtctgccaggagaaatggactgtggtatgctgtgctcagctctctgtaaaccgctgcctttgctcagtgtctgtgcagtgccctgggaggctggcactgcagaacctgttacctggtgactggccaggggcctggttccagagagattccacaagtgttttagggccaatttgtagacaggatttgaacccaggtccttgtggctctgaagcccagattctttctcccctgtcccactcagctgcctaaggaataatgtcttgaagccagtgatctggcaaaatggatctgcagagggggctggggctgtgggatggatcagctgatgggtgatgggtgggcctgcactggccagggaaaggtgccatggataccccagttgagggtgatagtgccaaggttccggatggggaatggcagatggcatggggggaggggggaaagctggcatttgataggaagtgttggaacttggggttactcagtcaattggtgttacgtgaggtttgcagagagcctgcgaagggccctggcagaggcctgggggctgaagaggacactcatactgtgctgcaggccccaggtaaacccagggttaatggtttctatgctgtggctcccacactgagagttccagatgtggtgctctgaccctgcagatccagccagccagtgcacacatctgctttggagctgatatgaaaaaaaaggtctcctcccactcctgagcctagggaggaggtcaggcgcagcacattcaccgaggaggggcagggcagctctcgctttgttgggccaccagcctggccatctgtccacattggtccatctgtctgagttttcctactttgagccagtagaagttgtagcattggaggtagagcccaggtccagtcccttcgaagccgacttctcagccaggcccaggggagtggtagaacaggctccaagactctgccacccttgcagagaatggcattgtgggcacaccagagtctagggagcatgttctcacatctggttccattcagtgggcctcaattcctgaaaacccctgagctccccaggagagcctcactgagtgacctctggaaaagcagaagtaaagtctgggaacactctgtcctctcacactgtgctgtggccagctggccagcaagacccctccatgggccggccatgaggccatgggggagcctcaagcgggtctgccccgcccagtatgctggccaggggctgcctccatgcctactgggccctggggcatgtgggaccaaccccctggcacgggccaggaccctcctttctgcctccctatggcccttggggaggaactgcagaggcctgggggctgaaaaagccgtgtgccatctgagcctgggagccctggagaggctgaaagatccccttctgggttggcaggatctgggaaaagtttcaggaagtgggcgggggcagggctgcccagctgccacctctcaaggcctgtctggggttagctgccaagcccatactttgtcacacagagagcagaaagcactgggcaggctgagtgtcccatgccctcctattaatcaagggctagggtgataggggtgccagctggggctcagtgtggccagcctgagtctggtgcagcctggcgacccctgagaggggcagccatgccaggtgggtcttgggctgcagccttcccaggcctcttcaaagacctcagctgcccctgctggagccagggcaatggtccttgacacaggcaacctcagggtggacagggccggcctgtggaggtgggagggcagggactctcactttccaggctgggggtgtgtcttcccaacccagcctctctatgggcctgagaaagcagcactatttcctgcacttcaagggcttctctctccggcagcctgtggacttccctggagcacttgctggagcagagatcacaggaaggtcactctggccagcaagtagcactgttagaccagtcaagggctgaggtaatgctagggctgagggcacggggcctcacaggctgtgggggagaggcagaactccagcttcagggctacatggactgctgggtgaaggtgacagcgaaccattcaatttggaggacttcattctggtgatggtatggagagtggtcttgggagtagggagccaagatgtggggcagaaggcctgggtagtgccaggagatggagctggggggagagtcatctgaacatggggacaagaatgtgggaagcagaggagttgtgggaaggtcctggggtgcagactgaggagcaagcctaggcctgagggaaggctggagataccgggagaccaagttggtctgctgcttctgagttggggttcaggtcagacagcagagagaacttcctgagagcagcagcatcttttgaacatgagaaatcagccttcaaggaagtcttttactgtgagagatcccaagctggccagacattcctgttgttgggccatggatgggaggatttggggtagacagctgggcttgtgggtagaccagagcggtcccccgagtctgtgctagccagaacactgcttgctcatgccttggctgggcacgtctgggcctctcagtggccatcactgaggctgtcaggctgctgagcccaaggcccagagcagaactagcccctggcttcccagagcccctgccgtccttggctgccctcagaggctgggccagggctgggtggccaggtctcccacaaagctctcarcaagttccaggcctctccttctgtgcttagatcctgctcccagtcacgtcccctcccagtcacatcccctcctccgcatccctcagagagagcaggaagctggggaggagggagcatcccaaccagccttgtcctaggcctgaccagtactgtcttagggcttggggctgccagccactgggtctgggagccaggtttctccaacagggccagagctggtttagaagccctgtgtggtctcctcatgggtgagctgagggttcagcaggcctccttctctaagtcgccttcttggctggcaggctgtcccccttccctgggtcacagggagatgtggggtttggccagggaaagtggtctggaacggccctttgacatcgtccctgggggcttttaaaaaataagtttcctggtaaggaagactcctcaggccttgggcaggattctcagtagagtctcccgggtttgctctgatctgacaaatgccagcagaaaccacccagccgcctgcgttccagcagtgcttggagccgtggcttccccagatgcagtgtcagcagaatgcagcagccaaggcacaggggtgtttgcttggaggcccttgctgagcccaggagtggggggcctgcagaagagagccctctgcttggctttgccccctcattcacgtgcacacrttcctggcttctctaggaatggatggtgccacaagggatgccagagggacttgtccctgagtgatgacagtccagtgacagtgctgatggtccatgcctgtcaggtgagcagtgagtgttcaggctgcctccgaggaggggaagaaggcatgccctggcttctcccacccctctgccaccacctgccagctcatctgggactgaaatctgtctggacagctgagtctgtatctgaaaagcctgtcctgggtcaagggctggggaatagagcggtaaaggaggtgcagagtggggaggagaggaggaaactagatctggggacagatagaatcccccaggcctgctccacatcccagcccctctatgccccaactctgggactctggacaggtttcatgttctgtctgatttctgttcctgaggctgagatgggcatggttgagaggtccagcacacaggttgctcctggcatggggatgagtacaccgtacagcccatgtgtttccagttagagtagatctgggttgcccgcttcatgttgggatgaggggactcccccctggccagtcccaggtgttggatagagagtcatggaggcctagggaggggaaaggtgcttggcagtggggaagttgctgagctagggagagaagccatgtggagcaaagtgggaggctggagcagaggaagtttcatgctgcttgagagctcatgaggatcctgagtaggaggtgacagctcactyggggaagcctcccagcagcttgtgccagggcctggaagagcagtgtgtacacagatgcccgggtgaggcccagcccctgatgctttggaggggagggatcaggaggccagaccggggtccagactcccagtcccagggaatagtggagtcactggcaggagtgccaccacccaaaggactgagtttttctctggagctcaccctgtacatctggcccggcctctaggcccaggctatagctgaaaaggaagaagtctcctggcctgagaagggctcttggctggctgcagtggctgtgtgaataagcagacaggtttggtctggcagctgccgcaccagtgcctgggtctgacccagagaactgtattccagtcttggctcccagctgccatccgctctgcagcttcccctagtggagatttcagcacttgctgggcctgggccagaaccccaagtatataaaatcagagcatgaacatgactttgataaattaagaaggcttcattttaataccacagtaagaggaaccagttaatattcttaccatttcacatccacaaaaaccacatcaggggcattaacaatctctcagttttgtacaaataaaccatgtttctcttaaaaagacttgcacacgtggttcacgcctgtaatcgcagcactttgggaggctgaggcaggtggaggctgaggtcaggagttcgagaccagcctggccaacatagtgaaaccccgtctctactaaaaataaaaaaaaattagccaggcatggtggcatgcacctttagtcccagctactcgggaggctgaggcaggagaatcgtttaaacccgggaggcagaggttgcagtgagccgagattgtgccactgcactccagcctgggcaacagagcaagattccatctcagaaaaaaaaaaaaaaaaggcttgcatacttgcccaagctcaaggatattaaaatctagcacatgaaacccatttctagaggtagaaatacaggcaatatattatttcagcaatgaccatcaattacagttaagaacagttaacaaccaaatgggtaatgaaataatgcaaccacccaagtttactgagcaaagcatcttttctcacccatgccttactctaggagtagctggggcttggttagatgtggtgaggatgtgggagaagagatctcagggcaagggttcattgcagacggcctggggtaaggatgtaggagagtgcacatttcccaggcaaaaaggcattggggtccacagagcagaacaggggctggtggcttctgcctgccctgcctgactttctcttctatgcccttttgggtggccatgggagaaaagtagtggtcaattgcagagtaatggtgaaggcagcaggtgtctcctgcaggcctcaggaggttgaagttcactccatgagtgcccaggagccacagaggtcatgagtgtggcctgctaccagccccccagagatgcaggtggaaggcatctattccagagacctgctgtattccaacatgctgtgttccatctctcctttagctcgcctgactccaggttggggctgtcttctcctgatggagtacagcaggaggggcatcacaggggtcccctaagcttgtagagggtttatgtgccccacttcccttcttctctaaacaacccaggctagcatggtctcctgagcctcaaagacatctggggaggccgtggccaggacagcgtgtggaggtggtcccaagtgcagctccgcctttgatcccctgggcagcctccccaggggacagagaggcatgtagtcttccaagccagcctccgccaccatgtgcctgggtatcttctcagccactgtccttggtactgtccccagggagcttctgtgtcctgtatcaggtgggataagtactgctaagaagaataacacaagggacagtgatgggcygctggagaagcctctgaagagggggcgtgtgaggaaagatctgaaggaagagggggagacagctccactttcaggccaggggacggggaagggccctgaggtggggacatggctggggatagtgagcatgggggaatggcaggacctaagtcagagaggttaagcggggatggtgggaccaccacatgagggctctggaagggactctttctgagtaaagtaggagtagcggagagtttaaggccaatgaatggcatggtctgccttgtgttttaaaaagatcactctggctggcacatgcctgtagtcccagccacttgggaggctgaggccagaggatcacttgagactaggagttcaagttcagcctgggaacctagcaagatgccatctctaaaaaaaaaaacaaacaaacaaaaaacaaaaacaaaaacaaaacactctgggagactgttgttaggttctcatcaggatcccactgcctctcccttggcctgcttcccccgggcccttctgctctgcctctccttccttttcccttaccccatctctgaatgctcaagagaaccctcaggattggtctgcctgtctccggccactctgaagggacgctcagtctttcctgccagcctcacctcccccgcatgccactcatttgccctgcaggccacttgtcactcacaccatcctcctggctgtttcctttgtactttcttgcccctgccctttgctgtggcccagccttttgtggccttctcatcttctcagtctgatctttggtgccctctccactccactcccacagcttcaggcatctcttgtatttcatgtgcctcggggtgtgttggcttgcccctctgaccctgaggccctggagtgcagggctcatgacttaccctgctctagattagggccagcctacagcttaacatacagaagggcttcaaaggctgtgggttgtggattggaccttggaatttcccaggctttcttgtcatcttggggaggaactgttcctcttatgctcgaactttggggctccatgtgctggattgtggcccaaagatctggtgcatctccagggccttagctgattgccctgtggtaggccctgagccaacagggagatggagatcagggtagtagcgggacacaactgcaggggagagctggggctgagttggggtggggatggggacttgggacccttggggaggcccagcaaggctagcccttaccccctacccttgggtttcagacttgaaactgcatctgcagagcactgattatggtaacttcctggccaacgaggcatcacctctgacggtgtcagtcatcgatgaccggctcaaggagaagatggtggtggagttccgccacatgaggaaccatgcctatgagccactcgccagcttcctagacttcattacgtgagtgtgctttgtagcgccttcttctcttacctgggcaggatagctacacctgcaggagctgggttcagtgtggcttaggctagctgccttcgtgcctgtgtcagctgtcagagctgatggcagctctgtcaggccaggtgtcccaggaccctaccttcagagtcctccctgactgtgtgcgtggtcattcaacaaccctggacttccaggccaccacctatgaaatgggtcaccagcacgttcactactggctgaagatatgatgggcaggcaagagtgtcccacgcagtagtgctggatgaagcctcttcccccagtcacatagactggggcagggaaacctgggaaggtgggagccctttttcttaccctacagcacccaaacagaacactcaccaggccccactccccatgcgaggggtcaggtgtcgggatggacagagctctgaaaggccaaggtcttaggataggcccattctctatctgctctgaccatggccctgggtctcagggagattggttcggagtagagttgaggggcaggctgaacgtctagctgcctttctcagttctgacgcaagccctcaggaactcaggtgggcaggctcccattcttatgactcttggctgccccagcttcttcattktctgacccttgggcacagctctgccttcatcaagctcctggagaagctgagtggaggaaaggaccttgggatctgcaggctcggggagggcacmtggactgcacggggagggcacytggactgcacagggaggtagggagggtccctttgcagggatgtcccaagagccatgagccaagtcytggtggacaaagaaatagtcccagcytaggtggtggccccacaggggtggtgagcagaggcatgctcagcggctagcgtctaggagagtaccctgcattggcagagtgtgagtgtgcagtatggtgaagcatttccctgagctctctgggtattgtctaacttttaccattccttgattatggtgcccccactcttttccttgggacctggcacacctgccccacttgtccctgcagggacagagttagatgcctgctgcctggcctgattcttatcccctgcagttaggagccacttgcccaggatccacttgctcaagaagtgctgcagccaaagggctccattctcaggcaggagtcagaggctgggacacctgaagggccagggaacatgcccaagctaggaagcaggccctctcctggccacaggcctcctttcctgagagtctccttgctgccctggcctccatcaaggtatgccaacatggacctactggggcaggaggctggtaatggggtgtctcttgtggtgctacattaggggtcacattgcagctccccatctgttgatcattccctggccttggtctctgtgttccttgctgcaaagccagagctgaggacataccaggaagcagtacatttattgctagagcccagcctgagacttgtttgcacaaggctgcttcagcttcctggtgaatgttctggccttgccagctaggctggccagaggaggcctgaccccatgcccatggtcagagggtagatatcacccaccccactgcccactggcccacctgcctgtgcagctagcctttggcctgtcttggtcttagcctgccaggccatgaaactggagagggctctgagcgtgactgaggctgcacaaccacagctggaggttggctgcaagcaccaagggtgcttaaagcagccaagtgctgtcctgtggaaggctgtccgaatctgccacttcccaccccttccattcatgggtgattgtggcttccagtcctaccagccactcactcctcccctcactcagaaggagctcagcagtcacgtgtcagcccatcagggcctgtgtctgcttggtccatgacctcgtcatctccaatgacctgctcctttgctcctctgctctgcacttcagccatccccactgatggctgcccaggcccatgtcaccacctggaactgctccacccctgaaattgctgaatcaggcacctctctacccacagccttcaggccctccagcccactctcagtcccttgtgggacacgggttccagactcagcgggacactaggccttgcttcctcccctgctaccccttctgtcttcatttcccgccctccccaactgaagttccctggtccatcattcgagcacttttctgccaacatccgcagctctcttggccgcccgactcatggtcccacccggctggcagccccccagccctggaggaatcccagcagcctccagcctggagccgctctccccctacctccactgccgggaggaaagctggggaagccagccttgagtggggggtcatccttgctgccaggcttgcatgctcaccctcttagccagcctcaagcttttttctgcctggcagcctctggctctacctactcagcaccctgcagaccccaccagcactgcaaagaccaccttcccgtcttaaacaccattgctctcctgcccccagcctcctcttgggcaggtggcccaccttcttcacaaagacagtggaagccaataatatgcctcccagtgctgcttctgccccccaccgcccgaaccctattccaatggcagaagtgcccttccttttctcttggatccttccaccaatgttctgagtgccctcaccttactccctggatgctgagtggccactcatttgcattcctgtctgtgcaggcaccttcccttccgaattcttctcttcagtatctaagcaagctcaaataattaaaaaacatctcgtgggacctaaacttttacattcactgtctgttctctcatttcccctcatccctcgagctttcaacagtcccgtcactccaccacaaggccctggctaaagccacccctgaccttcacgtagccaaggtctccaggcgtgaccactctgcggtgtccaccccccagcccccctagctatttctttgctcccatgatgcctctctgacttaactcctacctctctggccactctcccttctccgctctgccccagcaggccatccccagtgtgtgtgtggagtgttgcaggaaggggtgaagccttccatagaggcctgagctcccccaggctggggctcacgattggcttccctgaggaggtggctagtttggctgaggggaaaagcatttaagggaagcattggaatagggggtttttaggttgagggaactatacatgtcctgagtagcgagcatggtgcacctggctctgtgccccacacaacagcctccagatatgggtgcccactctgggaatgaggaagctaccctagaaaacgcagaggaatatactcaggagagtacagtcctccaggcagtagaagcatcagcgagaggccctgtcctgggtgtgaagacctgagggaacagtgccctgactgcccacagacaaagttggcccagctagggacagaggttgggaccattacagaggtcaccttagctccatccctcagggcctcatagttgcttttggagctgccccaggctggctggagcaggcttctgccaggaggtgatgaaagcaggagctggctgaggctgcctctgcccttctgtgtgagagacagtgtccactgctttcgtaggtcctggccagccttcagccgcacacataaccagtacctgctctgggccaggcctggggctgggagggaggtgcctggatgcagtgggatggcaccagtgatagtatagacagtgcctggagaggactgtgagcagctttagcaaatggaactgggggtcacaggtggcttcacagcattgggaggactccaggatcaggtggggatagagaagccactggagagagtaggtggctggagaagaggcagctgtctggcatgaggcagctgtctggcatggggccgacagcctgagtgagatagggcccctgaagtagactgtcgtcatgtgctcttgagaggatctggctcagtttcatgccactaacatgttgttatgtcaccatgcccaagcccagtcattaccttgctgtgggacttgggatggtgtctgtcagggttttttggccttggaggggactttgatctgggccattccatgatgttttcccttgagagagttggtcctagaagacatgctgagagacttgtgggaggagtgagtgcggcctctggggagtcccaggtgggctttaaaggcctttgtctttgaatgagtgagcctccctggagggggcctagcccaggtgcccattggcagagcctgggcatgggtaacctgcaccacctgggggatctgagggcccatatttctcttgtgtcaggggcctcagtgccaccagcctggagtgggcaactggtaagaggctttgtcccaggacagtggcctcaaatgcctaatgggcctgtcagcacatctgtgattttctccaggacctgtcaccccaaccttggggccctgcttggtcacagagggacatcaggttcctctggcccccactcccctggccagttcctgtctttgctatctacagtcactgtttctgggtccatggcaggactctgcagttgggggctgtaggcctgctgtggtttcagggtcctgggctagacctggctcctgccttgaaggagtgccagcactttcactcttctcctggggtcaagcatgcaggagctccgtgaggcccagaaggctcagaccaggtggaaggacccaactgggccttggggagaggcaggacttttatgagcaggttaaagctcactatctctgttggagccacacctcactcatatgctttttttttttttttttttgagctggagtctcactctgtcgcacaggccagaatgtagtggcacgttctcggctcactgcaagctccgcatcccaggttcaagtgagtctcctgcctcagcctccagagcagctgggattacaggtgtgcgccaccacacccgactaatttttgtatttttaatagagacaggatttcaccatgttggccagggtggtctcaaactcctggcctcaagtgatccgccctcctcggcctcccaaagtgctgggataacaggcatgagccacagcacccaccctcatcttctatttattttattttttgagataggatcttgctctgttgcccaggctggagtgcagtggcatgatcatagctcacctgcagccttgatctcctgggctcaagtgatcctcctgcctcagcctcccaagtgtctggtattacaagtgcatgccaccacacctggctaatttttttgattttttaatagaaatgaggtcttgctatgttgcccaggctggcctcaaactcctgagctaagagagcctcccacctctgcctcccaaagtgctgggattactggtgtgagccaccatgcctggccctcactcatcttgatatggaggagaaactaagtctcgagaggtggtgtgctgaggccatggacagagctcagaaacagtgatatttctgttcactttccactctgcacagggctcttcaggacccagaagtgattgaatacagatactgtcattagcagctcactggagcacctgctggggactgcagtggacaggctggcagggttacccaggcatcatggctgcctcaccagcaccagaccagccacccggggttgagaagccatattgttccagcaggtggcaccaaagggcgcagcagaggggcagagttggctagggactctgaaggcttcttggaggaagtggcttcctaaactccaacccaagatgtctgtgggcccaagctgagttttgaaggcacagggcaagggagggcctctgggcagaggaatacagacggccccacccccmccccacaagggcctctttggcctggcgggcagccggccctccactccccagctgtcttcccctggagggagatgctgaccagctggaaccttattccctcctattgaggccaaatgaggggaggaatggtggagtggctttctgggggcagggaggcagctgctgaagccaggcaaggaggaagaggaggatttccctgcctgccgaaggcctcggccttgggagaaaggcagactgctgggccagccttatctctgccaggcctgtccagcctctcatctcctgaaaaagaggattctgcccctcactgggcaggagagaaaagcagggctgcagcagcaacaagcttatagccagcccggcaagggaagtgctgggcctggcacaggatcgcccacgattggcctggcttgggtttgaagagggccttgaaggggctggggtagtgcgattgtgagtggcccttactaggctcagcatttcccccacataaacagatgccctgagtggggggcgcaaggagggggacgttgaaaaagaggagattggctggtggggatccctctgagaaaatgagactaggtggggtatgtagagccaggcagggggccctggtcatgggtggaggtgtgtggacattggccatggggacgtggagctcctctgctttgtggtgtgttagggcctggtgctggccctctctgggccttatctgctctgacagtggggctggtaatgctagtggttgtgggatcacttggataaggtgggccttgggtgtgctttttctccctcttcccgtccgaaagggagggagagcataagaaagcatccttctgcttgggggcaggggatttgtgactgtctcagggagcaccaaggctacattggggctggatggggtgcagttagagtattgcggggtggcgcatatgcagcatgggttctggggtatgtgagatgttggaggcctcataggcaggaggcgtgtgtgctgtccggggtagaaaatatgcaggctggagctgcagaccatggcccaaagctctggcgagctctgaggtccctcactctgccagcactgtggggttgggggcaggaggctgcccatttgggcctcttggcttgcagctgcaagtgggccctgcttaaggctctcagttatggttgggagttaggggactgtctcttctcagtgcacatcctgtagctgacccagccagattgggggtggagagagggcagttgcctggctccaggcccaggagagcaaaggtcttcgcagggcgccaggctgggtgggagctgggggagtgcagagcaagcagggggagtgggggtcaggccaggacaggagctggggccttttcctcctgccgcctttctagagggccctgtgggagctcccccagtggccagtgctttgagccgtggcctgggccctgggctgccacctcccctcctttctttcttcagtatgggggaagacacctcctaccaaggtcttctctggacagcctgagcactagttgcacaaggtcctgtcacagggcaggggcctagctctggcccactcagaagctaggacaagacccgtgttcagtgcccagctcagaacagcagcctccaccccaacttttatcccataggtgcctcaccttgaccttggaggaatttcccctaggcctcatttagctccctcataccctgagttcatctttggtgacagactggaggatagttgtggctactgcagcctaactgtggaatggggcttactgccttcactgcatccccacacaggtgactacacagaactctctgccccagcccctttgtagctggttggaggcagagccttgtcccttgccaagtctgaactgggcagtctcacccctccccagctccacagccccctctgctgcccatgtaccccacagagctggccttctgcagggcagagtgatgggagcctcggcctgggatcgacctgacccagcctcctgttcaggtctctgggtcttatccaggccgtcctgggtgaatgcccagccctggcctcaggccctaaaagaagaggacagttctctatctctggcataggctgtgcaggtctgcctgacctgggccttcattccagagaacccccactggctccttgctggccttccctggagaagcttctctccactccactcctcagcctttcctcctgtcgctatctctgcctcttcctcttctgtccccactgggggacagagtgaccctaactggatggcgattcccctgcttacaccctgctcatagatccctagtgctcaaaacaaagccagggccctccaggcccagcctctgccccccgcctgctgcagccccgtgctgccggctgctgcgcctttctctccctctgccagtcctgaccatgccagttcctccaatgcatccgtcactcagtgagtgcctccaggcctttgcacatgctgttccctcttcccagaacacactttcttctcccagccctttaatttcccaggctctcacgctcttcaccccctgggctgggctgcatgtctcacctcctgtgccccattcctgtgtcctgttagaacactgttcatgctgtggggtagttagctcgtgtcccagtccctcacagggcatgaatcccctgcccccgcccgtttggggggcctgtgtctgtcctaggcctctggcagtgggggtggtcagaagcttgagaggaacatggggagggagaggagacactggtgcttatccgcagcacccatgagtcagcatacattgttaaggggtgatggcctgtgcaggcgggcgagggcatggtgctatgccaggacttcccggcccccaccttgatgggctccttgctattgcctgccccctgtagttacagttacatgatcgacaacgtgatcctgctcatcacaggcacgctgcaccagcgctccatcgctgagctcgtgcccaagtgccacccactaggcagcttcgagcagatggaggccgtgaacattgctcagacacctgctgagctctacaatgccattctggtggacacgcctcttggtgagccgctgtggtggtcatgggaggtgggcagtggtgtcagcatcagcgcatcagggtggggtttgtggacccgctggggggcgaccctgagccagaaagtgagacctgcccactgctgcttacctttgtctcccttcaacttcctcctccgattctctcctcacttcacccctcttytgctcctgtcctgttgcttttgctgggccaggcaggctacccagggcctgactgggactgtctcactttgtgaagcagtctgatctcccagagtgcagaggagggctgagctcatggagaagagtgagagaggcccaagtcccttggagtcccgagagctctgacagactgtggcccggagctggagcctgagtaaagccagagtggctgcctgtgaggcaaggagcgaagcaaacactgccacttccctccaccgagcaggtcccctgggccaggtcagacagcatccagcaggatgcaaggtccgtatcagaagccagggaaggggaatcaagagcttcctgcagagccctgcttaggcagtgctagttcctgcctgcttaggaggccgaggagaaggcattaagtgtccttgtagccagagtcctgggcctggggtaccacctctaagaagccaccagggttgaactacagggctctaagctgcactgggttctgagctaagaggcctgagccctacctgctgaccttgtctgccgtaggctctcccagcaactctgagctggttctgggctgtttgtggcttcttcagtttctccatctttaatgaagagatagaccagtgagtctgcaggccctcttgggggatgggggtgctctatcctgctctggcctctctttccaaccccacagtggccccctgggtcgctggtctgtgcctaccctgctgttggacttgtcctaaggaggaggctggttttccaaatgtggacgccaggccttcctgggaggtgtagagaagtaggcgttaggccccgaatccacagctgcccctccagaagggaggatgtcatggcctcttatgcaagcctgtctttggcatggtctgagcttgggtctgccccagcggtgattagatcatgttatggctagctgcctcctttataaatcaattttaggagcaaggaggcaggagaagctcaggtcagtgtacatggcccagagcattgcttctgccacttccaaggcaacagcctaggctggggacccctcaatacccagccctgtgggccttgtggcacgggcactctgtgccgtgtagggcatttgaacatcaggattctggcctaggccasctgcccacccctcaaaccatgtttcctccccagcggcttttttccaggactgcatttcagagcaggaccttgacgagatgaacatcgagatcatccgcaacaccctctacaaggtaatgccccacacaagccatgggggattggcctgtcggtgggtggggctgtgggaagtggtagggtggtgatttatgtgaggtgctgggacaggatgcagctatgtcaggctcctatcccagggacttactgcttattctctggctcccatgctgggcacaaggctgtgtggaacaggttctccatcccatagtgcctgtgacgggctcarataaaatcagcaggagtggctggtgctccaccgctggcctgttacagctggctcctggacagccgctcccccagcatccaggagggtcatggactaccacccaggccgtggcccctggaaccgccctacctaagctattgccagcaaggacaggcacttgagcaaaggcaacagtgtgctcacttatggtggggggagggatctggcgaggcatagctaggtcctcatgtccctcgtaggttcccaagcttggagtcagtgccacttcccactgtcctcatcccctgcccacctcttgcctcccaccaggctgtagcatagactgggcaacccctgaggatttctgggtcagcactaccctggcccaaagagattaaagagccaggggaccggagaggagaggaaagtttaaaaattwaaaaaaaaaaaaaaaaagcccgagaccagttaggttaggggtgtctgggatagactctgctctggctgcggtgaggcactgagctatagcgccaggaccccagatgggctgcagtcaggaacatggatccgcagtgggcaggccccaaagcagggctgaggatggccctggccgagggacctgctgacctcacctgtctattgggtgagagtcctctcctgccctggttggagcgagctggctgacatttggctgcagcctgagcccaggcctgccaatctccctgcaggggcctgggccagagcacagtgagggttggtggtaggggaagggcctgcctggaggttgcagtggtgtcggcaagggaccagcacgtgcagaaggaaagcatagagcatgggccaagtggcaggcagtttgctgtggaaggacacattccagatggacaggggagaagtctagaagaaaaggcaggcatgggatcaagttacccagggctttgaatgtaaggccagaagtttgaacatagtcccgtgggcagggtcagccagtagaggtttccaacagagcagagtcttctcagaaagccccttctagccacaatgtggagagcagattagagggcctgaaaccagaggtgggaaggtcgtcagcttctttaatccttcagactgcgctaggaactaggaaggtgtcattatccccatgtgaaaatggggaaaccgaaggctcagagaagtagggtgggttgcctaaagccacataataagtcactggcagcgccagggatcacacctggctcagcttgtttgcaaaagtgagtgctctcacccactccgctaatagggcacaggccagccagttagctgagaggagagagagcatacacacgtgtgtgtttgtgtgtgtgtgtgtacgcacgcgcctagctggcctgttgccgggttgcctgccctgagacagggtgaggggtgcggctgtccgccagcctcacccatgccctcaccgggcctgactggttctagctggagtcgccggcgagggctgcccaggcactagctcataaacacagacccaatgctgtgggccttgtgccaggactgccagcctgtcaggcgatgtcccagcccggtgaccacagatgggagattaggcggaccctcaaccacccagcaggtgggaacagtaggcagctggtgcagcagccgtggattggcagactccaggggacagggcgggggtgggaaggtgactttggtaccggggttgctgggatcttgccagtttctttagctgccctagcctccagaggagagtcccaccagcctccctgaccctgggatcagcctctcctgggattggtacagattggctaagcaattgggtgggtagcagggcatggagcccaatacctggttggttggttcccccacaaataggaagtgcagggccccactggggcaggctgtgggatttttgacatatccagcttggctggccacagggaaggaggtggctggggacagacccctagagggactgtgaaaggtaccaccaagccatgggaggggttggcagctgtctctgccacccaggccctctcattcctgggatcctctgtgctggggtcaaccctcttttccaggcttcttacttcctgacctgtcctagatttttgtttcccgtgatcccagaggtcactctcaggccttcccctgagttgggcttgcccagcattgctggccagggcaggcctgggctcacagactcctgggtctcatctcatctctcttggagcaccacccagcagagcttgtgagcccaagttggctgatggttggtggaaaggtctccacaccttggagttcagacctcggtatgaaaagctttccatgccatccaacccttgcctacaatctagaagaatagtctctagcctgtggagccagggtctctgagcccatgccagcagatgggaccagggaggtctgagtggagggtggccattacaagggagctccccatggggcccgtaagatcatccaccttccttggcatggagaggtgttgggaggaagcatggctgcttttgtgagtgagcgttgggagggacctggggcctgggctgacctcttctttcctcatgcccagcagatccaatttgcctgggcagggagtgcttgttcccgccggcagcccatgtgcctgccattgtactgtgcccagctgacgtccgtgtaggcaataaccatccctcagcaggaactggcctgacaattttgttcctgctctgtgatgctgaggggctgcctggaggatgggaggaggaggtgttctgtaagggaaggtggcagagagggccgggggcactcagtccctgccatccctgtggactttcaggcgtggcctttcctcaccagcctacggacacctgtttttttattcttttctgagacggagtctctttctatcgcccaggctggagtgcagtggcatgatctcagttcactgcaacctccgcctcccgggttcaagcaattctctgcctcagtctcccgagtagctgggattacaggcacccaccaccatgcctggctaaattttttgtatttttagtagagacggggtttcaccatcttgaccaggctggtcttgaactgacctcgtgatccacctgccttggcctcccaaagtgctgggattacaggcgtgagccactgcgtccagccacacctggttttcagaggctgaggaaggggaggtttggaaagatttggggaaaaggaaggcagagcagcaggggaaagtcagaggacccctgcgagcccagccttctgtgaggtgagggggtgaaggagactgtagcctgaagcagacagtcgggtgggccctgccctggcactcctgggtgggaggctgtgggcagctgccacttggctgattcacagaagtgtttcattggctttgctgtaagggctgccccggcccatccatgggtgtgcttgtacccaccttgaaaggggctagggaggggaggagggagctgtgagggcttgtgcctagcaagccctccagagcttccttgcctgtgctgagcaagctccatactctctacaggcctacctggagtccttctacaagttctgcaccctactgggcgggactacggctgatgccatgtgccccatcctggaggtgagtgcctgcccgccctcctgcctgctggtgcccgctagccctggcctggggaggctctgccaactgactggctactgcctccttcttcctccctctcttcttacctgtgcactggctccacagtttgaagcagaccgccgcrccttcatcatcaccatcaattctttcggcacagagctgtccaaagaggaccgtgccaagctctttccacactgtgggcggctctaccctgagggcctggcgcagctggctcgggctgacgactatgaacaggtcaagaacgtggccgattactacccggtgagtgccccggctggcaggacagcggttggatgtgttgtcaccaagcacccycacccagaaccctcatgcttgtgcttccccccacccccctggccaggagtacaagctgctcttcgagggtgcaggtagcaaccctggagacaagacgctggaggaccgattctttgagcacgaggtgagtctgcagggtctgcttgtcagagggaggccaacctggtggtttagacctgactctgtggccatggccacctggacaccacatctgcccgtgtccacaggtaaagctgaacaagttggccttcctgaaccagttccactttggtgtcttctatgccttcgtgaagctcaaggagcaggagtgtcgcaacatcgtgtggatcgctgaatgtatcgcccagcgccaccgcgcmaaaatcgacaactacatccctatcttctagcgtcctggcccaaggctctcaattgcactctttgtgtgtgtgtgtgtgtgtgtgcgcgtgtgtgtgcgtgtgtgtgtatgtggtctgtgacaagcctgtggctcacctgcctgtccggggtgtagtacgctgtcctagcggctgcccagttctcctgaccctcttagagactgttcttaggcctgaaaaggggctgggcacccccccccaccaaggatggacgaagaccccctccagagcaaggaggccccctcagccctgtggttacagccgctgatgtatctaagaagcatgtcactttcatgttcctccctaactccctgacctgagaaccctggggcctgggggcagtttgagcctcctctcccttctgtgggtcgctcccagagccatggcccatgggaaggacaragtgtgtgtgtccttggggcctggggggatgtygctcctcagctccctccctcagccctgcccctctgagacaataaaactgccctctctaagsccaactgtctgctgtctcgtttaggccctggtacctctccatgacccctaacttccctcgtgaccccaccttgctaagcaaccctgcctaagcctccacctccctccctcagtcagcagccgagattcttcagggttggggagtcccagggagatagccccttcttctgctggaggctcagatgcatacaggcctggggagctagatgttggccctggaggcccccctggcctccccagttgcttcaagcaattgggatcagtgtcattacccccatttcactatgaggaaacccatggtctgaaatgatttgccccaggtcagtggaggagggggaggtgtgaaccagagtctaccaggggaatcccagcctccacgctgagccccaggagttgccaccctgtcacacggccacactgtgtcactcagccagccagtcagtgaccccctccaaacagcacctgccgcattttagaagaaataaaaatttgtctttatttaaaatgtggcaattgggaagtacagtacatgcttccctgtggcttgggggtgtgtagttggggccctaattcttgagccagtcaagagacacttgggatttagccctcaattgcagcactgaggcactggtgccgagaaacaatcctgagggggtccccaacccacctagtcactccttagtttgcagaggcactatctgcagagtcctgtgaaaggctgcagtgaagtcttgcatgagactccccatccagcggagttctccaagctgcagggtagagcgttgtgccaggagggtgtttgggctcatgaaacagtggagaggcgcagaggctcactgggaaaccttggcctcaccgggcctggattgggcatcggcagtgggcatgaagtgggggtgggattctttaggccagggtccaggacacttgggggatcgtaatgctgggggttttcggggaggaaccaagggctcacggagcctcctgtgctgcagtggctgggccataggtgcacatggctcaccgagccactgctggggaagggccggggctcaggtttgggtcctgggctgcgtcctgtggtggggtagtgccaggctggccaggctgcagtgctcraggcagacagtgactgatgaagaaggcctgcaggaagcggcgccgcaggccttcaggcaggtagtagtggatgaagtacatgagccccaggccctggccggggtaatagcrgcggcggggccgagctgccagcagcrcatctgtgatggcatctacaactggggtgaggtcggacatggccaggcgtagcgagtgcaggaactgcccatgcaagtgctcgatgtagtccttgccgtaggcctgcagcagctcttgaggcaggttggccagcagcaattgcttgcgcttttcccactgacccacgtttctcactgactctggggaaggagtggcaaggtcagagtgggatcagctaggggagccaaagccaattaggactgtttaacccgcgccaggtctgcagccaaaactacacccccaaccaaaaccatgaccattcatcaaacctgacctgcccccataagaccattcccagccccattccccacccccaccccacccccagccctgattcccacctgtcttgaagcagccaggctggatgatgctgaccttgaccccccagggaaggmgttcacagctgaatgtgtycatgagtagcgccacggccrctttggaggttccataggcccccaagcacrgatatggcatgtcccctgcggatggattgggagtggggcagctcagctttggcaaggggctccctaagccctcccccaccccagggggctcctttttgctccagtgggggggggcactcacccgctgggctccccacagtcacgatgcggccccttgagctgyrcagcaggggcaggaggcccttggtcagctcgagygcgccaaagaaattcacctccatgcagctacrgaaagtggccactggaracmgytccgcatcagcaactacttcattgtggcctgcgttgttgacgaggccccacaggcctggggtcacagagcagaggagggaagccttaggtcagcccagcagcaaacttccagtccccgtgtccttcccactcccctgccacgcccttgcctggtggacacttgccactgaccggtgctggtkgtgtgggccttggtgaactctagmamgcggctaatgtctcctggtttggtcaggtccatctgcagcagccttaggcgaggggagcagcaggtacgcagctcgatggcaccggggctgttcaactccaatacggtggccagcaccgtgaagcccatggagtccagtttcttggccgtctccttgccaaaaccagagtcacagcctggccaggccagggcagtcagtgaacttccactgtggcccagcctagcctgagacaaccccagaatcaccagggtctggatgggatccaggcccctgcaaaccaagccaccagcagtcaacaaccctaactccttccctaggcccatccctggcaggctgtgtccctctagctgagccctgggcagtaactctgtgacagctgtcatctgcctgactccccgtggctaccccactaatgtggcttacagaagaggaaactaaggcctagtaatgctaagttgcttcccaaattcacacaggtcaggtctgggacagtcccaggccccagtgtggttctgctttcttgatttcaggccacagctcacaggcacaggcacagtattagtaggagcctccctttctcttttttttttttttttttttgagacagggtctcgctctgttgcccaggctggagtgcagtggcatgatcttggctcactgcaacctcccctcctgggcccaagcattccttcctcctcggtctcctgagtagctgggactacaggcctgtgtcaccacgcctggctggttttttctttttttttttttttgtttgagacggagtctcactctgttgcccaggctggagtgcagtggcgtgatctcagctcagtgcaacctctgcctcccgggttcaagcgattctcctgcctcagcctcctgagtagctgagactacaggtgcgcatcaccacaggcctggctaagttttgtatttttagtagagacggggtttcaccatgttggtcaggctggtctctaactcttgacctcgtgatctgcctgcctcggcctcccaaagttctgggattacaggcgtgagccactgcgcccagtctacctggctggtttttaaatttttttggagagatgggagtctcactatgttgcccaagctggttttgaactcctgggctcaagtgatcctcccaccttggcctctcaaagtgctgggattgaagatacaagccaccacatccggcttctcttcctttctgactgcccaggcctctccttccttaatctggactctgaagcagccccttctgtagtcctgtcccttcctgccctcttgaagcccttctctacctaagcagccaaagggatctttccaaaaatgacaatatccctctgtgctacaaaccttcccagggctgccacagtactcagaatgaagcccaagctccctggctcaggccctgtacaacatgagccccacctcccttcccagcctcaacaccctctactattttttcaggctggaggcaagctggaggcccatccccacttcacccagacccttggaattccaatcagtggcaacaggggtgttttctgagccccagacgacttgcctccaggacagggaccatgatagatgaagaagagaacagacctacatttgaatcctttcccacacccaccaagtgtgaccgaggtcagttaccactcttggaggcttaatttctgtctttggtatgcgaagagaagaaccaccaggcagagccagtgtaggggtccatagtactgataagcccctgcctccttgattgttcccatgctgatcctggctycatgggcagccagtgagggaaggggaaaggccagtgagcagggaggctttctgttctgctcctgctcccacccctggccctcaaccccgccccccaacccccatcttctggaacagaagctgcaaagcagctctgtttccctactcctggaccgctcagtacggtctccccatctcagctccactccctctactgaaaacagcactgggcaggggtcttcgagctcctgctgaggaggggtacttcccaggcaagtctgccttggagagggaggcaagcatatgtgtgtgtgtgtgtgtgtgtgtgtgtgtgtgtgtgtgtgtagacacacacatgcatatgtgcacttgtccgggtccccctcagagcagacaggtcctcccaagggaaacagacctcccagttctgacctgagctgaccacaggcctcagctctgtggtcccaacagtcacccacatcttgcacaccctcttgctcacgtgcacaccctcagatacctgtacacacttccaacctggctggatgttctcacaacgggctcaatccctaccacccattggcacacacatgtgcacatgtgtgcacacaggcacctgatcctcagcccaaaccctgatcccacagctgagctccaggagtagccttggcaagtgattctctgggcattcttaggagggagagggggagtagcagctctgccaggcccaaaacacagtgttcttggcaggtggggctgaacctggttacctacttgtcttccagccgggtgttgagagacaacccccaagtgttcgggccctgggaaacttggagtcttactgatgcttgtacagggcaggttgggtggtcctctctcccccaaccccagctttgcaaccagagattggaggagcccaagttagagaaagcatccttcctctcacctctctctcaggctcaaggccagaagcaacagcagcagcacaaaggcctgaggtgagacctcaggaaagactacccagctaggccactagtacctgcagatggcctgggtcctgttgaggtggctcacaaataaagcaggaagggatctgccctgtccccagaggcagagcccacaacctggcccctacttcatacccggggtgtctgttgattttccttcctcaaacctctgaaactggggtctgctgaggcttcacactgcgcctggaacctgggtctctcctgtccagcccgaatgcttccccatctctaccatctttgctggagtgcaaggcccttgtgcctccttcccccctactctgcctcagcagtctggcttcttacctgattcatggcccctcccaaggaaaccacctcatatccccttctccccacccccacacccaccagactggctgtcccctacagagaccgtgtgtactcctgccttaagcctttgtcccacatcctttctctgatccgagatccctttcatactccacttatctccactcatgctccaaggccccactcaaggatttcctcctccggaaaattctcccagccccatctgatcacacagggcccctactagaccgaggtctctgagaagccaggttgctggctgccccagcaaaggcccagcgcaaggacaaagcctggagcacctgtccaaagccgtgggtattggcgagagaccaggctgctcctcccacgatgcaatggagtcagtgccccctggcctttctccccctccccacttccggcgggcctccagccccccccccccttccccttccctccctctggtgacagatttattccctgctccagacaaaggagctcagctaggcggccagaggcacctgagcccagctctctaagagctccttcctgggcacagaggaccaggagggcttgggggtggggtgctgggtgtaggctccaaactactgcctcagcagtttggcagtgggtggctagacagaaagacagctgaatgtccagctgcccctcacggtgacct

SEQ ID NO: 93820 - DNA, 33194 bp, Homo sapiens
cctgatactagcgtagccactccaactttcttgtggttactgtttccgtgatatacttttccccagtctcttcttttccatttatttgtatctttgactctaaagtctgtctcctatagacagcatataggggacttttttataaatccaatctgggctgagtgtggtggctcacacctgtaatcccagcactttgggaggccaaggctggtggatcacttaaggtcaggagttcaagaccagcctagccaatatggtgaaaccccatccctactaaaaatacaaaaaaaaaaaaaaattagctgggcgtggtagtacatgcctgtaatcccagctactcgggaggctgaggcaggagaatcacttgaacccaggatgcgaaggttgtggtgaaccaagatcgtgccgctgcacttccagcctgcgtgacagaccaagactttgtctccaaaaaatgaataaataaaattttttaaaaaatcgaatccaacagtctctaccttttgactggattgtttaatccactcacatttaatgttattcctgacatagttggatttactgctggcattttacttcttgttttccatgtgtctcgtgtcttttttgtcttctatttatcctttaccgctttctttgttttaagtaaatattttctagtgacgtatttaaatttctttaataattaatatcactgtatatttttagttttgttgttgtcgttgtttttagtggttgttttagggcttaccatatacattttacctaaagagaatcagcttcagaggtgttttgttttgttttgttttgttttgttttgttttgagacagggtctcactctgttgcccaggctggagtgcagtggcatgatctcggctcactgccacctccatctcttgggctcaggtgatcctcccacctcagccttccaagtagctgggactacagtgtgcaccaccaaccccagctaattgttttttctatttttagtacagacaaggtttcaccatgctgccaaggctggtcttgaactcctgggctcaagcaatccacccaccttggcctcccaaagtgttggggttataggtgtgagccacagtgcctggccctatctctactagcttcattccagtgagatatagaaacattattcctatatatccctattcacttttcacccttttgtggtattattgttatatgttttacatctattaatgttacaaacccgaaaatacattgtatgattgttattttactgttttcattttgttagcccaatgcagcttacttccacccacctcctttgtgttgtcactggcaaatatattaaatttctacaggttacaggcccaataatacactttatgcacactcttttataaattgccttggtcaatttttgctttaaatcttttataaattgctgctttaagttaatgtttttaaaaaaggaaaaaattattctatgttttataattacaactttcctccttaagcaataaaagagccacagatatggggaattacacagacatcacaatctccaccacgctgtggtgtgccccgtgcagtcccgcccactcaacagcaatttgtttaatcctcacaacaaccctcacaattagtcgttgttagctctgttttacagatgggacaaatgaagctcagaaagggcttctgggacacatggatggtaagagactaagtgagcttggggcctacatcttgtttttttttgttttttgtttttttagatggagtctggttctgtcatccaggctgaagtgtagtggtgtgatcccaacctgcatcctccacccccccggttcaaatgattctcctgcctcagcctcccaagttgctgggattacaggcatgtgctaccacaccgagttaatttctgtatttttagtagagatgaggtttcaccatgttaggcaggctgatcttgaactgctgacctcaggtgatccaccaccttggcctcccaaagtgctgggattacaggcgtgagccaccaagcccaggctgttggggcctacatcagtcagactcagagatcaatgctctttccacagcacgacatccttccctttactcaaccaagatacataggaatgttcttaagaaaattctactaagagactcaggcaaataacacccaggctttctgagaaaagactgattcttggaaaagatgatgctgtaccaggactacctgaatgaaaactctgctaagagactcaggcaattaacaaccaggctttctgagaaaaggctgattctcagaaaagatgatactgtaccaggactacgtggttgacgtggctgcccactcaacatcccctgtgccccatgtgagcatcagatggggcacacatgtatcctgggcacctcatcatggtatctggcctggcacgagtgcttcccatatgggctgagtgaaaggttgttgcccccccagggacaggtggcaggagtagagccagtggttggcagaactcgtccttgaggcccacacagatgtggccaaggagctgcatagctgagtgggggaatctatgtgtggctggcccctaggcctagcaggtggattcacaatcttgtctgttttccccactgcccccttcccctgtcctctgcctgacagcttgtcctgtgcattctgaactttgtcagatgctgggcagcaaaacaagcagcttcctcacctcccaaagcctaatatccatactcctattgttgtggccacagcctataagagaatctggcagaatgaggctgtgaggataggcaggcagtcaacagagagagatgtggtccaggccaggtggagctgctggtagtccctgctttcctggtcctgcccaccctgtcctcccatccctatacctttaaacctcacactgactgaaccctcaactaatgttcatttttttaaatatggaaaataccactttgagaggctgagtcaggtggatcacctgaagtcaggagtttgagactatcctggccaacgtggtaaacatgctactaaaaattgaaaaattagctggctgtggaggtgagcacctgaattcccagctactcaggaggctgaggcaggagaatttcttgaacccaagaggtggagactgcagtgagccaagatcatgttattgcactccggcctaggcaacatgagtgaaactccatctcaaaaaataaatacataaataaatatggaaaatatgtggccgggcgtggtggctcacgcctgtaatcccagcactttgtgaggctgaggcaggtggatcacttgagatcaggcgttcaagaccagactggccaacacggtgaaaccccgtctttactaaaaatacaaaaattagctgggggtggtggcacaggcatgtagtcccagctacttgggaggctgaagcaggagaatcgcttgaacccaggaggcagaggttgcagtgagccgagatcgggccactgcactccagcctgggcaacagagtgagaccctgtctcaaaaataaataaataggccaggcacagtggctgttgcctgtaatcccaacactttgggaggccgaggcaggcggatcacgaggtcagaagattgagaccatcctggctaacatgatgaaaccctgtctctactaaaaatacaaaaaattatctgggcgtggtggcatgcgcccgtagtcccagctactcaggaggctgaggcaagagaattgcttgaaactgggaggcagagcttgcagtgagctgaggtggcgccactgtactccagcctgggcgacagagtgagactctgtctcaaaaaaataaataaataataaaagtgggtcttgttttttgttttttgtttcggggtattttggttagagacagagtcttactctgtcttgaccgcctgggctcaattgatcctgctgcctcagcctcccaagtagctgggtctgcaggcatgtaccagcacatctggctgactttttaattttttgtaaagacagggtctcactatgttgtccaggctggccttgaactcctggccttaagcggtcctcctgccttggcctcctaaagtgctgagattacaggcgtgagccaccacaagttaacacgttatgctggggaggagttaggggagagattttctttgtagagacctgttacctcgctgtgagttctcaccccacttctttcccctcaagcctgtgggcatgagaccatggggaagatgagtggtgctttccaccataggaggctcagccagccagagcctgactccaccccgccatcgtgagtggggcagaaggggctgcaatgggatgggccacacctctgctgaggtggggcaagggatattggaggtttgcccatgtagaccccacaggataagtggcagaggcaggggtggggggtcatcttgggccttcattagaggagcacagagcccaggcagcaatgattgggcagtgaatgccacattccttgggactgaggaagggtcacaaggatgggaactgtgggagaggagtcccaaataaagagcatctccgaagaactcagaaaattgactgtgaaagaaggaggtttaaccatctgtcaggcctatagagcaagaggctgtgggccaagggagaagttctctgttcccctgccttttcccctccccagcacagaagcccaacagaccctcttttcacaaagatgggccaggaccccagactttgggggtacacgagagaggaaacatcttaccttttttttgttctttgagatggagtctcactctgtcgcccaggctggagtacagtgacgccatcttggctcactgcaagctccgcctcctggtttcaagcaattctcttgcctcagcctcctgagtagctggaactacgggcgcgtgccaccacgcccggataattttttgtatttttagtagggacggggtgttagccaggatggtctcgatcttctgacctcgtgacccgcctgcctcagcctcccaaagtgttgggattacaggcatgagccaccgtgcctggcctatttatttttgagacagggtctcactctgtcacccaggctggagtgcagtggcccgatctcggctcactacaacctccgcctcccaggttcaagccatcctcctgcctcagcctcctgagtagctgggactacaggcacacactaccacgcccagctaatttttgtattctttgttttagtagagacggggtttcaccatgttggccaggctggtctcgaactcctgacctcaggtgatccacctgcctcagccttccaaagtgctggtattacaggcatgagccaccacacccagccccatcttacctttgactgaagatgggactgctgtctccttgcttccacctcccacacttgctcctgtggctccaaacttcaaacaggatctttctttgcctggcccactcctcctcatcctttacttagaagattagatcttttccagggaatcttcattcccaccacccggctctgggctcactcctcgggtgcccctctgggctcccacattacggttgctttcaggtccagcttccgcatgtggactatgaaactgtgaggacagccaagggtcagcatgtgcgaggaaaggcagggaagaggctagacgaggcactggggagcagggaggcccaagacccttaaatccacagacaggaagccctggctgaagggccaagtaaccaggtgttctacttcaatcttggcacccactgtatgcttagaccttgactcacacatgttcagctttaagccactgcacagatgagcaaacggggcggagattgcaggctgatcagtttgaagagccaagatcatctagcgtgacctgttgcccaaggcagagacaaggctgtgggctggtcagaagctggttacaattcctcccgccccagtacttgctggcagggattaagagcagataaaagtgtgctcacacactgtagacacggctaccatgccatccacagtgttgccatccacagtgttgccatcactcctgcccacagcaggagctggctggagcatgaggtggattctgtgctggagcctcaccctctgcctgatggcgcagacggccttgggtaagacccccaccccttcccgagagtgtcaggcaagacgggcacaagggatggagggacaggccccagttcaacctctcctggggacagcagggcaggagcacttagacaaggcctgggcaaatggagggtagggtttcaggacactaaaccatctaccagctgggagtctggacaagtcctttagcctccctgaacctcagggcttctctgtatttcctgcctcccggcacaggtgaaggggtctgagaacatggccacatcttttcttccttcccacctttttccttccttccatccttctttccttctcctaagcaggaggcctgtctctgccccctctctgctacatgaacctctttaccaccttcaaatttctccccaatatctttctttttaaaatgagtactacactttttactgtgaaaacaatctaatacattaacaaaagtttactgaggtataagatgtatacagcaaggtgcacacatcttcactgtataattatatctattatactaattattatatatatatatatggtaaccattatccagatcaacatctagaacatttccagtgggttaggcatggtagctcatgcctgtaattccagcactttgagaggctgaggtgggaggattacttgagcccaggagtttgagaccagcctgggcaaatagtgagacctagcctgggtaaatagactctgtctctatttttaaaaaacattttttaaaaagtttttttaacttacaaggatacacctgtaatcccagcactttgggaggccgaagcgggcagatcacctgaggtcaggagtttgagaccagcctaaccaatattattaccccgtctctactaaaaatacaaaactagccaggcatggtggcacatgcctgtaatcccagctactcaggaggctgaggcaggagaatcgcttgaagccaggaggcagaggttgtagtgagccgagatcgtgccattgcactccagcctgggcaacaagagcgaaactctatctcaaaaaaaaaaacaaaaaaccatctccagcgtcccatgtactccttctcagtcaatactcaaagttaccactagtctgacctctatcataaataaattttgcccatatatacatatatccattattttaaatttgaaggaaactttgcttactccgcttttaacattttggcgcattttcttttcatcttttctttttttttttttttttttttgagacggagtctcgccctgtcacccagactggtgtgcaatggtgccatctccgctcaccgcaacctccacctcccgggttcaagcaattctccccacctcagcctcccaagtagctgggactacaggcgtacaccacaagcccagctaatttttgtatttttttagtggagatggggtttcgccatgctggccaggcaggtctcgaaattctgacctgagatgatccacctgcctcggcctcccaaagtgctgggaccgcaggcatgagccaccatgcccaacctcttttcaccttttcattgtgtatttatctatagctgtactattagaatgtacacaattttaagccaaatggggtggctcatgtctataatcccagcattttgggagtctgatgtgggaggattgcttaagctcaggagttcaagaccagcctgggcaacataactagagcccatctgaacaaaaaatttaaaaattagccaagcatggtgtggtgcatgcctgcagtcccaactgctcgagaggctgaagtgagaggctcacttgagtttgggaggtggaggctgtagtgagctatgatcatgccactgccttccagcctgggcaacagagggagaccttgtctcaaaaaaagaaaaaaataagggaaagaaaagaaaagaaagaatgaatgaataaacacaattttatattctggggtttttctttttttttttaatttaagttattaccaaaagcagtttaaagtttgagtctgtagttacattggccttgcttggtccccagatataaatgatgcttccagtattcactatggtatagataaatttagttcagaaaggtctttgttttcatgtgtttctgactattttcacaggggagagacccagaagtggaattactgagtgaaggcatgtgaacttttcttttcttttcttttcttttcttttttggttgttgttttgtttttgagatggagtctcactctgtctcccaggctggagcacagtgatgcgatcttggctcactgcaacctccacctcctgggttcaagcaattctcctatctcagcctcccgagtagctgggattacaggcacgcaccaccacgcccagctaatttttgtatttttagtagagacagggtttcaccatgttggccaggctggtctcgaactcctgacctccagtgatccacctgccttgacctcccaaagtgctgggattacaggcgtgagccaccacaccagctggcaagtgaacttttcatggctttgtatacatttcgccaaattattttcccaaggcattgtatcagtttatcctccaccaacagtatatgtgaatgtccttttcactgtatcttcaccagaattagatgccatcacttttaaatttattaggtctaagttgtaactcctggttttagttagcactttatgaccaccagtaaggtggaatattgttttcataggtgcttacatgctgcctctgggtagcagagctgggatggggaccactccatggcagctcatgctcaggggtctagagcactctgctacatggctaggtgccccttggaggctagggagccgacagaaaaacatggtttaaggcactgctctgatgtaagatacttttctgtgtgaccttggccaacttatatwacccctttgagcttcagcttccacatttgtatagttttgtaacaataacatttgccctataaggttttcagaaaaatgaggtgaggctgggcgtggtggctcatgcatgcctgtactcccagaactttgggaggccagagtgggaggatcacttgaggccaagagttcaagaccagcctgggtaacaaagtgagaccctgtctctacaaaaaagaaaaagaaaaaaagaaaaaaatgaggtgagataatttaaagtgtttggcagagcacccaggctataatgaaggcccagtaaattatagctattggctattccaccatgagtggaccctggattcagggcaaatccaggtaatgggttagaccttggcctcctggctgtgtcctgtgagactgcaggctggtcacggcccccctctgggtctttgggcctcccccagctcctcccaagtccagtggagaagcccatgtgaaagagctttgtaaactgcaaaggctgcacaaacgggagatttgagctggcccttgccgctgctggcctgcctccatgtttgaagggtctccattgcagtcacttctttttgcccagatattgcttatgtgagacctgtagagacctgggggcatgggcagagaggcatttttggccacctgcagctgggagtgtgaaggtgtgctctattgcatcaattccaaatcctattccaaaaaccatttgcatcaaaatctggggaggtttgcaaccctgagattctcatcagagagtgtggggtggggccaaggaatacatatttttgcaatgatcctccaggtgattctgatgcacagataggttcgctaattacttggatcaggtctgctttctgtcactttacagaatgagctccataggaccggagcacagaacaatttagtttgggtttttgttgtttgttttttggttttttgtttgtttgttttgagatggagtcttgctctgttgcccaggctggagtatagagtgatctctgctcaccgcaacctcctcctcgcgggttcaagagattctcctacctcagcctcctaagtagctgggattacaggcttgtgccgctggcctggctaattattattattggtttttttttagtagagatggggtttcaccatgttggccagactggtcttgaactcctgacctcaggtgatccacccgcctcggcctcccaaagttctgggcttataggcgtgagccaccgtgcccagcccaattcggttttgataaaaggaggagggggcaaatagacaagggcacttcaggaagggacattggatgtgaggcttcaacgactcttggcaataggagtggggcaggatgacagcctggaagaggaagaaaagagtatccacgggaagtcggattcaacttggcctatttcatatctatgccaagagctggctatggtgtaagtttgcttgcattgtgtatgtgtgcttgtgtgtgcgtgtaataagtatgctgtagatagatttgttgtcacctatgtacaactgcacttgtacgcatatgtatgtatgtatatggacatgcattttactcttctgtttctgcatgtttcttggagtgtttgtttgtctgttttgagacggagtctcactttgtcacccaggctggagtgcagtggcaaaatctcggctcactgcaacctccgcctcccgggttcaagcgattctcctgcctcagcctcccgagtagctgggattacaggtgcccgccaccacgcctggctaatttttgtatttttagtagagacaggggtttcaccatgttggccaggctggtctcgaactcctgacctcaagtgatctgcccacctcggcctcccaaagtgctgggattataggcgtgagccactgcgcctggcctttttctgcatgttcctttgtagatgagctgtgctcacatgtacctatatcataaattagcatgtacatgtgagtattagatgcgagtatgcatatgagtaagaatgcatatatgcgtgtatgatttcttcctagaaacatgctgggctaatgttaacaacaagaacagaggcgtaggccgggcgcggtggctcatgcctgtaatcccagcagtttgggaggctgaggcgggcagatcacaagttcaggagatcaagaccattctggctaacatggtgaaaccgtgtctctactaaaaatacaaaaaattagccgggcatggtggcgggtgcctgtagtcccagctactcgggaggctgaggcaggagaatggcatgaacctgggaggtggggcttgcagtgagccgagatcgtgccactgcactccagcctgggcgacagagcaagactccatctcaaaaaaaggacagaggtgtagctatattaatatcagacaaacagaaatcaaaatgaataatgcatttattgccattaaatgacgcagagaaatagcccatataatagacataaatttttatttatttatttatttatttatttatttattttttgagatggagtctcactctgttgcccaggctggagtgcagtggcgcgatctcggctcactgcaacctccgctcctgggttcaagcaattctcctgcctcagcctcctgagtagcagtattacaggtgtgtgtcaccacgcccagctaatttttgtatttttagtagagacggggtttcaccattcctgacctcgtgatccacccaccttggcctcctgaagtgctgggattacaggcgtgagccaccgcgcgcagccgacatgaacttttatatgcttactgatagggatttgaaatgttaaatgaggtcgggcacggtggctcatgcctataatcccagcactttgggaggccaaggcgggcggatcacgaggtcaggagatagagaccatcctggctagtacggtgaaaccccatctctactaaaaatacaaaattagccaggcatggtggtgcatgcctataattccagctactcgggaggccgaggcaggagaatggcttgaacccgggaggcagaggttgcggtgagccgagatcacgccattgtactccagcctgggcaaaaacagcgaaactccatctcaaaaaaaaaaaaaaattagccaggcgcggtgctgtgtgtctgtagtcccagctactcaggaggctggagcaggagaatcacttgaacctggaaggtggaggttgcagtgagccaagattgggctattgcactccagcctgggcgatagagaaagaccccatctaaataaataaataaataaataaatgagggccgggcgtggtggctyacacctgtaatcccagcactttgggaggccaaggcgggcagatcacgaggtcaggagatcgagaccatcctggctagcatggtgaaacaccgcctctactaaaaatacaaaaattagccgggtgtggtggcgggcgcctgtggtcccagctgctctggaggttgaggcaggagaatggcgtgaatctgggaggcggagcttgcagtgagccgagattgcgccactgcactccagcctgggcgacagagcaagactccatctcaaaaaataaataaataaataaataaataaatataaataaataaacgaaacgttaaaggagagaaaaaattctgagagaagcacaagaagaagtggacagacacacaatggttatgatcaattgttatgaaaagcagccactgcttcccatgacagatgggccagggtcccatttgtggctgagtggctgcgcaggggtgacccttttcccctctctttccaggtgccttggtcccatttgtggctgagtggctgagccagggtcccatttgtggctgggtgactgagcagaggtgacccttttcccttctcttcccaggtgccttgcacaccaagaggcctcaagtggtcaccaaatatggaaccctgcaaggaaaacagatgcatgtggggaagacacccatccaagtctttttaggagtccccttctccagacctcctctaggtatcctcaggtttgcacctccagaaccccyggagccctggaaaggaatcagagatgctaccacctacccgcctgggtaagagtcagaggcctgtccactgggagggggcaatgggcctatgcctgcatctgggtggggctttgcacagctcactgagaagaactcactgtgtgatcacaggcaggcctggggcccattctgggcctcagttttcagacccgtatcatgagcaaactggtcctgatggtgtttacatcactgacaatgctgctgttggtttttgtttttgtttttgttttttttagatggagtctcgctctgtcgccaggctggagtgcagtggcacgatctcggctcactgcaacctccgcctcccgggttcaagcgagtctcctgcctcagcctctgagtatctggggctacaggtacgtgccaccatgcacacctaatttttgtatttttagtagagacagggtttcattatgttggccaggatggtctcgatctcttgacctcgtgatccacatgcctcggcctcccaaagtgctgagattacaggcatgagccactgcgcctagacttgttgttggtttcttagaggagagctccaggcaagggggaggctgtcaccgaccgtgctccagcacctgctggggagctgcgttttcctaaatgtgtctgaggggcagtgttcactctcacatcacccccctgacccagtccggagctcttccctctctctgggggctgagccctgagtcacagaagcataattagaacaatgactgccctttgaagcactgggcttggcgatttacccagaacaagtgtatttactgtttattcagactattgagtaatccactgtccagaacattctgtggcaatcattaacaatgctcagcatcagttggttaaagcacagggtttagaaaaatgtctgagaacctgggtatcagctgatataaaaagatacaaataccaccccaggtgtctagctgttaaaaacaggttgttggctgggcacagtggctcacacttgtaataccagaattttgataggccaaggcaggaggactgcttgaacccaggagttcaagaccagcctgggcagcatggcaagaccccatatctacagaaaattttaaaaaaatatctgggggtggtggtgagcacctgtggtcccagttactctaaaggctggggtgggaggctcacttgatcaaagcccaagggatcatggttgtagtaagccatgagtgcaccactgactgcactccagcctgagccacagagtgagaccctgtctcaaaaaaaaaaataaaagcaggttgtccactgttagaacatgactagcagttactaaaataccagaacgttccttgtcagaacattggctgtcaccgataagatcccagttatcctgaacattctgtgacttatttagaatcccaaagatcaggtgacagaacatgggatggccactgttagaaccctggagatcagggatttagaggttagagtgttcactgtatagaagtctgggcatcagttgttagaaactgaccatgagctgtcaaaacaatggctgtttggaaacggagtgtcaggtgtaagaatttgtggattgctcagaatagcccatggggtggtggttggggtgggcagcgggagaggaggatgtttcaaagatagtagtttctgcctgggtagttacgggggaggtggaaggaaggtatcagactccaaatttattttgaaagtaaaattggcaggatttgctggagaattggatataagccacaaggaaagaagaggaatcactgataatgactagtttttggccacagtagacaaggaaataggggtaccatttatcaaaatgaggaaaactggagcaagagcaagtttgggcaaaataggaattcattttgagccaggagcagtggctcatgcctgtaattccagcactttgggaggccgaggcaggaaatcacttgagctcaggagtttgagaccagcttgagcaatgtagtgagaccctgtctctacaagaaatttaaaaaattagctgggcgcagtgccgtggtcctagctacttgggaggctgaagtaagaggattgcttgggcttgggaggttatgatcgtgccactcacacttagcctgagagacagagtgagaccctatctaaaacacacacacacacacacacacacacacacacacacacacacacagttccttttggggcctattaaatttgacgtgctgacagatgttccacgtggaggggcggtaaggtggctggagagagaagacagaaggcaaactgatcatcagcacatcagtggtgtgaagcccctgggcctggatgatgggagaaaggatggtcagaaaaaaaaacaaaaactgagggtcgaggactgggcactctcatgcttaggcctggagagaaggaggaaccaccaatgaggtggcaggaatatcaggagcacggggtgttacagaagcccagagaaggaaagctgttcgagaaagataatctggccgggcgaggtggctctcacctgtaatcccaacaccttgggaggctgaggtgggaggatcccttgaggctaggagttccataccaacctgggcaacatagtgagaccctgtctctacaaaaaaattaaaaattatccggtgtgatggtgcgtgcttgtagtcctagctacttgggaggttaaggatcacttgagcccaggaggtcaaggctgcagtgaactatgatcatgtcactgcattgctgcctgggtgaccctgtctctaaagaaagagaggaggctgggcaccgtggctcatgcctgtaatcccagcactttgggaggaagaggcgggtggatcacgaggtcaggagttcgagaccagcctgaccaacatggcgaaaccccgtctcttctaaaaatacaaaaattagctaggtgtcgtggcatgtgcctcaggaggctgaggcagtgagctgatatctcccacctgaacccaggaggcagaggttgcagtcagccaagatggtgccactgcactccagcctggccgacagagcgagactccatctcaaacaaaaaaaaaaaagagaggagatagagcaaaggggaatataatatggtcaaccatgttgagggctgtcagggcaagtaagataatgacagagatttagcaagatggatgtcactggtgaccatggcaggatggctctgatggtgggatgggcacagaagccttggctgttcataatcccagttcccagctatcagagccctggctttcctggtgaggtgctaggtgtggtttactagacagcattctaataccacattagctgctgccaaaggagtgttggaatgctgtagggaaggactggtgaaagggagcaggtgatgctctgggaacaggctaggctaggacaagagcagaagggagcagaggaacaggcgaggcaaacagggtgtcctgcgcccaatcaaatggtccaggcccagctgttatgagaatagccacctaggggttgggccagcaaggagaaaaggtgaggtggccggagagcccatgctacaaaaataccccaaatatccacacagtataaggcactgggctgggtgccagtactcagatgaatctacctctattcctgcctttgggaagtgcatggtcacttggggagaaaaacagccaactgaaataactccaaccaggacatggtcaacagcggacaggaggccaggcatggtggctcatgcctataatcccagcactttgggaggccgaggtgggcagatcacttaaggccaggagttcgagaccagcctggccaacatggtgaaaccccgactctactaaaaatacaaaaattagctgggtgtgatggcgcgtgcctgtagtcccagctacttgcaagattgaggtaggagaattgcttgaacctagaggcagaggtagcagtgagccaagatcgtgccactacactccagcctgrgcaacagagcaagactctgtctcaaaaaaataagtggacaggatgtcgggaggcacagaagaggaagtgaccaggagaggagacaccacttaagctgggccttaaacacgaataggagtttgctgggcagggcagaaggcatttgcttgagaggactgaggcccacgggcttggaggtgggaggcaaggggccacatgtatctacagcaaagggtggctgggacagagatgactggatggaaaggagggcctgggtactccgcgtatcttaactttatcctgagggcagtggagagccagggaagatttttgttgatttgtttgtttttattgatatatcatagttgtacatattagggaagatatgaagaagaggagtgacatagtccgccagagtgtggccgaggagtaggaggagtgtgaagaggctggggtactgtccagaccagagacggtggtggccttgacatctccccagagatggggatggaggggagggaccatattccagagctgtttgggaggcagaagggagactgaggggagggtggggcatgaaagacagggaggtgcccagggcaggcaggttcctgccttgacagcaccaacaggagcaggaatctctccacggactgaggcgccgggcagggaggggatggttcctgagaggccaacctgcctcccagtcctgggccccggggctggcggaggcctcctgtacacgcacacgcacgcacatgcgcacgcacacgcacgcgcacagacgctgcctggattttgctttgggttccgtcttctcactgcggaccctggattgaaacgatctccccgcggccgccgccgctacctggtgcccgcaggtgcctgcaggagtcctggggccagctggcctcgatgtacgtcagcacgcgggaacggtacaagtggctgcgcttcagcgaggactgtctgtacctgaacgtgtacgcgccggcgcgcgcgcccggggatccccagctgccagtgagtgccaggtctcccgcgcccgcggtcccaccgccgcccaccgccccgctcagatcccggccttcttcgtccaggtgatggtctggttcccgggaggcgccttcatcgtgggcgctgcttcttcgtacgagggctctgacttggccgcccgcgagaaagtggtgctggtgtttctgcagcacaggctcggcatcttcggcttcctgaggtggcggggccggtaccctttgggaccgcagctgtggccagagcggcggggactgggtgggaagggaggggcggggcctggggcggggatggggggggtggggccgcgaggcgggggcggggcctggcgctcggtggaaggggcgggcgctccataccatctggatggggcgagctaactccaaggaagggggtgtggtcgcaggactgggtcttagaggggcaaggctgggctgggtgggggaagcccaggagggcagcccaacgcgccccgactgtcgaggcccgggaccctgacagtgaaccccacacgcccagcacggacgacagccacgcgcgcgggaactgggggctgctggaccagatggcggctctgcgctgggtgcaggagaacatcgcagccttcgggggagacccaggaaatgtgaccctgttcggccagtcggcgggggccatgagcatctcaggactggtgagagcaatgcccagacggaccgagcacagacttaggctcctgcgttcccacaaatgtatgctccactgcacaggccatgtgcagatttgcgtgtacaggaacgtgcctgccacagaaatgctctcgcccctgccaagggtacagcccctcayagccaaggatgtctcctctgttgagggatagcactgatgagaaaactgagccccaggaagggtagtgctgaggcttggggtaatcagtgaatccaggtgctacccagcaccttctgcctctccacattcccccagaactctatcccctgaacagagcccaccatctgccccctgggcaaggctaggacctcacaccaggcctgcaagccaggggcatgagttgacgggctttgcccctgactcctgtgtgactgctgacctgggatgtgcctggaatgtgggtgtactgtaaggtgccctgtgaggggcatatggctgggaagtgaacacatcacacaggacattgctggccacagtcataataatactcaacagctgagcacttcctgtgtgccaggcattcttctaagcaccttatgtgtcgtcatccatgtaattccttcaatagtccaaaaagaaaagtactgttgtctccattctacagataaagaaacgaaggcccagagaattaagcaactttatccaaaattcactaaaaagcagaggaaaaaaaaatttttttttttgagacggagtttcgctcttgttgcccaggctggagtgcaatggcgtgatctcagctcaccattacctccgcctcccgggttcaagcgattctccaaagcagggaaagattgtaagcagcaaagtgacatgatcagatgtgcatttagagagatggctcagcctgctgcatgggactgggttggcaagaaacaggagcagagactcggagagctactgggaggggcagggatggggataggatatatcctaggagagatcatggggctggctctaaagcaggggcaggaaagatggagagcagaggatggctcagagtgatccaggaggccaaatgggcaggactagggcagctggggtgtggtcattagcagagatagggaaggcccctggggctgggggatggtatggggtaaggaatgccacccagacagggattggctggagcaggtttggggcatatgaagtctgaggtatccaagggacaggatgggaggccctagatgtacttgttcccccaacttgggcagtggagagaggctaacagctgtcagcacaggtaacaacctggggaaaccatgaggtcccttccacctacccctcatttctagccctaaagtagagggagaccacttttccacaccagcagattccctcccccaatctcacatcccctctggaacccactggggcccactgtacagaccagaggcaggaataccactggctttaggtctaggacatcaccccaggactcctgactccctcccagctacttgcccttcctggcttcactcaggctgcctgcccatggccagacagatgcccagaacagcccaggtgtctctacttgggcatctcacgggtgtattcctccctgttcttgcagatgatgtcacccctagcctcgggtctcttccatcgggccatttcccagagtggcaccgcgttrttcagacttttcatcactmgtaacccactgaaagtggccaaggtgagtgcctctccttccccagggctcagcatggaagggcaggatggaagcaccactgagcatcctttcttctctctatagaaggttgcccacctggctggatgcaaccacaacagcacacagatcctggtaaactgcctgagggcactatcagggaccaaggtgatgcgtgtgtccaacaagatggtaggtagaacattccagctgcctgacctggctgcctgagggccatcctcctatcctggtacccagccacccccaactacttccccagggaccctgtctcaagagcacacgagggagacttcctttaactctgatcccttcctctcccccatagagattcctccaactgaacttccagagagacccggaagaggtaaacaggccacattctgcaatttgagtatttatttaacacctactttgtgccaggcacttgggatacttagggaattgttcaggccaagatcccttccctagtggagctgatgttccagtggggaaggagaataaaccctataaataaatatattatccacctccttagaaggtgataggtgaatagcaaggaatggagagggtaaaggggttggacattttgggaggtatggacttttaaatagaatggctagaacaggactcagtgaagtgaaatttagcaaagattttcaagaggtgaaggagtgagctatacagatacccgcggccatcccaagtccacgtaatttggtcctgcctatcctgctcccctcccacacccatcctcctggggctcaccatgccagccccagccttttcccaatcaaagaacctaggctagagcagcctctgaaggggcacccaaggttgcagggaccctgggaggatacttgaggagactggctggaaatgccctttgccttgtagattatctggtccatgagccctgtggtggatggtgtggtgatcccagatgaccctttggtgctcctgacccaggggaaggtttcatctgtgccctaccttctaggtgtcaacaacctggaattcaattggctcttgccttatgtaagtgagtaggagttcaattggctcttgccttacgtaagtgagtaccatagtggaggcagggaaggatgcctcttggacggtgctgggcaccaggtcagatgccagtagcccctctgtggatgccctatgtttgggagcctcctgtagtccctgtacagtgaaaactggccatgaatgatggaggggaagaagggagaagtatggcctgctggagatttgaggaccacaaattctcagatcatagtttagatgggttatgatgttcattcccaagcctctaggcaactgcaaatcctgaagccctcccttgctcctgggtcagggtagatgccccaactcaggatggacccccactcagtaccacttcagctctggcccaggtggtagtgatgagcaggatgggagcagggggacaagagagagtcatgggcccttcctgggctgtgtgctgtgtctgataactcatcattagatgggcaagacctttggggcctttgtagctctggccagaatccctcctaatgctcaggcctgacccacactggggtccttgtcttgtgaacagatcatgaagttcccgctaaaccggcaggcgatgagaaaggaaaccatcactaagatgctctggagtacccgcaccctgttggtgagggacccagctggcaggggtgctcagttcggacagggttgacccccctgttttttttaacctagtagctgctctttgcaaaggggctcccagccagggtaaggatctttcttggagggtctggggtttgctgtgggatcagatgactgcttacaggtaaggtgctcagggtcacaggggcagttatgcagcaaaatcaggggttacaatcagcagagacagaaactttcccaggaagctccctttctccccctcccaggccaaaaactcctggggggctgagcatggatccaagtcactggtgggcccacctctggcccagctggcacccaggcctcaggtaagtgtggcctcctcactcagaatatcaccaaggagcaggtaccacttgtggtggaggagtacctggacaatgtcaatgagcatgactggaagatgctacgaaaccgtatgatggacatagttcaagatgccactttcgtgtatgccacactgcagactgctcactaccaccgaggtatgcagggtccccaagagtggccacactggccccgtccactctccaggtgtgctgtttaccaactgggcttatcgactgctcccctaccctctctgtacttctgggctagtataggattctaagatatcacagaggaggcagcatgctatcaactacaagagaggaaggggccaggcacggtggctcacacctgtaatcccagcactttgggaagccgaagtgggtggatcatttgaggccaggagttctagaccagcctcaccaacatggtgaaaacccatctctactaaaagtacaaaaaaattagccagctgtagtggcgcatgcctatagtcccagctactcagtaggctgacgcaggagaatcgcttgaacctgggagggggaggttgcagtgagccgacatcacaccactgcactccagcctgggcaacagagcgagactccatctcaaaaaaaaaacaaaaaaagtataagagaggaactgttcttccttaggaacaagggcaggacctcaaacagtccagaggagaagcctggggtggtcagggaaggcttcctggctgagaggacaggcttaggggcaccttgaaagttcaggctgactggggctaggggaacatgtgggtaacaggttaaaggggggggggctggaaaatgcagacaccaaagacccttcaatatgaggccaagaaaggaaggttcagaacagggaaaaggaaggcttccatgatcctggccacaatcctgtgaattaggttttagtattctcagtctgaagataaggaattattgatacaattcagaaaggtagagcaacttgctttaggtcacacagtgaatgagtagtgcagacaggattcaagtctgcccccttgattctgaagccaaagctctttttcctgcttggtgcaggtgagtgggaggcatggggtggatgagaagcctaggcagaggcttttcctgcatccctcctcagtttccctattcacagatgccggcctccctgtctacctgtatgaatttgagcaccacrctcgtggaataatcgtcaaaccccgcactgatggggcagaccatggggatgagatgtacttcctctttgggggccccttcgccacaggtgcaaaggtcccacctgataccccaactgggtgtccagtctcccacctctggatgcagacccacccctccattggctggccacagggagctcaccagttcctaatctgttatgctctcccaaatgaaagtcttctgctccggaagcagcagaagcagcaggagtagggtgggaggtcagtgtcccctgctctgtccgaaatcccacatcccattctgcccccaggcctttccatgggtaaggagaaggcacttagcctccagatgatgaaatactgggccaactttgcccgcacagggtgagtctgccccccagcacatctgggcattctacctgcccagtgctggacctgaagaagccagctgcttcggatatttgccccagcatgtcctacaggaactgcccagtcggcccaaacagggtgccccttcttcttcagctttcctcagtcagtcaccggatcctaaacgtctctagaatgtgtccttcttgatccatgacccacactcttcattcactcaagcattccacagtcattcaccactgcactcttttgggcccagccccagtactgggagctggaattcaaggatgttgcagacatgagccccatcctccagcagctcaccacataaaatcaggaaattacaatctggtacgctgagagctgtactgggggagcacaaggcactttgagagcatagaggaggtgtctggcccagcctagggggcaggtgacatgtaaagagagctttggctagccttgtgactattttcttaaagtctcgctctgtcacccagactggagtgcagtggcgcaatcccagctcactgcaatctccgcctcccaggttcaagcgattctcccacctcggcctcctgaggagttgggattacaggccaccacgcctggctaatttttgtatttttgtagaggtggggtttcacgttggccaggctggtcttgaattcctaacctcaagctatccacccacctcggcctctgaaagtgctgggattacaggcatgagtcactgcgcctggcctctctcctttcaaatcatcctccttatgacactcaaagtgtctttcttcttctttttttttttaaatttttttgagacatggtctcactctgctgcccaggctagagtgtagtggtgcaatcacagctcactgcagccttgacctcccaggctcaagcagtcctctcacttcagcctcccaagtagctgggactacagacacataccaccatgcccgtctaatttttttttttttttgagacagagtctcgctctgtcacccaggctggagagcagtggtgcaatctcagctcactgcaagctctgcttcccgggtttatgccattctcctgcctcagcctaccgagtagctgggactacaggtgcctgccaccatgcctggctaatttttttgtatctttagtagagacgaggtttcaccatgttagccaggatggtctcgatctcctgaccttgtgatctgcccgcctcgggctcccaaagtgctgggattacaggtgtgagccaccacgcctagcctaatttttgtattttttgtagagatgaagtcttgctattttgcccagactggtctccaactcccgggctcaagcaattttctcacctatgcctcccaaagtgttggtcttacaggtgttagccaccatacccagcccaaggggtctttctgaaataacatctgaccaagtcactctcctgtttaaaactcttcatggcttctctctgcctccaagataaagtcccagctcctcaaccttgcgtgaaaggcctttcaaaatctttcctatgtcatctcctttccactttgatccctttcacacactctcttttttttttgtttttgtgtttgtttttgagacagtctcgctctgtcacccaggctggagtgcagtggcgcgatctcggctcactgcaatctccacctcccaggttcatgctattctcctgcctcagcctcccgagtagctgggactacaggcacccgccacctcgcccggctttttttttgtatatttagtagagacagggtttcaccatgttagccaggatggtctcgatctcctgacctcgtgatccgcccacctcagcctcccaaagtgctgggattacaggcatgagccaccaggcctggccacacacacactctgtttttacctaactcttgacttgtgcttcctccaaaagccttggtcttttatatctctcaacctggcacatactgtttgctctgcctggaaggcccaccccaatacacactttcctactctttattaaagttctaagtatcatctccgtaaagccctctggaaccccaagtcccaagggcaaattaaacgagggaagggtgaaagaaagaagcaggatgaaaaggaacacaggtaatcctctcttttttatttctgggcagaaaccccaatgatgggaatctgccctgctggccacgctacaacaaggatgaaaagtacctgcagctggattttaccacaagagtgggcatgaagctcaaggagaagaagatggctttttggatgagtctgtaccagtctcaaagacctgagaagcagaggcaattctaagggtggctatgcaggaaggagccaaagaggggtttgcccccaccatccaggccctggggagactagccatggacatacctggggacaagagttctacccaccccagtttagaactgcaggagctccctgctgcctccaggccaaagctagagcttttgcctgttgtgtgggacctgcactgccctttccagcctgacatcccatgatgcccctctacttcactgttgacatccagttaggccaggccctgtcaacaccacactgtgctcagctctccagcctcaggacaacctctttttttcccttcttcaaatcctcccacccttcaatgtctccttgtgactccttcttatgggaggtcgacccagactgccactgcccctgtcactgcacccagcttggcatttaccatccatcctgctcaaccttgtgcctgtctgttcacattggcctggaggcctagggcaggttgtgacatggagcaaacttttggtagtttgggatcttctctcccacccacacttatctcccccagggccactccaaagtctatacacaggggtggtctcttcaataaagaagtgttgattagacctgaatttctccacctataaaatgggtgtgtgaagtgaatgatgtctcaatttgagccctgagagaaaggaagtattgctgcctgttccttagtgggctgtgcctggatgctacactcagtcaaagggtgctactgcaaagttgcctggggtacaaaacacttgccttttgccttcatggtctcaagtgcacccctcaggacagccacaccccacgctcacttgtccatcagtttaggtcttagtgccacatctagattcctctggcctctcctgcagcccgtgtgtatcccagcctgtcccacagttttgtttcgttgttttgtggggtttttttttttttttttgagacggagttttgctcttgtcacccaggctggagtgcaatgatgaaatctcagctcactgcagcctcagtctcccgagttcaagcgattctcctgcctcagcctcccaagtagctgagattacagatgcccaccaccatgcccggcttatttttgtatttttagtagagatagggtttcatcatgtcagccaggctggtctcaaactcctgacctcaggtaatccacccgtctcagcctgctgaagtgctggaattacaggcatgagccaccatgcctggccactgtgggctttttggtggtaaaatacacacgacaaattttaccattttaactatttttgttttttgttttgttttttgtggttttttttttttttttttttttgagatggagtctcgctctgtcgcccaggctggagtgcagtggcacgttctcggctcactgtgatctctgcctcccgggttcacgccattctcctgcctcagcctctcgaatagctgggaccacaggtgcccgccacaacacccagctaatgtttttttttttgtacttttagtagacggggtttcaccatgttagcgaggacggtctcgatctcctgacctcgtgatccacccacctcggcctcccaaagtgctgggattacaggcgtgagctaccgcgcccagcccattttaactatttttaaatgtacagttcaatatcattaagtacattcacatcattgcacaaccatcaccactattctgtctttagaactttttcatcatttaaactgaaactctgtacccattcaacaatgacttgctgttaccccctcttcctagcccccggtaacccctattctgctttctgtctctatgaacttgactcttccaggtgcctgatataagtacagtaatgcagtatttgtccttttgtgtctggcttatttcacttcacatgatgtcttcaagtttcatccatgctgtagcatctatcagaatttccttccattttaaggctggataatattccatcgcaagtatataacacattttgtttatccatccatccagtgatgggcatttgggttctttccacctttaggctattgtgaataatgctgctatgaacactggcatagtgtcccacagtatttttgtcccaaactagtgttgattaggccctttattcccagaggttcctgagtctctggggcaaatggaagctgcacagatctgtgggatgaggcacatctaattccccataccccaggatctaacccccaaagcaaagggatggtggaggagggcggaagcccctcccaagcaaacattaatcctcacaacaactgtggatcttattatccccattttacagatgaagaaactgaggcattgagacattaaaaagccttgcccaagggcctgagctggtggaggcagagcaggagttggatccaggcctgtctgaggcatcctgccacctccatccagacctggagcaatccctgagaagggtggctaccaccagagatgtggcagctctggtctcaggaagcatagccggaggatgtcccaggcaaccaaacagccattcatcagtaaggagccagagtgagggctgctagttcagcccccggaaggtggtccaggggcagccagtgcagaactcagcaggagctcagttccaactgagcctgatttcactccagtgtccacaagggacatcctgacctggaggtcctcggctactcaccctggggcctgctggcacagcccaggagctagcccaggcctgcctctgatggttccccctgatttctcccctgacaaagattctctccttgaccaaactctactcagactttcctgaactttttcagctaggcctgactttttagcaagattccttctaagtcagtttaaccagagccccccaccttcgatatctgatcatcttccataatctaattaagttccttagcctcggccaggcacggtggctcaggcctgtaatcccagcactttgggaggcagaggcacgcagaccacttgagctcggaagttcgagaccagcctggccaacatggtgaaaccccattctactaaaaatacaaaaattagccggatgtggtggtgggcgcctgtaatcacagctacttgagaggctgaggcagaagaatcacttgaactcaggaggtggaggttgcagtgagctgaaatcgtgccactgcactccagcctgggtgacagagcaagactctgcctcaaaaatataaaaaataaaagttctttagcctctattatccccaaggtgatgtctggtcaccctggcctgcctgcaacaagaatcctattggatgggcttagccacaattcccccctttatctctgatatttcatcttagtaattttccatccactgaccccaccttgctccttggctataaattctcacttgtccatgctgtattcagagttgagcccaatctctgtccccagctgcctgactgcaaaaccccactgtggcagtccctatgcctatttctttttatttcttttttcttttttttttttttttttttggaaacagggtctcctctgttgcccaggctgaagtgcagtggtgccatcacagctcactgcagcctcaaactcctgggctcaagcaatcctctcacgtcagcctcccaaatagctgggaccacagacagccaccaccagccttggctaatttttttttaatttttgggcctgacacggtggctcatacctgtaatcccagcactttgggaggctgaggcaagaggactgcttgagcccaggagtttgagaccaacctgggcaacactgcaagaccccatccctacaaaaaatattaattaaaaaaattagccaggtatggtggcacatgcctgtagtcccagctactcaagaggctgaggtgggagaatcgcttgagcccagaaggccgaggcttcagtgagctatgatcatcacaccactgcactccagcctgggtgacagagtgagaccctctctaccgccttggcctccataagtgctggaattacaggcacaagctaactgctcggcccctatgcctatttcgatgctcctgaataaagtctgctttactgagctttaataaggaccatgaatgatttttcttgaacgcccctcctcatgctttctcacatgggtctgtggggagggcagctgcctctaatggccacctgcccagggccctcctcccccaactggaggaagtgcagctgagcaggagccagggcttagtcgggtccaagctggctgtggcagatgcgacaatcataaagggctctgaggaaaccctaggatcctccataggaatccaagcctgggagaaccccagtgggcagcctgaatgctgggttggcccctgccttccacagccccggctccacaccctccccatacacccaggaaggtgtccctcttctcgtcagctcctccctgggttacattgctggatgacagaggcgggagggctacctactactgccccatcgtcccaccttgtcttcctgcccccactcaggtcctcccacggccacttggagtctctcctgaagctgctgccaggccccatcccgcgtggatcggtgcgcagaacagactggatcttggtgaaagcccgaggacacttctgagtcttgccccagccgccctccccaccgccgggtttcatccacccgcccgcgccaccgcgggtacgaaagagtgcgggcgctaagctcatgcaggcatagtgcacacaggagccccctgccagccgggccgggccgggccgcccacctggggctgagcctggctcctggctccggatgcagcgccccagcttctccctcgccacgcccccaccttccacccgcgaagcagcaattacccgcccaggcggctgggaaagggccaattagcgcaggagacgcggcccctctgcggggcccctgctgaccgcagcccacgcagcgctgcctccgccgcgggcccccagcctcccgccgctcgcccgcctgccacagccctccctgccgggccgacagcgctggctgcctgggagtcccgggggacgcgccgtccggcctcccgccaactgcagtcacggatccagccgcctggcgccagcccagagccggggcggacgtgcgggcgccgggagctgaatctcgcctccgctgggtggtgggggctagtgggctgcgctccactgagagggcttccgcgcccccgacagcctgcgctttggcgcccgccagcagtctccaggcgggggcggcccggcccaagccttcttgccttctcatggccctccttgcttcttccggccctccaaggcccggttctgggctggccgagctggagcagttccccactggtggttacggcagagccaggctttggaaacccacggccggtgctggatcgtgccccgcgacaggcacgtaggcaggatacggggtgggcagcacagggacacaagcactcattactgacagtgaatgcatgaacttcctcccctgggtccctcccctgcacaacctgacttacccacctagaggctttgggagacccaagagggatgggtcctaccctccaggagcctgcaggctgcatgggcagaagatccaggagcttggctaggaccccaagctaaagaaagccccgaggtccagggagggaggcatcgggtgaaaaaaaaaggaggggggcgctggaagagggagttgtaggggacagatgccacccgtcaaggctttcccttcccccaaagaacccccttccagctgaaactggtcacactggggcccaggagtaagggataaagtgggcctgagcccagtacatcctctgcaggaggctgaagtttctgaaacaagaagtgggagagggttcagtaggaaggtccacaagtgaggtcgaccaaagagatcctgctgtttccccatgagtgccacaagggactggggtggaagggctgaggctggaccagtcctggatgcagtggccttttctgtgtgttcttcctctgctccctcaggtctggagggctgggagcctgctgcgtgctctggaactttactcaggtcttgttgagccactttctttgggaaagtgtggaccatgtctcttaaagaaccagaattgcttctttccaccaaggtcattaactgtgtggagagggagagagcccctgtcagaaattgggggatgcagactgaacaatgaaggaacatagcaacaatgaaggaacatagggacaatgacaccaccttgagtccagtggaatgaggtgcggctgcattaaagaatgaggaaagggacagagacaggtgtaagagacgatggaacaatcagccaagaaagtcagggggttggctgggcgcggtggctcacacctgtaatcgccgcactttgggaggctgtggcgggcagatggcttaagcccaggagttcgagaccagcctgaacaacatggcaaaaccccatctctacgaaaaatgcaaaaattagccaggcatggtggcatgcccatgcagtctcagctacttgggaagctgaggtgggaggatggcttgagcctggcaggcagaagttgcagtgagacaagattttttaaaaggccaggcatggtggctcatgcctgtagtcccagcactttaggaggccgaggcaggcagatcacctgaggtcaggagttctggaccagcctggccaacatggtaaaaccctgtctctactaaaaatataaaaattagccaggtgtggtggcacacacctgta

SEQ ID NO: 93821 - DNA, 88330 bp, Homo sapiens
  misc_feature (1)...(88330): n = A,T,C or G
ccctcaacaccagacacacaggcaggggctgcagccattaacggtcaggcctttggacacaaaatactttcgctttgtggtctcctgacgtggtcaccaccagggaggcatctctgtaaacagaaagcatgtgattgcagagactgggggacccaagcccaccacctaggggccctagggtgggctcctccagcacaccctcagttctagggccctagtgcctagcactgggccgacatctctgcagccagcatggaggggattagaggaagcccccagcacgggagaagcagagctgactccgatggggaaaatcagtctcagcctctccctcatgactgagacgtggggccccggagggtcactgtcagccactggaatgggggctgggctgtgaaccctcaggcttctctgcattcctgccttaggaatcccttcccacaccccaaggatcctgtgtcccctacatactactgccaccttccaaatacacaaagatcccagcccttggccaattcacttacttgctgagggcaaagtccaggatctcagccgtgtggccccggtagtcagtaagcaggcggccggtccgggcgtcccagaggcgcacgatgccatccaggctgcaggtatataccacggcagtgcctgcctcccacagcagctgcacgatgcccgactgccccgaggaatgacagaggcagggcggaggttggcaggagagctgagagccatctgctcccaattctcaaagagggacagccacacacaagggccaggcaggagccagatctggggtagatgctcctggaggcctgggcttccccaccactatggacacagcccacagggaccccagctccagctgcccatacctggtgctgacactgatgcctaagagtctgcgtagccaggtcatagatggccaaggtcccatccaggtagccaacagctgccaggggcatcctggccagaggagcgtaccatgaagactcatgagggcctggactcacacgccctgccgtcctcccgggcccccagcccaggcccctcccacaaacccctttccccatcctcactcacacactgcagaagcccaaggactccaccgagttggactcactctcctccccttctcccaggctgggctgggaggccacagtctcaggtctaaaaacacccaccacctgaaagccagagaggatcagaggaggacacggaatccgggtgcttgatggagagaaagacggtggggagaggagacagtgaagacccaggaaggaaggagaggagtcgggaaagcggaggccccagccgggctccaggtccactcaccttgccggtggtggcactgaccagcttggcctggcagtccacagagccagttaggatcaagctgccatcctggttggcagcaamacaggtgagtgggccctggtgaccctcagtccctagcatagagcagggaggcagctcaggcttcgtcckacctcccctctgagtcctgccccaggttctcagcccctccctacaaaggcccaggctaacacttcccccacctctgatacctttcagtacatgganagggcttccctgcttcaggtcccaaatcctgatggtcccatcttcatagcctaccacagctctcttccctgaagagaggcacagatgaagagagggcagagggcacgctcacatacactaagcaagggaatggggagagggagaggaaagaagagtggaagggcccagacactgccccaggaatcacaggtgagttcagagcaggaaggaggcgctgtgaactttggggcccaggaggtcagcactgcaaacagcaggcctcagattttgccggctgtgacccagaaggctgctctgggaggtgtatatcccgggattcggcctctgcacccaggaaaggtcactcaagggaggtgctctcaccatcagggaggactcggccacaggtggctgggcagttgggaccctggaaggtcttgcagtcaccattcgggactttccacatccaggtgttgccgtcagctgtgcccgccaacaggacaggtgcccgaggatgccactccatccactggacagggaggaaggggcagcagggaggcccgtcaccccatcccacctagaagcctgccccatgagctccacccaaggtttcctgcctctggggttccgcggggactttccaggtagcaggtagatattcttcctgtgccttggggcgcattggctcagagctggcttggcgcaataaaggcagaactggcctcccaagcttgcacccccaacaacccaaggccccacagagctgactcccgctctgatgatcttacctccaggtctcccgcttcaaaggaccagacctcctccttagtgtccacctgccacactttcaagaggccactcatgtcccctgtggccactagagtggagtcatggctgaaaccagcacaagtcacagagtctttatggccttcaaagaaaagtgggcagaaaacagaggaaaaaaatagggtacctggtgctgggggcatgtgattctggtatctggcccactgaaaggaccagctaggaaaaaaagaggggcgggactgagcagaacaggtgctggaactcaccaccactctaggaaccaatactcccatgtctgctgggagacactgctggccctcactcaaccagaccaagtcccagcctcctatgccttcccccttctgtccactctacacctctgcccgcctgctcctataccaatgtggccttctctggcctttcctggattcccttggccaattagtgcctcctgcctctgtgcccaaaacacactagtattcgccccgtgtccctggggcccagcacagagctggcacaaaagagatgtcactaagtggctgttggatgcacaacctctgcaggtcagcctcctaagatctcccaaaagaatatgacctctcccaggcctctaccccagccccctcacctgcacactcaaagagcagctccccatcgctgagccgccatacgaaggctttgtcmtcttcacccccggtcactgccaaggtattggtcttggggtccaggctcacacaaaacacagatgctgtcccaagagatattccatgggtaaggggacagagctcccacctagggctctgtccttcacaatcttcaggaaacccaccccctttcacccaaagcgtgtctttcctcctggaaaacacaggtacatccaagttcttctaagtttcaagaattgggttgttagatccttcccatatttgccaagctccctatttgccagagtagatcccctcactgtgtgactcccgtcaccacccaacaccaatgccatggacaagaggtggggacaggtgcagggcttacagttgtcagcatgggatgccaccggggttgggtacagagcgaggagagcatcacgttaagggttttttgttttttgttttttgttttttgagacagagtcttgctctgtcacccaggctggagtgcagtggcacaatctcagctcactgcaacctccacctcccaggttcaagcaattctcctgcctcagccccctgagtagctgggattacaggcgcccgccaccacaaccagctaatttttgtatttttagtagagatggggtttcatcatgttggtcaggctggtctcgaactcctaaccttctgatccacccgcctcggcctcccaaagtgctgggattacaggcatgagccaccgtgcctggcaacagtttcttactaagaactagcacttgagaaagttatataaaatatgctcaaaaagatataattatctctcattttattttatttttttgagatggaatcttgctctgtcgcccaggccgaagcgcagtggcacaatctcagctcagtgcaacctctgcctcccaggttcaagtgattctccttcctcagcctccggagtagctgggattacaggcacatgccaccacacccagctaattttttttttatttttagtagagatgaggtttcaccatgtcggccaggctggtcttgaactcctgacctcaggtgatccacccgccttggccttccaaagtgctgtgattacaggcatgagccaccgcacctggccaattatctctaattttatactcactacttttattaacttttatcaaagataactttttttttttttttttttttggagacagactctcattctgttgcccaggctggagtgcaatggcgcagtcttggtccactgcaacctccgcctcccgggttcaagcaattctcctgcctcaacctcccgaggagctgggactacaggcgcccgctaccacgcccagctaatttttgtatttttagtagagacggggtttcaccatattggccaggctggtctggaactcccgaccttgtgatccgcctgcctgggcctcctaaagtgctgggattacaggcgtgagccaccatgcccagccaaatttttgtatttttagtagagactgggttttgccatgttggccaggctggtctcgaactcctgacctcaagtgatccacctgcctcagcctcctaaagtgctgggatttcaggagtgagccaccacgcccggccaaagataactttttaaaagaaaactaagaggttaatcaaggttaactggcaaagtagagggtgtctcgactgatgccagaagccaagcaatcatccattctgccacactttcccacctgtgggctcctccagcgcaaggccagcatcttgcccatctctgtgtcccccataacgttctgtccatggctgatgtttaatgcttacacgcccacctaaactgatttgaggtggatcgcctcaaagacctacctgagtgcaatgcaaaggtgacctcgctatcgtcggggccctccatgctgccgaccaccccttcctggggttctagaacccagccctcttcgttgccctcttcctcctcttcttcctcaaagtccacatcttccatctcctgggccaggtcatctgctttggggagagggttagaagatggggctcgggaggcggtaagaggtacggagagaagcatgaggaggcctgaggctggggcgggtcatgtggcgagaagggaaggtggagtcagacacaccggggtccgcgggggcgcgcgggacacaggacgggaggccacggctggccagagaccgtgcggtaagggagggccaaggggatgatgggaagggggtgtgtgaggggaagggccagaggaggcgtcagggaacccccaccccagccaggcctgagaactaagtgtgagggtgggagtgggggaggaggggaagagggatatcggtaggaatgaccagtcgggtgtggaggggagcggggaaaagcaggagtcagaggccaggggtgagcgtctcctgtcccatggcctgaggagcggcagttctcacctgggtccggcggaccgggatcaagttctaccacctcrataatctcttcatcaccatggaagcttagggtctccagtgggggggtgtcagcagcagccccgctttccgattcggactccatgcggcgcaagcggcggatccacttctctgggcccaaacgcctcccagagtcagctctgcgcgacgacgcggaactcgagcccctcctcccggcaggaagtaggcgtaggcgactccccrgcaggaagagcgacggccgttcggccaatagctacgaaggttggctggccgcctcaccaatcacagagcggcattggaagatggrgccggggcgtggcggagagaacccaaactccgccccacctgactccgcccccaactggagggaaacaagcgagcgcgcgcgcctccggggtctcctgggaagagtagttctcctgggtccgctctgcgggcttctgggagatgtagtttctggtctgtaggcaggacggaaggagcgggggaggccccttacgcaaactacaattcccggcggggagcgcggtgaagcgggggtgggatctgaacatggcggcggtggtagctgctacggcgctgaagggccggggggcgagaaatgcccgcgtcctccggggtaaggagagggaccccggggagggcaggactgcagaagatcccttttctttcacgtccagcccgacgatagcaggaggtcagggctcttggttcctccccacacttttctgcaagatcttagagtctgggggtgcagagatgctctttagaggtcacccagtgcatccccccgccttcgggttgctcgacacctccggggtcttgctgcaagagggagctcctaggaagcctgttggactcccgcgctccaggtgtttcacactcaccgcagtgcagaggaaagagccccgggcttctggaggtttgagttccagccccggataattagcagtttgaccttgggcaaagcagtttttctctcagggcttcagtttcctcttccgtacagtgcaagggatggagtagactatctttaaggtcccttccagtgctaacatttgcagtttcaaaaccttttcccggatttccttcatacgtcttatgtgagtcccactgcagtccttcccatgctgtcgtctgaggaagaacagcgaagcttttcgtcctggcaccagggtgatgagcccgcagtgacgtggaagtggcttccaaaggtgccacctyggtggcgattttcccatttccctttggattctccttggcacttcttacttcagactgcagtcactccccttccccagatctcagccgctcctcccaagcccttactgccccccacctccccgcttgctttcttctcatctcttcttactgaccttccttacctccatccacagggattctcgcaggagccacagctaacaaggcttctcataacaggacccgggccctgcaaagccacagctccccagagggcaaggaggaacctgaacccctatccccggagctggaatacattcccagaaagaggggcaagaaccccatgaaagctgtgggactggcctggtgagttttaaccacccctttgcccaccaacggggcgtggcttgtaggggagggcaggacttagaaacttctccaagtttcaggtggcgagctgaatccaaagttgtgggaacagaattgttgggttcgattggaatctcagaggggtggggcagtggaggtgggaaagtatgtggaattgagaagacagtgggtttactgtggagtaagctgagttgatctgattcagacttgggtccctggcctcatcctcccttttgggagcttggagtgagacccaagtttaagtaagtagttcgttgagatcatgtgagcttgtactagttgtatagtagtactcagaaggcgttatgaacattgtgattgggctctgactctgaccttaatacatattattgaccaatattaaagrgaaaggaggaagaaatcaacatttttttctgcatgtgaggtgtgccagtactttgccatgtaatgttttagtgtttgagataagtattacatccccatttcacagaggaaggaactgagactgagctaggattctcacctagtctgtgactccatgctctttcccccataccaaagtgcctcccaagcagtggttacttagcttaagaggggaaaactgggagggtaccttggccaagtctcagagagggaaagcgtcagggctgcctggaaaatcctgcacaggtgctgttgcaggaatgcagggctcgtgctgaggatcaggctctaggcgggaggaggaaagaggcaggcagagacccagccacactgggccttttgtgccatgtttggacttggccaggaagtgatggagttacggggttttaagcagggaagtgacaggatctgatttgtgtgggtccctccagcagccagcacagaggatgaatagactataagaggtattgcagcattcatgcaactgatgaagctagaatgactccccccagctcctctggctcaggcttggcccctccccaaaccccgtgcacatctccccacccgtagggccatcggcttcccttgtggtatcctcctcttcatcctmaccaagcgggaagtggacaaggaccgtgtgaagcagatgaaggctcggcagaacatgcggttgtccaacacgggcgagtatgagagccagaggttcagggcttcctcccagagtgccccgtcccctgatgttgggtctggggtgcagacctgaggagcgctgcgaccctcctaggctattgactgttaagtcctcaggtttggcccagattccagttcgtgcctytgaggtccaccagagggsgcatgaagcccaggctgtwgccaaaccctaccctgccccacaccaaggagccagccaaaggcaaataaagttattgagtgtttagtagaaaggaaccaggtctgggtttgtgagtcccttgggatgggaggggcagagggtggggctggttactcatgtgtgctccctctcacagagctcagtgttcccagctggatggtggggcaaacccagagacttaagtgcaaccagcctaggccccgggccctcgggaccaagccctcagagctgccggccaggagggtggggtcccgctcagccttgaaacaataaagagaatcaaagaaggtattcagggtgtggaggcaaaaaaaagcactgctctttactgagtccaaatgactcgactytgggcctcagtttcctcatttgttttgttttttgttttttgttttttgagacggagtctcgctctgttacccaggctggagtgcagtgttgtgatcgtcagctcactgcaacctccacctcctgggstcaagtgatcctcctacctcagcctcctgagtagctgggaccccaggtgagtgccmccatgcccagttactttttgtgtttttttttttttttggatttttttttacttatttatttttttttttttgagacagagtttcactcttgttgcccaggctggagtacaatggcatgatctcagctcactgcaacctccaccttctgggttcaagtgattctcctgcttcagcctccagagtagctgggattacaggcactcaccgccactcccagttaatttttttttttttgtacttttagtagagatggggtttcaccatgtttggtctggctggtctcaaactcctgacctcaggtgattcccccccaccgccctcggcctcccaaagtgctggagttacaggtgtgagccaccgcaccaggcccagtttcctcattttgtaagatgggactggagttgacatggactgaacctgcagtccatcccctcctccatctgcaaaactgtaggtatacatacagctctttgrggaagagagttagctctcatgagcttttggaaagggtccatggtgcagaaaaggtcaagcactacagccaagaggtctcttccatatccagtgatccagtgtgatagggttgagctctccctttccccacccaactcctgagccttcactagtctattgcatccgtccccggaaactgctgcagtaaagtgtatttgattaccttggaaaaggtgggacagcccaagccagaatgcagaaggaagaagtggatactttgggcagagccacacatactcctggagccatacagggttttaacttctagacataaaytttattacatttatagttgtatccctttgkgtgatatagttaggatttctctattaagtaattaatcctaactatatccttgggctgatttgatttctgcccccacccgacagactgacccttgtcccccttccccattccagctcaaggcacttaatattacaaagaaggcagtggctggctggagagatgggcctcaagtcagaaatcccccagtgcaacttaagacaaacagagagaagtcaccttcctcttaggaccctccctgggttagcagaaggaaagaacccagaagtcttcagtaccacagtaggcttcggtatctccctagccaggtgagggacccccaggcattctccctgcccgcacygagtctctcttcaccctggctacttcctggccacacgtatgactctgccccttactttctgctctgagctgcctgaatacaggaagcaagagttcactctgaccagagatccagaagcctgcaaggaggccccagcagctttcaagaatggggagcagatggccacatgtggcctgctctgtcttatagcgtcacaagccaggagcaagcccaggggagatgctgttccatgctggcctgtataggttactttgctcgttctattatctgtcccccatccctaacccagataaacaatacatatgtcactgaaacaagaagggattgaagcaaggagacccatgggcacagatctcttctaccttcctgagctaaaagatgccaagccaaaggaatacaggataatggcctatgtgtccaggaggccggggacaaagctctctggctttgctgggggaagaaatagctccaactacgtagtcaagaagcctgtgacagaggtgggaggggaacctcgtgaccttgaagtcacttctacctttcatattcccttctagctatcgaataggctcttttcatattcctcacaaccccagctgttaggaagaatgtggtgtcatacagtaggtggcggggagaagacacatcttcagcctagtccctgccaagcccaccaagagcaacagttagtccctagctcctccrtccccaccaagtacccacacatccatagccagagaggccacctgtctccaggacagaaaggaaactgggcatgttactcaaggggaaggaaaggggcctaaagcccagaccacagtcatagggcccagccctctagcttggaagggagagcccaggatcgggtgaaaatgggggcttgctccttaattgcgatcccccatcagctgcagcacaaaggtgaagatgtagatgatgtctgtgtaaatctgcagggcgccagtgatgtagtcctcsgggctgatggtgtgcttccggttccccaggaccagctgtgtgtcgtaagccaggaactgcaaggatagggaagccagaagtgagaactcaggcatcrgtgtccagagctcatttttggtcagcagatttgtcttgggggcctatgcgccacacagtgcttagggccacattaacgcacagcataacatatgggctctatactgtagctgctcacagtctaggaaaggaggcagacacaccgttctcaatatggctgactagtgttctaatagcaggcagcttgaacaagagatggcaagagtgcccacaaaaatcaatggaatctctggacagtrgtgagaggaatggcctgctatggccccattccctgcctcccaggcagtctaaattcatgcccccttccctagattcctcccctcatcccctcagctccccttcctagagtggggctgggacttaccagggtgaaacaaatggcccccagagcagcatagagcatgtggagccagtaaacctggagaagaaggggacagagaatggcattagaaacctcagcaaaccacaggcccacaggccccagcttcccccgggatagtggcatgagagtgggtagagctgggaagctagctctccatgaaaggctactgcctttccagatcttggaggaaattaagactggtgatatatccagcagagaaagcagaggccatcctgcaatggctgtataaaaccaatctccaaagccagtcaaggtacacaagtgtctactatacttctagaaaaaaagcagttgagttacagctctgaaaggggcagacccagcattcaatagaccagttcctacagcccagcctgggaggggtagactaaggaagaagggaggccccccaacccctctggtgagtatcaaaatccgggagcacccacaggacagcccacatgacatgcccacaggtggccgtccacagaaggacagagctggcccatgggcaggcagccctcgtgtccccatccttccccttcggcactgttctcccccagctgaacagaataaaggaaataattggatccagagacccccgcaaggtcccttccacctaggcccatcatctcagtcctctgggttcctctcccagtctgcctccgagaacctgattctcagctgccagscagattgaacccaccccttcccctaggagtgcagtgatgcagtccagggcttcaggtgctctggctccaaggccgcccatctccacayagagagtctaccctcacccagaaggatgctgcctccacgttggtgcctttgctagccagtcgagaggttctggaggtcagagcctgccccggggacctttggggcctgcgagaccatgctatataggaagtctgccctgagcactgggttccctgaccccagctctcctgggacactcacgtattggaagtagagcacaatgctagtgacaatcccagtcaccaggagcacaattcccaggacacagaagaggcctgtgcacgaggtgaagtccacctgccaggaagcaagaaagaggcacctgtcagatggctgtgacaaccagcccagtcagactggccctgccagggagtcccagtgctgcctcctagggggtatgggaatgtccacaacattctaaggacagaaacaggacacagttttgtaggtgcggatgaggagaaggggatcaggtctctagggaacatccctagtgtrccggggtccgggcctgataagaaaggggagtcggggggccagggaagggccctccatgccctcaccttggtctgaaagcagaagatggtgactgaaatggataccaccgcagtgatgatcattgcaatgatgacggctttggtttggtacatactggggagaagcaggagttacagacaagaggcattaagccacgtatgaatgacttcaaaatcaccacttccagaggggacctgcccagaatccacccacgcagctggctgccggcccaggaacaccccactccccacaatacacatttcccaagagtggtgctttatccctgaatgtacctggaaatggtgcccgtcatgaagcccatggcaaaagtctaagggaaggagagagacaagaatgaaacacttaaaaaggaaggaaggcagggtgctgggggagtggccatggtggcctctgccagagctggggaayrccaccaagttggaaagaggcagccacagaggagatcagaacaggcggcccagataaggtggaggagacagccaggacatccttctgaaatgggtccccatcycttccctgggagcagtctccctcacagcatctccacaccctcctgccacccttctagacttacaaaaagggtcagcagaatgatgttccatgggaaacggcgtctgaagggaaagagaagccttgattaaatgacttggggcccctcaggcgtcagaggctcctacagcagaaggaagygcttggctcctgtgcctggaggattaagccttgactccaaggagggaggttggcatggcctttggcacctgttcaggtgtggtacgcagggacaacatgggccaatgagacagacctgtgttgtggcgccagaaacacctggattggtttgcaactcttaaactgactgcctgtgtgatggggagaaagttactcagcctctttgagcctcgggttcttcctatttgttaactggctaaaatgctacctgtcttgcagggttactataagagtgacagctagttagctcctaaacacacatggtcctttgtatacacctgaacagtagctgtcatcgtcatcctcctcctcatttcttgtaagtttccattcagctgctataaaggaatccttctttccaaaatactcggcccccatcccaatccctgtcacccctctcactgtgttaagtctctrggactcacctgggtccctggcagcaggcaaggatcaggtaggtgacaacgaagacagcactagggacaaagagatggggaagcagttcaggcccaaayctgccccgcttggcagcacacaccaggccagtgatttggggcccaaatagccgtttggaagtctgaggggaagcaactcaacaggaagcaagaacgagattacccccagccagggtcactgagatgctctgaagcaccaggctccggccaggaaggaggtctggggaggctgcagctgacgggctgagaggacatgggggctgcagcgcagcgtgcacgccaccaccagcaggtcccactcttgctctcgagttctaggggtctgctactcatctgggcacgcacacccacaccctctggcacgggaaactggcaccaacttgggggccctctcaaaaagcattttgatcctgccctgagcaaagctggtcacctagaaacagaagctgccacccctgcctccctgcccaaccacagaggagcacacactcactaggacacgtagtagacagccacatttctcctcacaaaggcgctgacaggttccctgtggggcacaggaggacaggagtagtcaccctgaggcttgtctgccccacccaggccagccaggcagccctggcttcaccttctctaattgcccatggtcaccctgwgagcagggcccaccgccacccacacccccagcaggtgaccctgaacccccagggcagtaggagtgggtggcaaagcctagagacttacacaaaggtgaagatagcaatgatggccacagtgatgagcagctgcacggagatgatggagtaaacctggacacagacrgccgggcatgggtcaccatccggcacccctggcctgccccaggaagctgccagcccccartactttcctcccactcaagaaccctccctagctgcagcctggcccagaggcgaccccagtgagatgcctggctcagaggcwatgtgcacttcttcctcagccccrctcccatgctccctgccatctcccctcctgtccaacaccagcctcggtgactactgacttgccctgcctggccaccatactctaccagtatggcctctgcactcccagcagctcagtctgcacgctctatgcagctgtgagatggagagggtgggttacaagcgagtaggatcatttctggctccaagctgcctatagtctaaagggagaaagatgtctggggaaggcgggcgctgtggcagarcccacctaggagattctcccagactgaatgtgtcctcccaaaacatggtcaagaagagaggtgcaaaaagagggaaccctggggttagagaagccaggtgcccctctgagaagcagacaaggctagagaagacaggcagccagtgtatttcatggaattgatgccctggggctactgtggcctacccacttcccattcccacagcctgaggggccccaggtacacccacctcccagcgcgtatcttacctttcggataaaagtgtgtcgcactttccggtcatcccactctccaggcccgaagctatcactcacygctctctcctccccatcatagccatggcctgggcctagggacagatgacacttgactcagctggggacctgagacatgtggcgtcaatcccaaagcctccctgacaatctcaaagtctcagggatctccagccaaaagacaagtgttataacaggaactcttctcccaagctggggtcttctagacaccctcagagtgacccagagccggcctgtcacgagggggcttaggtgggaaacgttcctcacgtgcatctgtggagggctcctgtgtgcccagcccacgccactgggggttcactggggggtcacgatgtagtggggaagccaggcaggagcaggtatgggcatccactggggcagccagccagggcagaacaggggatggggacagagggtaggagaaaaggagggcggcagagcgcagtttgtgcagcagcagggatagaggtgaagacagggatctgcatcagcctcacagaggcaggtgtgcaaagggtgtgcgtgactgtgcaggacccatgcgcagatccgcaccagcgcacatgtccaggtgagagctggctgacacccctctggggttcagagatgctgcagggctgcaaacattccctgaatgcctgaatgcctgaatgcctctttgggaactacttttaaaatccacgcttgagccacccaggaagactcactgcactctaacttcacctcatttcctttttttttttttttttttttttgagatggagtttcggtcttgttgcccaagctggagtgcaaaggcgtgatctcggctcaccgcaacctccacctcccgggttcaagcaattctcctgccttagcctcctgagtagctgggattacagacgcatgccaccacgcccggctcattttttgtatttttggtagagacagggtttcaccatgttggccaggctggtctcaaactcgtgatccgcccatctcagcctcccaaagtgttgagattacaggcatgagccaccgtacccggcctctttttttgttttgttttgttttttgttttttttttgtttttttttggttttttttttgagacagagtcttgctctgttgctcaggctgaagtgcagtagtgcgatcctggctcactgcaacctccacctcctgggattgcaagcgattctcctgcctcagcctcctgagtagctgggattacaggtgcacgccaccacacccggctaagtttttgtatttttagtggagatggggttttgccatgttggccaggctggtctcgaattcctgacctcaggtgatctgctcgcctcagcctcccagagtgctgggattacaggcgtgagccaccgcggccggcctcacctcatttctgaccaaacacaagcatgtccctgccawgatgtttaccaaacttggctccaaatgtcttttgcaaaagtcagatttcactttaaaggatgaggaaagtggttcaggttcccaaaggagttcctaaggaagtcgacaggtctgggaggtggcagcagcttgttggccgcttgttgggaaacagagctggtgccctgaggtaacccctcaggagtcattacttggcccagccccattctcctgtggtgtgtacgttctgggacatgcctcatggatctccttgaacaaagggggcagcaagtggctgggggccagttgctgaggcaaaaagtggagggtaacaaagacagaaacagagggagagatctcaacagagaagatgagaaagggatttaagggaaactagaagagaaaaggggcaggaggcggtggcctcayctgctccaagtgctgtccctcccacccaccttccatctgcccttccaggactcaccgtagttcatgggcatcgggtgggtggggggcatgggctgtgggtagccagcagggtgaccgtagccaggctgcrggtagccagggtaggcaggataccctcctggcaggacagatggctgcccatagcccccagggggcrgagggcctgggtacagggggttgcggtcttcatatggtggtggggcgctggggttggacatggcygctcacgggctgasggggaaccccagctgctgggacctgaaatgggagaggagaaaagcaatcgtgaatgcccaggcccagctcactcagcctcatgggcccacttccagccttgtccargctgcctccgtggagaggaacaccacctattttctccttagagggcagcgtgtgatttgctgtccacaggccacctccccaccaactgggctcctgtccctcctgcctttgcgcctgcttcttgtccacaggcctctcactgtgcagctccccagccataggaaagcaggaggaaggattcgctgaggagagagggaaccagggagcctgggaactccctgttgtggtttaagaaaaccttccagttttggtggctkgatggcagaaccagcgaagaagccagatgggccaggcacagcctcctggcgactcacagggccagctgggaccctctgaaagggtcagctctgcccctgccacagctgacggggatgccaggcctggaagccagagctgggttggagccaaggctcaaagtggagagccgggggaagaagtggaggaaaacaagctagccccagtgccagagctgccaggccccgaggaggaagggatccagggacccgggggccagtggcaggctgagtcaggaagcctgagaagcaggagtgggtggtacaggggctgggggcagggaggctgtgccaaagggccagcttgagacaggactttctggttccttcaaataacagcggtggcgtgtcagaaaggcatgcggcagcctgcgaccacagctgctctctggccttgctagggaagagagagtgagtgcacggcccctcgccctcccccttacccccaccctggagggggagacagatgttctgaatcccaggctctctgtgagttctacctgtcttccaggtgcagtgctagcagggaggacaaagagctgaggagtcaggccacaaggtcaagggaatgccttccctgcagcaggaagagccccatagccaggggagggccaagaaaccagggggagggaaccccaaactggagttggaagggacctcagggccataagccccaaatgctcacttcagatgagagaatgcaggccctgaacagggaagtgattccccagaaccccagaactcgcaggtcagtggcataaccaggacggaggccttccagatcctgggtccaggtccttcatgttatgcggtgctcttatgcctcctctgccagttactgtcctctgggcctggtggtcccctctgaggtagcagagatgcaggcttaggaggagctaaggaagcccctagagggcccctgcatccccagtaaggacaagccctggcagtctgggctcgacagggccaccacctcttctagagcatctacagggggctttaggatccccaaggaggacacccccagatgcaggtcagcagacaccagaggctctcagaggctctgctggaagcaagagagaccagcatctctttttagggcacattgcatagttcggggatcaaataaaggactgtcttatctcttctcttttatgacaactgggataattcagagaggggaaggtggcagggagggttgaggagggggaattgaataaaagtccaggtctctaagtgggttattttgaggaaagctgttcttcatctccctagaggggctgggatagaaccagggcaagaatgtcaggtcagaaatacaaagctggcagggtgcggtaactcacgcctgtaatcccagcactttagaaggctgaagtgggcagatcatgaggtcaggagttcgagaccagcctggccaacatagtgaaaacctgctctactaaaaatgcaaaaattagccaggcatggtggcatgtacctgtagtcccagttactcaggaggccgaggcaggagaatcacttgaacctgggaggcagaggttgtggtgagctgagatcgcgccaccgtactccagcctgggcaacagagtgagactccatctcaaaaaaaaaaaaaaaaaaaaagcactggccggaaaggctctgtgggcagaaaccccaaccgtgatgtcaccatgacgtgtcccagcacctcctcagggtgcacctctgtgaaataaggtgggggcgacacgacctctaagcccactgccccctctaacaacagactatgattctgggaactcggctctgcagggcctgacctttgctcggccagagagctgcccctgctccctcctctgagccaagcagggcaaacagctaactttccagaccaaggggctgtggcagccaccgggtgaaaggtgcctcagagagaagggtcagcctcggatgggccacggggactccaaggttctggtgcagctcagcgggtgctgactcagagcttcactcctgcctctcttgcccctccctttcaggcttttggtttcagaagcatgtgctagtaggcctgcctgcactgcacacagcagtttccaggccagtccttcgggtacctcagccaccagcccatccacaccagaaactaccatgaccatttcaactcactatgcctcagtttcttcacctggaaaatgggtctcacactagtaatagtaccctccacggggttgctataaaaattaagtgagaaaatacacatagaaggctgggcacagtggctcacgcctgtaatctcaacactttgagaggccgaggcaggtggatcacctgagatcaggagttcgagaccagcctggccaaatggtgaaactccgtctctactaaaaatataaaaattagctgggcatggcagcaggcgcctagaatcccagttactcgggaggctgaggcaggagaatcgattcaacctgggaggcggagattccagtgagccacaatcgtgccactgcactccagcctgggtgacagagtgagactttgtctcgaagaaaataaaaaagaaaatacacataaagtgcttagaatgaaacccgacccctgatcaatggggataaaggttggttattttcattaaatccttacaacagtccagcaagttaatactgttattattattcccatttacaaatgaagagattgaggcacagaagaattaaatcacttggccaagataacctagctagagtgtgatgaagtcaaaatgagccccaagactgactcccaagcccctgctcttaatccctaacctgaaaacaccctgtctatccaaccttctcatcacttctgccatagcttccatctaaaaccctctcatgggttttagcctcaacaggaggctgacacaagtggaagccaaactactcaggccctccacaccaccacrgggctcacagcctggccaacggccccrggagaagagggtggcccaggcttggagatacataaaggtcagagctggaaagaaactcacccaaggacggccaacccctcactttaccaactagacagccacagcacaggaacctgtccttggttaccgagctggtcctggggacaggacgagatcctagctgtctacatagagagacctgggcacaggagaggaaaccccagcattaacgctagccaggggagttgctaaactcagccacactcacctctgagcagtgccaagaacactgtcagactggcaagagcctccggggaccagggctgccgggtttggcagctttagagcctgctcttgggcttctgcccagcctccatgagggccctggccacttccacatcagcaaggcctccactagggatgaggtttggggctggcatctgcctaggtagcagcaaagggggaaagggtcagtgtttactttcgtagctatgtctaagggtggaggctagagaagaatggagggtaagggaaggagggagaaggggagagagatcacgagactgacacagagtgaggactagaaatcagatctgggttctgccagcagctactagaggggctcacagtctgcagggactttaaggtccccactggaagcctgaattttcccaaaatacagtaggcattcaccttctgcttgtttttgtttttctttttgttttggtagaaacggggtttcaccatgttggccaggctggcaaactcctggcctcaagtgatccacccaccgaggcctcccaaagtgctgggattacaggcatgagccactgtgtctggcccaccttctgcttgaaggaactccagcaacatggagcaagccccttgtctgcagacagctcgattagaacattcttccttgcctcacaatgcctgttatcaaggcattcagactgtgccctatccttgcccattatagatctaagtttgctcctctctcmgggccccagtcccccattaggaaggaaccagagcccctgctttctaccacagcagcggcacaagtgggtgagctcagacagcaggacttgctgggtgtcaaggttttcagatgcagaggcggaagcacctcctcccctggagccctctcagtgtggtaatcctgctgtctgcctactgaggccccggctggggctctcctgggggtatttgaagggttaaggctccggaatctgcagaggaggcctgagctactggggttacagcaagaggagagtatgtgtactggagggagggatggaaaggagcagctgactggtccaggcagcctgccctcctccctgccagagacggatgcccagagtggaaaaaatagctcagaatgcacatctcaggaaaccccacccagcaggcgcaggagcacagcccagatctgacgatttgttcccctcccttttcctttatctgcccccacaagaaaacactttatcctcctaccccagggcacagctgacctcatagccacgagagcaaatgagtaaaaagatatacccaggagtgtctgggcaagtcaccaggcctgattctgcaccaagggggcccagaatcaactaaatatccttccatcagcctggactttgggactaagaggatgaagccacagggatctaaacactaaaatatcagagctggcttagactttggatctcacctggtcatttgacagacaaggaaaccccagagccaagaaagttcctgctccaccccagaacagccctcttcttcgtcatgggtttggaacttcccttcccagccccgcccactctctgagtgatagacaccagcacacaccctctcccaaggaggggccagaacaagctaccattctctcagttctctagtgacctctcagctcagaaacagttaagaccgggccgggtgcagtggctcatgcctgtaatcccagcactttgggaggccgaggcaggtggatcacgaggtcaggagatcaagaccatcgtggccaacatggtcaaaccccatgtctactaaaaaatacaaaaaattagctgggcgtgatatcccacacctgaagtcccagctactcgggaggctgaggcagggggatcgctcgaacccgagaggcagaggttgcagtgagccaagaacatgccattgcactccagcctgggcaacaagagtgaaaccccatctcaaaaaaaaagacagccagccctcgacttctggcccccaactcgaggccacccctcccagccccctctctagccagggtggcctctctctggacccatggagaccgaggggtggctccaagctcccaggagggagaggctgtcctggggatcacgagaggacccaggcaccgcagctccgccacccttgtctggagcagaatcctgtgatcagaatggtaatctcgggttaccccacccaagtcaggatggcctgggagtacagataagggaagaggaagccattagcaggctgatgctataatacttctgagcacagtccctgttcacttccttctttgtttcatctcctgtcttttcattgaacttcaagattaggaggggaaagagacagacaaaggagactgataactaaccccaaaaaagaactagggaaggggccaggcatggcggctcacgcctgtaatcccagcactttgggaggccaaggcgggcggatcacgagktcaggagatcgagaccatcctggctaacatggtgaaaccccatctctactaaaaaatacaaaaaattagctggatgtggtggcggacgcctgtagtcccagctactcgggaggctgaggcagaagaatggcatgaacccgggaggcggagcttgcagtgagtcaaaatggcgccactgcactccagcctgggcaacagagggagactctgtctcaaaaaataaataaataaaataactagggaaggaagggaaccacttagagtagttgaaccacttccagtacttactatataactaaggaagtacaggttgaatatccctcatttccaaaatccaaaatgctccacaatctaaaacattttgagcaccaagatgacactcaaaggaatgctcactggagcatttctgatttcggattttcagattagggacgctcaaccagtaagtataatatacatagccccaaatccgaaaaaatccaaaatccatgtgcttctgccactgtagatgtctgcccccatggctatcgtgactatatgctcgagtaggagagtaaagtgttttcttgggggtggaagggagttggggtgggtaaaagaaaagggagggaaggaaattgtcaaaatggtcccattttggataagagacactcaacctatagtaactaaggcacatctgatccttgcaacagtgctgtgaggtattcttaccctcatcccactctatagatgagataactgaaattcagaaaaaaagagatctagggtcccacagcaggcaaacagcagagatgagtttaagcatagatctcacacctgatttaaaattcagcctctttgcttttatatcaggcaggagtagaagcccctgaggcatctgtagcacgcacctgcgtgaataggcagcaccagggtggggccaaggcagtaaagatcaaaacgatagatagaaaggagctgagcaagctgttgttgctaccattatttctttcccctgcggaaagttgatctgaagcctgggtcctgggctaggaggtggggaccygagttcttgtcctggctttgggactcactccactgtgagagccacatctctagacccagttttaacatcagtaagacaattcccctcaaatgaaagaatggccaggcgcggtggctcatgcctgtaatcccagcactttgggaggccgagccaggcggatcacttgaggtcaggtgttcgagaccagcctggccaacatggtgaaacctcgtctctactaaaaatacaaaaattagccgggcatggtggcacatgcctataatcccagcttctcgggaggctgaggcaggagaatcacttgaacccaggagatgtaggttgcagtgagccgagaccatgccactgcactccagcctgggcgacagaaaaaaaaaaaaaaaaaaaaaactgaaagatcaaagtccactctgccagtttctgattctgaatgaacagcctaacaggaggcttcagggcagaatggcatggctccccaagaacctacaccagggggtcactactgatgtgcaactgtttccaaggacatcttcagaggcagaagtacatggcatgttctcagtatggggctgtccacaccctcccaaactgtccccataatgctgtctggaccctacggccagctcttcctgggtgatcagttacgcccgagctaaacagtatataacactctaggaaagaaagagtaggaggcaggaagtccactgacctgggttcatgaactagctgcaggaatccaggcaaatgacctcccctggcctccttttatccctaaatcagcccacgtgggggaaaggagtarggacttgtttatgggagccacagtggagaaacagaatcacctagccaggcatttcccagactgttytaaagaacacrccccaggagacgttaatgaatgagtgctggaaacagatgactcttgagaaacaatccacacccccttcttggaaattcacaatggcatattctgcccctgagaagtcctgcagtaagcaaccctgttcagctttgtttaacccagtgttccttcaaactcccttaagcctgagccacttttatcgaggcaaacctattaacaccctgtgggatgctgacccaggccacctttgtattacagacacccaaccctgagaatcattcatatcctaactcctcgtctcttataacctctgtgcgtacacccagctgcccctcagagcagtcacatgaagtactagacatgccctctcactctcagggggtcagcccagtgccaggatctctggcgagggtcctccccttcccccattccacacagctgctatcccaccgtgggatttactgccaagggccgggggacatatccagctaccacagaaccaggaaacgggcacccctaacctcacctctgtgcaacggggcaaagcacaaatcattacagacaaaagtgggagctcattaatatctcccttcccaccaatggaggtacctgccactgtagcctgtcgacttctggatatcatttctacttcaaaacaagacccaggttttggcctagaatcccagaatcttagggttggaagattctgtcaaggtcatcccttccactgtgtccccaacagaataggtccagaaggcccatgtcatgatcagacatgttgttagcagaacttcttcccagagaattgtatgagcttccactctctggtcgtcccagttcagccctctgaaaacacacaagtatgtgtgtttcccttctctgtggcttctgctttttctgaaaggcccagggtgaggcctgcggttggaggtgctctgaggtagacagcgtctggctgaggcacccattcccaggggaggaggctgagcccaggtggctattaccccagctcatgacatgaggctctcccaacacttacaggataacccatcattacctctctgawgkgctcatttttacaagtgaggccttgaggtcatagcacagaaagacagggcccctgacactgtggtcctgcctcttccatttaagctataaactggttctctggatcctcatgactggagagacagagagaggaggcaggtgagaaggaagtatggctccccctttgcgccaataaagcagccccaggaggcacctggctcccctgccaccactggccagcccaaagtcgccagcttggaaaccaaagctcactaatgagatgaatatttcagagcccagagaactggacacctgagggcccttccatgacatctggctctgacctgcgttcccaggcctacttatcccatgtccagggtgctcaggtagaaccccaaactcctgggtaccacgtagaggccacagaggagggagaggagatggagaccccataggacaagaattggtgccgaccccacaaggccagggcctggcctcccagcagcctccctctgcttcctcccactggtccctggctcctgccccagtctctccacttgctttcccttttcccgtttctctgttttgttttcactctaacccaaagaagtcacgaggaggatgttactcccctgtagttctgtgaacccagccgggaaacagtggctggaagtgggactggcagagggcaaagtcatggtgatagaggtggccacttccccatgccaaacacttgagctgctcattggcttctgccccagctgcaagctaggacccccccttccccaccccttaaatattcacctgtctacaccgagactggcctcagcgcgtgtgggggcaacctggggtccgtgccaggccctggctgtctcccctccctcttccctcttctcaccagctgagggccatgaaagccctcatcccacacagctggccactcgggctggcatggtggataggccctgcgacagagaggccactcgtgcccgaaagagggaacacgaggacacccccagaccctggctccgctcaccagtgcccacaacacgctgctgggctcccaaggctaaccaggtgccacagacccrgccgcccacccgcgcgcccagggagagcgaaacgccaagggccaggaggggagatccccatctggaacgggctccttgggcccaggagcgggcaagccgggagcgcgctccgaaaagtttaggcgccccggcgcatggccgccccagccctggaccagtccccaccgcccacagtccccaacggcgccggccccggccccctggcttgcctgcgccgttccagacggagcgttcctggcctcggagtgttgcaagtcctccggggccgggcagggctaggctcggctggggctccgcgccccgccccgtcgcgccggcctcgtggggcggggcctcagggcgccgccagggggcgcaggggtctgtcccgggcgcgcgcgcctctcagagccccgacgacgcctcactaataacacaggggtattttcggatttaaaggcaatacatgatactgataggaagctagaaaagacacagaaatgcagggaagaaagtaatttctctccacccctcctagttcccagggggaagcgttcgctttgggtccttctttggctattacatttctgtatgtattttgtttttctacagtggggtatattgtatggtgttttgtttactgcccttctttttactgttttatgatgaacatttttcttctcactaaatagtcttcaaaagcacaatcttaatgccgtgaagtattccattgyatggctatgcggattaaattaatttcctactggaggccgtttgtttcccatttttacattacaaataaatcagtaattaaaatccttgataattctgtgtttttgagataaatgcacttttcgagtttaaaactgcaaacatgcaaacctagaatctctgtttataattactcaaccaggaaagcaggtgctttcctcaagtcagaattcagaagtcctacattgagatgtagattactactgttaggtaggtcttaaccctcatctcagtgaagaatgcagtagcaaaggaggaaacagttttgaggaagttctgaaatattactggagcctgggcatggtgactcacacctgcgatcctagcacttttgggaggccaaggccagaggatggcttgagcccaggagttggagacccagcctaggcaacatagagagaccttgtctcaatttaaaaagagaaacattaccgagccttgcctgagtttctgtggttccaaagtccaagttctttccatgacaccaaggctgccagtagttgaccaactctgtttaaagtgcttatctcatgttaatagctataggtcagcaccacaccaccactgaatgtccttttttttttttttttttttttccagacagggtctcgctctgtcacccaggctggagtgcagtggcgccatctcggctcactgcatcctcctcctggtttcaagtgattctccggcctcagcctcctgagtagctgggattacaagtgtgtgccactacacccagctaattttgtttgtttgcttgtttgttttgtttggtttgtttgttttgtagagatgggttttcacgttgttgcataggctggtctcaaacccctgagctcaaagcagtcagcccactttggcctcccaaagtgctaggattacagacatgagccaccacgtccagccccaaaacagagatttaaaaaaaaaaaaaaaaaaaaaagacagatttttaaaaactgccccccatacacacactatgtatgtttatttctgtaaatatagtttaagtaggagttacttagggggactagtggccgttatggtgggctagctccccagacaccccaacccttcagtgtacttccagttcctacaggccaagaacctcattttaggaagtccccacccaaggtgtgatctcaccagagcaagtacagttctgctcagtgtctgtctcccccttgctcaaggagtagcgccctaggtgaaatgcatggcccatggaatctgtccagatccctgacattttttcatgctctctacacttgtgctgtcttagtccatctgggctgctacaacaaaaataccttagagtgggtaatttagaaacagcagaaatgtattgctcacagttctggagggtgggaaacgcaacatcaaggcaccagcaggttaggtgtctgatgaaggctccctctgcttcacagatatcgtctgagtcctcatatggccaaggaaggaacaaacagacaccgcccccccaccagccttccttttttttgagatggaatctcactctgtgcaatggcacaattgcagctcactgcagccttgacctcccatgtacaagcaatccttccaactcagcctcctgagtagctgggactacacacatgcaccaccacacctggctaatttttgtattttttgtagagacagggtctcactatgttgcccacgctggtcttgaactcctgggctcaagcaatttgccctcctccacctcccaaagtgctgggattataggcgtgagccactgcacctggccaccagcttcttttctaagagcatgaaytccattccagagggttccgccttcatgacctaatcacttcctaaaggcctcaccttttaatactataacattgaggattaagtttcaacaaatgaatggagtggggacaacaacattcccaccatagcaggccccttctccagaaaacaccctccactttctagaaccaccaggatggttaatatccaaggagattccatttccaaccagcaatcaccagcgactcacatctgcccgactggrggagtgggacatggggcacacgaggcaagcccacacaagccttgctgcgtgctttttctccagagccctttttctgactatagggtcaaaaataacacctgaagcgcctggcccagagcagcagtgcttcgctggcaataggcattcgataaatgatgtttttttctcttgggccttatctgcaaaattattaagtaagcttttattgtctgccaaccagacaggaatttccggttctagaaatgagaaggctgaaagaacacagcccctgctctcaagaaactcacagtctaagggagccagtaaaatgacagattattacaatgttgacagtttgacaagtgctggcagataaagaaatattcacttggttcctccagatcccagagaaagctcctaacccagtgtggggaatggggtgggggttcgggaaaggagttcagaggaggtgacacctgagtagagtgttaggaggtgttaggaaccagcctattcggaggaggggagaaggttctccaggcagagggcaagggacttagggccagttgccccagcaagctaggatggggggtggagggtgcagtggggtagaaggggtaggaaatagggctggccaaggaggcagggggccagaaattgagattttaccctgaaagcaatggggagccagaaaataaccacctagagggagtttgggagggttggggaggctctggtggtgcccctggggtagggttccagctttagcaaataaagatgcaaggcaaccagtttgagcttcagataaacaacaaacctttttttttttttttttcaagacaaggtctggctctgcactcccaggctggagtacagtagtgcgatcttggctcgcggcaacctccacctcccaggctcaagccatcctcccacctcagcctctcaagtagctgggactacagacatgagcaccaccacgcccggctaatttttgtattttctgtggagacagggttttgccatgttgcccaggctggtcttgaactcatgagctcaagcaatccatccgcctcaccctcccaaagtgctgggactacaggcatgagccgctgcgcccggccaaacaatattttttcatataagcatatcccactgccccatataatatttggaaatacttgtactaaaaaaaagtactcattgcttatctgaaattcacatttaactggttggttgtatttttccagcaacactacctaggaggaaagtggagtcaagtccatggctgcaggaagaggggtggaggagtgaaagggattagactgatgtttattttaggactggatgttattttaggtattttaggactagctaaagcttagtgattggtgggagggggtggtggcagcctggaaggggtgggcccaggtggaacctgaaggacatgggcaggaaaaacttaattggagcggtggatccagagaactttctctgttgccaccctccagcccagccccaggactccactaattggtcctccaaacccttctcatagctgcctggttacctagcatttaatgtgttactctacccatgcattgatcactaactttctgaaagaagttgccttttttctgtttttctttttctttctttctttctttctttttgagatggagtctcactctgtcaccacggctggggtgcagtagcatgatctcggctccctgcaacctccgcctcctgggttcaagcgattctcctgcttggcctcctgagtagctgagattacaggcgcccaccacaatgcccagctaatttttgtatttttagtagaaacagggttttgccacgttggccaggctggtcttgaactcctggcctcaggtcatccacctgccttggcctcccaaagtgctgggattacaggcaagagctaccgcgccgcccgaagttgcttgttttcagaggacgtatttactgaattgaggcattgaacccagcctgaggtgaaagtgcctgtttctccccactggagggcagagacaatgtctcattcacccctaggcctgggcacggccctgacccagcatctgttgaattgaatgccaatgttccaaagtgggatggagggagcctctcaggcttgaatgatagatgtgtgggggatagataaggtaggggtggggtatgggggctcctcccccttaaaattggccttattattcataaacattatttaacactttcctaaggaaatagagagtggaaagaatggtggatttggatgtctcagaagtgaagttttgttccagctttggcactaaaggactgtgaggccgggggcccatctctctacttagaaatcacactgtggctggtcacagtggttcatgcctgtaatcccagcactgtgggaggtcagggggtggatcacctgaggtcaggagttagagaccggcctggctaacatatagtgaaaccccatctctactaaaaatacaaacaattagccaagtgtggtggcgcatgcctgtagtcccagctacaccggaggctgaggcaggagaatcgcttgaacctgggagacagaggttgcagtgagccgagatcatgccactgctctccagcctgggcaacagaaaaagactccgtctcaaaaaaaaaaaaaaaaaaaaaaagagagaagaaaagaaatcacagtggctcacgcttgtaatcccagcactttgagaggccgaggcgggcagatcacaaggtcaggagatcgagaccatcctggctaacatagtgaaaccccgtctctactaaaaatagaaaaattagctggacgtgatggcaggcgcctgtggtcccagctactcaggaggctgaggcaggagaatggcatgaacccgggaggcggagcttgcagtgagccgagatcacgccactgcactccagcctgggcaacagagggagactccatctcmaaaaaaaaaaaaaagagagagagaaatcatactgcatttctctacctcctgtgacttctggcgccttcctcagttgaggtcatctaggtgaaaggcagtgagaaaggcacatggyggatgttgatggtgactgaaactgctgtaactggaagtgggtggcaccatgaggaagccaggccacggaaccagcctggcatccaccatgctgcaggcagggccagcgaaatgctttccattcttccctgaccctcagagtcacctgagctgcttgtgaaaacatgcacgttcccttggggatacttctttccagacctgtgaatcagaatcttcagtggaagcataaacaaacgctccccaggtgaatcgccagccacaccagcaagctttggtgatagacagtcctgggtttgaatccaagttcaaatgtctttggtggctttgtgaccttaggcatattacttaactgctgtgagccttggcaccttatctataaaaagggtggtaataatatagggtagttgtaagaatgaaaaatagcagttgtcaaatgcttggggcagagttaaaatgttcattgttattgttgtttgtgagatagaagcccagtgattctcccagtgatgaacacaacctcctttcacactaagcagggcctggagggatgaacttgcccgagctgggagctcagcagggccaggctccagctgtgcccttacaccctgccctctcgccatggacctctgccacctctgccagccagaataccgggggattctcagctttcaagcccctctcctcgtccatcttgggcttcattctcccactctcttgccccccacctaggaagctcctcctcatagatacttgcttttgtctaaacaactctactccccaagaaaagccaacagcgatttcctcttattcccaaccyacgatattagctgcctgagaacctctccttaccaataactgcaccccctccataatctcaatttcaggcaccccacactctgaccaccatctatttttccagctctgtgaccgtgatttgacaattctgtgaccatatcaggatcaacaatctattcatcttaccacctgttcctttattttatttatttattttattttattttatttatttattttgagactgagtttcgcttttgtcacccagcctagagtgcaatggcagtgcaatggcgcgatcttggctcactgcaacctccgcgtccgaggtttaaacgattctcctgcctcagtctcctgagtagctaggattacaggcaccygccaccaggcccagctaatttttgtatttttagtagagatgaggtttcaccacgttggccaggctggtctcgaactcctgacctcaggtgatccacctgcctcagcctcccagagtgctgggattacaggcgtgagccaccgcacccgacctatttgtttattcatttatttttgagacagggtttcgctctcacccaggctggagtgcagcgaagcagtcatggctctctgcagcctcagccccctgggctcaagccatcctcccacctcagcctcccaagtagctgggaccacaggcacacaccactgcacctggctaatttttgtaatttttttttttttttgagacagagttttgctcttgttgcccagtctggagtgcaatggtgccatgatctcagctcactacaacctccacctcccagtttcaagtgattctcctgcctcagcctcccaagtagctgggattacaggcacgtaccaccacgccaggctaattttgtatttttagtagagatggggtttctccatgttggtcaggctggtctcgaactcctgacctcaggtgatccgcccgcctcagcctcccaaagtgctgggattacaggcgtgagccaccgcgcccggctaatttttgtaattttttgtaaagatggggtctccatatgttgcctaggctggtctcaaactcctgggctcaagtgatccacctacctcagcctcccaatgtgctgggattactggagtgagccaccgcgcctgaccaccacctctttcttatctctcacatcctcactttcctccttgaccagcttggattccaatattataattactcctttgcatgcagcctcaactctaccttatggttctcagcagcaaaatctcaactctgcacccacatagccaaaagtgagggtaaaaacatgcaacggtcctgactgatctcgctttaagttcatgcacactaacttgtccattcatactaacacacccatcctaggcaattactccacactttctacagtcccttctgaactcccacacctcctctgcagcctcactctcagcctcgactttgcttcctatgtctctgagcaagcaatcagagaattgctgcctatatcaccacttggatgtctaataggtgactgcttctcaaactttaatgtgcaaatagatcgcttggggttcatgttaaaatgcagattctgcttcagtaggttgagagtctacatttttttcttttcttttcttttcttttttttttttgagatggagtctcgctctgttgcccaggctggagtgcagtggtgcgatctcagctcactgcaacctccgtctcctgggttcaagagattctcctgcctcagcctcccaggtagctgggattacaggcatgccccaccacgcccagccaattttgtatttttagtagagatgtgttttcaccatgttggtcaggctggtctcgaactcctgacctcaagtgatccacccacctctgcctcccaaagtgctgggattacaggcatgcaccaccacgcctggccataggtgaatttttaatgggatttttaaatactaagtcttcaaaatctggtatgtatttgacacagcatatctcaattaggatgttactttttcatcagaaatataggatctgtatttagatcaaatctgaaaagtgtttgtaaaatgtacatacttgagtgttttccaataactgaaataagcatcaaggtttattttattattgttttatttttagagtaaaatgaaagcaagtttattaagaaagtagaggaataaagaatggctactccatagacagagcagccaatgtttagatttaagtttaaatgaattaaaattacataaaattaaaaattcagttttatagttgcactaaccacattttatgtgctcagtggcaagtggctagtggctaccatatgaaacagcacagatctatagcgctggtcattgacttaagggggaattctgggggtcagggtctagatcgtaattcatcttggccagatgcctagcccagggcctgcactcagtactttctgctgcgttccatttacttttaacaagtcaaaaactgacatctaggaagcggttggaacaagccacaatcagttcccagacatgaccactagggggcagagtctgactagcactgtttggctagaaaaagggagccttggccgacgcaatggctcacacctgtaattctgcattttagccaggcccaggcagaagcatggcttgagcccaggagttcgaaaccagcctgtgcaacatagtgagacccatctctttaaaaaaattaaaacattagctgggcatggttgtgcgtgcctgtagtcccagctacttggaaggatgaggtgggaggttggcttgaccccaggagggtcagggctgcagtgagctgtgattatgccactccagcctgggcaacagcctgagctaccatctgtctcaaacaaacaaacaaaaacgggagaaaagaaaggggccaggactcaaccccaataccattaagatttatttaacaagcatttatgaggggccaactgtgtgccagacctgtggggatacagaagtaaataaaatacagcccccgctttcttggagtttacagtccagtagggaaggcaggacagatattagcaactcatctcataagcaaaggtatctttacaaactgtaatacatgcacttaaggaaagctgactcagtgccctaaaagagtggcacccaaggcagggagctgtggctcacgcctgtaatcccagcactttgggaggccgaggcaggcagatcaccaggtcaggagatcgagaccatcctggctaacacggtgaaacctgtctctactaaaaatacaaaaaattagccaggcatggtggtgcgcacatgtagtcccagctactcgggaggctgaggcaggagaatcacttgaacccaggaggcagaggttgcagtgagctgagatagcgccactgcactccagcctgagcaacagagtgagactgcatctcaaaaaacaaaaacaaaagagtggcacccaggcacctcttatgttggcagaaggtggcatgaaagagtagctacagaggggatgggccgtggggggtggtggacaatggtgctgtgacccttctaagcagaaggatcaagctatgtgaaggtgtggagacacccctgaagctgaaagagcttggcatgttccagaaacttccaggagagtggtgtggctggagagtggtgggcactggggcatggcccaagaggagactggggaggtggcaggggccaggtctacagagtctcagggcctctttaaggacttcaaatttcagcctaaagatatcaatgaaaacattcaaactctgtaaaatatttgaagaaatttattctgaaccaaatatgagcgactatggcccttgacacagccctcaggagaccctgagaacacgtggcccaaggtagtcagggcrgggggacaggggcgcagaatgtgtgtgtgtgttgaagggagcttccaggttataggtagatttaaaaattttctgattggcaattgattaaaagagttacctaaaggcctggaggttttttttctgtttgttcgtttgtttgtttgtttgttttatggagtctcactctgttccccaggctggagtgcagttgtgccatcttagctcactgcaacttctgcctgccaggttcaagtgattcttctgcctcagcctcccaagtagctgggattacaggtgcccaccaccatgcccagctaatttgtttgtatttttagtagagacaggttttcaccatgttggccaggatggtcttgaactcctggcctcagtgatctgcccaccttggcctcccaaaagtgtaatccttgggattacaggtgtgagccaccagcccagccctgaaccagtctttcaggttaactttggaatgccctggcagaggagggagtccattcagatggctgaggtgagggggcattgaattttatttttggtttacaaaggaagccattgagtgattttgagcagggctgggacatgggacatgatctgggtggtattttaggagaatcaccctggctctgagcggtgaatgggttgagggaatggagcccgagagcaggaaggccttgaggagccaccttggctacaagatgaaaggtggtggcaccagcccccaccctgaggtgtcaataccccacgacccccatcccagacctgcacttctttttttttttttttttttttgagcagagtcttgctctgttgcccaggctggaatgcagtggcatgatctcggctcactgcaacctctgcctcctgggttcaagcgattctctgcctcagcctcctgagtagctrggattacaggtgcccaccaccatgcccagctaatttttgtatttttagtagagatggggtttcaccatcttggccaggctagtcttgaactcctgacctcatgatccacctgcctcagcctcccaaagtgctgggattacaggtgtgagccaccrcgcccggccagacccgcacttctttggtttcatttggctggtttccgtttgctctccacatccccctccgtcttctccaccctgcttggagctggtcctatggacacctcagtgggctcttggtcctccagctgcagctgagtttggcagtggagctctccaggaggagatggcagcrgaggtggagggtttgtctccttctccctccctcaaggctcaccccagactggcttatccctcaaccagtggtcacagcccctatcagttgggcctgtccacacagctctgtctttgttttttgtttttgagacagagtttcgctcttgttgcccaggctggagtgcagtggcgtggtctcagctcactgcaacctcccagttcaagcgattctcctgcctcagcctcccaagtagctgggattacagatgcctgccaccatgcctgattttttgtatttttagtagagacagggtttcaccatgttgaccaggctggtctggaactcctaacctcaggtcatccacccgcctcggcctcccaaagtgctgggattacaggcatgagccaccgcacccaacctgtctttatgttttataacagctcccttcctgacccttcaggcccaggggtggcgacagtgtcactagcctggagaactgtttccagcacctgccggtagccttgcagagcactaaaacttaacttctctcaagctctcctcagctttcccagtttgcctgtgtcatctgtttcccagcagacactgacacatgttttctacccaggctggttacagaggatcagtggaaagagcatggaattgggggtcaaataaaaccataattgaatttgggttttgtcgcctgtgatggtatgagtcattattctmtccaagccttcgtttgttcatctctaaagtggggcgactggccgggcacagtggctcatgcctgtaatcccagcactttgggaggctgaggtgggtggatcacttgaggtcaggagttcgagaccagcctggccaacatggtgaaaccccatcttggtgaaacacaaaaattagccaggcgtggtggcgggcacctgtagtcccagctactcgggaggctaaggcaggagaatcacttgaacctgggaggtagaggttgcagtgagctgagatcgcgccactgcactccagcctgggtgacagagcaagactccatctcaaaaataaataaataaataaagtggggcgaccatcaccttccttatagagtcgtgacaatgaaatcccacgtgcaagggctgtgcgcaggccttgtgctcagtagacagtctacactcggttgttctgttcttccttcccacacaacagaacaaacatttatcacactgcatgcatcaagcccagtgcaaggtgctggggatgagggagagacaaacaagtggaggccgccattttttgcctacagggagagctcagtcttgtttttgcctgttagtttgtatgtttgtttgtttctgagacagggtcttactctgtcactcaggctggagtgcagtggcaaaatcatagttcactgcagcatcaacctctgacctcaagcaatcgtcttgcctcagccactcaagtaactgggaccacaggtgcatgccatgtctggctwtttttttttttaattttttgtagaggtggggtctcactgtgttgcccaggctggtcttgaatttctagacaattttccgatccatcatcccgccttggccttccaaagtgctgggattacatgcatgagccaccacccccagcccagaggtcagagtcttgtaaagaaaaggctatggctcctctgggtgtgcccccttccgcccccaccatagccaaaccattcrtttctgtttggctgtgagatgacattttttccagggtctggagttagagtagtgaccaggcartgcaaataattgtggtaatcagaaaagccttcgaagaggaggttgaatttatttttagccttaaagaaactggactaaaaggaaaggcattatcagcctccttgagaactgaactcattctcctccctcctctgttgagagctgccagactccctagattgagaattggaccttcattagttatggttactcctggaagggtatcacatccccgggggcatggtagggctggaaggtacctggtatcttgaggaagctgcctaaaaggatttctccaggtggcatggggcagaaatctaggatagtgatcagggcaggctggcagacgggacacatgtggaggggagcagcaggaacgccacacactagagaactgggctgagaccatgtcgctaaaacaagggatgcaaatttgattgtgtagacactggctttgagcagggggagcccctgcttgaaactgatggctaggggctgcaggtgcctgcaatgggccaggcatgaggacccaagggcctgatttgggatgatgcaatgggaaatggaggcaaaggtcacaccctcttatcatttcagtcataaaatatttacttgagcacccaccaggacagatgctgatgttgcaagaatgagatcaataatatcaaggaacatgtgtggagtacytgaaacggcccaggcaaggtgtcctttctctgggtaatcacggttaatcctccgagtagctccatgcaaattaccagtccctcgtggagagaaagagaatgaggtttgagtagattaagaacattgccccaaggtgcagagttcctartggagccagggttctaagctggtcattccaagtctagcacacaacccccaaacccgattccactccctccccgacagttcaccctccttacccacaaggcacttgaagtgttatggggcagcrccaggaattactgcacagcctaaggaccatcacagagacatgtgtgcaatgaagtgtgcaagtcattacctaggcctaagagatgccctcacccaggagctaggtgtcgggattggtttgtttggtcatctgacaaacacagatgcttcctaacttatagagtggttacatcccaataaactcatcctaaattgaaaatatcctaagtggaaaatgcattaaatacacctaaacctaccaaacatcatagcctagcctagcctgccttaaacatgcacaaaacaatgacattcgtttacagttgggcaaaatcatctggaaacacagatgatgccgttggccaagttggcrgacctgaaggagagggttggggtcacatgaggatgaggaggtagctttggacaaatcaagttaaagatcccgtgtggcagcagtccccagcatttttggcaccagggaccagtttcatggaaggcagtttttccagggactgggggaggcaatggggttaggggggttcgggatgattcaagcgcattacatttattgtgcactagatttctattattattacattgtaatatataataaaataatcatacaactcaccataaggtacaatcaatgggaaccctgagcttgttttccagcagctggatggtcccatctgggattgatgggagacagtgacagatcatcaggcattagattctcataaggagcatgtaacctacatccctcacatgcgcagttcacaatagggtgcgagctcctatgagaatctaatgctgctgctgatctgacaggaggtggagctcagagggtaatgcaagcaatgtggagcagctgtaaatacaggtaaagctttgcctgtcctgctgtgtggcctggctcctaacagaccaaggaccagtatagggttggagggaagcggttggggacccctaccrtggggcatccaagggaggctcttgtggacatttctcctttgaagtaatgagtatacaggtggtagcctgtaagtggtgaatttagagctagcagaaggggagcttgtcagagaggggagaggagagccagagagactgtggcagggaaggcagaggaaaaaggcatgctccattgtcatagctgccacccagaggttcagygataagggctgaacaatgacaaatgggtttgaccttcaaggggacagcgccaaattaggatggagcagtacaggcaggggcccagttgagtggcctgagaatggacgtgaagtgaaaggtagagacagcagagaggactactttctttgttttaataaaataataattttaaaaattaaaatactaatatgttttcattatagaagatcagaaaatattttaaaagcacaaaaaaataataaacaaatggtaccccatgagtcaatcaaccaaagattatgactggaagcattttagattttttttttttttttttgagacagagtctcactgcacatcactcagatgtgcagtggtgccatctcggctcactgtaacctctgcctctcagattcaagtggttttcctgcctcagcctcctgagtagctgggatgattcaggcacccgccactacacccaactaatttttgtatttttagtagagacggggtttcaccatattggccaggctgttctcaaactcctaagcttgtgatctgcccgcctcagcctcccaaagtgctgggattacaggcacgagccaccgtgcccagccttagattttttttaatccatttttgtttacagaggtacaatcgtatcagttattcaaaatttacccagttttgtgtcctatttttttctccactactttctttctttctttttttttyttagacgagtattgctctatcacccaggctggagtgcaatagcataatctcggctcaccgcaacctccacctcccgggttcaagcgattctcctgcctcagccacctgagtagctgggattacaggagctgccaccacccctcagctaatttttgtatttttagtagacagggtttcaccatgttggccaggctggtctcaaactcctgacctgaggggatctgcctgcctcaacctcccaaagtgctgggattacaggagtgagccaccgtgcccagcctcctccacttctttccttcctttctctttttctctctttctctctctctttctctctttctccttccttccttccttcctctttctgagacagagtacagtggcgcagtcatgtctcactgcaatcttgacctccaggatcaagagatcattcaagatcagcctgggcaacatagtgagaccctgtctctatttaaataaaaataaaataaaataagagatcctcccaccacggcctcccaagtagctgggactacaggcacccactaccacgttcagctaattgtcatatttttcgtagaaatggggtttcacagccgggtgtggtggccaagaccagcctggccaacatgatgaaacctgtttttattaaaaatacaaaaaaattagccgggcgtggtggtgcatgcctgtagtcccagctactagagaggctgaggcaggagaattgcttgaacccaggagccagaggttgcagtgagccaagattgtgtcactgcactccagcctgggcaacagagagactccgcctcaaaaaaaaaaaaaaaaaaaaaggaaagaaaaggagaaagaaaaaagaaatggggtttcgctatgttggccaggttggtctggaactcctgacctcaagtgatctgcccccttggcctcccagagttacaggcatggccaccacacccagcctccagtttatgggaaaatataaaatttacccaaagtactagtttggatgctcttggctgcaggtgtcagaaaacccaactgaggccaggcacagtggctcagcctctaatcccagcactttgggaggccgaggtgggaggatcatttgacgtcaggagtttgagatcagcctggccaacatggtgagaccccatctctactaaaaatacaaaaaaaattagccgagcgtggtggtgcacacctgtaatcccagctactcaggaggctgggggaggagaatcgcttgaacctgggaggcggaggctgcggtgagccgagatcgcgacattgcactccagcctggcgacagagcgagattacgtctaaaaaaaaaaaaaagaaaagaaaacccaactgaaagtggcttacattataagcaacaagaagcccagagcagcgtgtaattccaggattggttaattcaggcagtcggtgaggtctccatcacttctgctctgccatcctcgggtgctggcatttcctcctaaacaaactgctccccaacagtccaagatggcgtctgtggttccagcatcccaggcaggtgatggcatcttgaagcaagaaaatagccctgttacagtcaagtgccacatgacaatgttttttgtttttgttttgttttgtttttttgagacggaatctcactctgtcacccaagctggagtgcagtggtgcaatcatggctcactgcaacctccgcctcccggattcaagcaattctcctgcctcagcctcccaagtagctgggattacaggcacccgccmccatgcctggctaattttttttatttttagtagagatggggtttcaccatattggccaggctggtctcgaactcctgaccttgttatccccccacctcgacctctcaaagtgctgggattataggcgtgagccactgcgcccggcctacataacaatgttttaatagcgaaggaccacatgtataacaatggtcccatgagattattgctttattgctttttttttttttttttgaggtggaktctccccctgtcacccgggctggagtacagtggcgccatctcggctcactgcaacctccgcctcccaggttcaagcgattctcctgcctcagcctcctaagtacctggggttacaggtgcgtgccaccacacctgcctaatttttrtatttttagtagagatggggtttcaccatgttggtcaggctggtctccaattcctgacctcaggtgatctgcccgcctcggcttccaaaagtgctgggattacaggcgtgagctaccatgcgccccatgttacagcaccttttctaggtttagatacacaatatttgctattgtgttgtaattgcctacagcattcagtacagtaacatgccgtgcaggtttgtggcctaggagaaataggctataccaatcaacctaggtttgtgtaagtacacactatgatgtttgcacaactacaaaatcacctgacacatctctcagaatgtattcctgtccttaagtaacacatgattgtacatccctttttaagaacaagcagaaccttcctagaaggccttcagcctatttgcctccccatctaatcagctgtgtgacctggagccattgatctgatctcagtacctcagggttcctatctgtgtaattgaagggggccagcccctacgcacctgtggatatttctcatcaggtgggacgagagactgagaaagaaataagacacagagacaaagtatagagaaagaactgtgggtccaagggaccggcgctcagcatacagaggacccgcaccggtgccggcctctgagttccctcagtgtttattttactatcttagcgaggggagtgtagcagggcaacaggtggggagaaggtcagcagggaaacatgtgagcaaaggaatctgtatcatgaataagttcaaggaaaggtactgtgcctggatgtgcacgtaggctagatttatgtttctctttacccaaacatctcagtgtagcaaagagcgacagagcagtattgctgccagcatatctcgcctccagccataggacggttttctcctatctcagaatagaacaaatgggaatggtcagctttacaccgagacattccattcccagggaagagcaggagacagaagccttcctcttatctcaactgcaaaggggcctccctctttcactactcctcagcacagaccctttatgggtgtcaggccttatggtaaggtctttcatttcccatgaggccatatctcaggctgtctcagttgggggaaaccttagacaatacccaagctttcttgggcagaggtcggtccctgcggctttccgcagtgcattgtgtccctgggtaatcgagaatggagaatggcgatgacttttaccaagcatactgcctgcaaacatattgttaacaaggcacatcctgcacagccctaagtccattaaactttgattcattacagcacatgtttctgtgagcacagggttggggctaaagttacaggttaacagcgtctcaaagcagaaacaatttttcttagtacagatcaaaatggaatttcttctgtcttccttttctacatagacacagtaacaatctgatctctctttcttttccccacatgtaaaggcaaatataattgcatttgttgtgagagctgagggttaatctatgtaaagcacttagaacagtgccttgcctgtgatttgtactatataaatatttgctattactatctgatagcaagaattacattacattcctgggtctaaccaatagcttggctggcaatgtgtggcttggaccaagcaagatcyacccatcagggctgaggagggactcacttgaaggctatggctattcagaggagagtgggcaaaataggggttaacaaggaaaaaagggaggggtgaaraatggatattgaccaacaggatctgccacacccatgttgtttaaaaaaaaaaaaaaaaagaaaacctgggccgggagggatggctcatgcctgtaatcccagcactctgggaggccaaggtaggtggatcccctgagctcagaagttcgagaccagccttgccaacatggtgaaatcccatccctactaaaattacaaaaattagttgggtgtgggggtgtgcacctgtagtcccagctacttgggaggstgaggcacaagaatctcttgaacccgggaagcagaagttgtagtgagcctagaacttaccactgcactccagcccgggtgacagagtgagactccaccttaaaaaaaacaaacaaaaaaaccctctatcaatgtatgagcattattctcttcgtatgtgttctatttttttaacttttttttttttaggtaattacagatttacaaaatatttgtgaaaatgtataaggagatctcatacctggccctagcttccccaaatattaactaccaggaaattaaccttgataaaaatgttcacatattatttaactaccaggaaattaatctttatacaatttttttttttttggagacagtctcactctgtcgcccaggttgcaggctggagtgcagtggcgtgatcttggctcactgcagcctccatctcccaggttcaagcaatcctcctgtctcagcctcctgagtagctgggactacaggtgtacaccatcatgcccggctaatttttgtatttttagtagagatctggtttcaccatattggtcaggctggtctggaactcctgacctyaggtgatccacctgcctcagcctcccaaagtactgggagtacaggcatgagccactgagcccagccttgatacaattctaataacctacctatagtctttattgatgttgacagttgttccccagtgtctttttttctagtccaggatccaattcaggatcacgtactgcattgatttctaatttaaataccatttaaaaggaacactgagttccacagaacctaacttttgttgcaagatctctaggttgtttgtagagtttcatcattaccagtaaccctgggccttcaaatttttaatatatttcagagtttatcttttgggctgatccctaaaacagaattactaagtaaacagatatgaacatttttaaggccttgatgcatattggtaattgctttccagaaaattatacaaatttgatgtccctacaaaccatgtatgaatactcaacttcccatattcttagaacttcaggattttattcttgtttttaatattggcattttggttaagtgaaaatcaaatctcgttgtttaactgcattttctttatttcttttttttttttttttttttgagacggagtttcactcttgttgctggagtttcgctcttgaggctggagtgcagtggcgcaatctcagctcaccacaacctccgcctcccaggttcaagcgattcttctacctcagcctcctgagttgctgggattacaggcatgtgccaccacacccggctaattttttgtatttttagtagagacagggtttctccatgttggtcaggctggtctcaaactcccarcctcaggtgatctgcctgcctctgcctcccaaattgctgggattacaggcgtgagccaccgcgccctggctttttttttttttttttttttgagacagagtctctgtctcccaggctggagtgcagtgacatgatcacagtttactgcagcctttacctcccaggcccaagagatcctcctacctcagcctcctgagcagctggaagcacaggcgtgtaccaccaagcctggctgattttttaaattttttgtagagatgaggtctccctctgttgcccaggctggtctggaactcctgggctcaagcgatcctcccaccttggcctcccaaagtgctgggattacttgtactttgggtgcaagttagccaccatgcctggctatacttggattttcttgattcttttgagttttcacattttttcatatttattagccatttattaatttattaattgaggtcattgtgttttcacatttatttaaggtctgtaatcactccttggccttttggctaagatcaagtatatttaagttcgtttttttttttctttttgagagagtctcactctgtcgcccaggctggagtgcaatggggcgatctcggcttactggaacctccacctcctgggttcaagcgatttcttgtgcctcagtgcccaagtagctaggattacagacgcctgccaccatgccctgctaatttttgtatttttagcagagacttggtttcaccactttggacaggctggccttgaactcctggcctcaagtgatccacctgcttcagtctcccgaagtgctgggatgccaggcatgagccactatgcccgcctgaggttttctttctttctttctttytytctttctttctttctttctttctttctttctttctttctttctttctttyttycttycttccttccttccttccttccttcctttctttctctctctctctctccttccttccttccttccttcctttctttctttctttctttctttcttctttctttcttttttgagacagtcttgctgtgtcgccaggctggagtgcagtggcgtgatctcagctcactgtgacctctgcctcccaggttcaagctattctcctgccccagcctcccaagtagctgggactacaggcacgcgccaccacgcccagctaatttttgtatttttagtagagacggggtttcaccatgttggccaggatggtctcaatctctttgacctcgtcatccacccacctcggcctccacccgcctcggcctcccaaagtgctgggattccaggcatgagccatggcgcccggccaaggatttaaattttaaagtaactaaaacagtaattatttcccttgttagatcttctgttgcttttttctgaataatgtatgcctttaaggaataataggaataataaatgcctttaagaataacatacgcctattaaggaaaattagaatgacgcatttgttatttttagctttagaaaatcctctgctatccagattgaacatgtctttcattttcttctaattttctgtggtttaattttatatccttaaccctttaattcgggtagaatttattttggtggattctgtgaggcacgagtctaaattgctcttttgtaaatagctagtcactcatccatcatgtctttccagcatcattaatattctgtttccctctgtcactgttaactattattgcagtaatgctgcataagaagccagttcaaaactcagaagcctacaatcataagcatgtatcttgctcatgcatctgtgggcaggctgagctttagctgatctagcttgggctctgctgggctgggttgacttccaagctgtgagtgggatccaggtggctccatgtgcctttcatctcccttagaccagcaacatcagtggcgtgggaaaatatacctcgcctccattgaagtgatgcacagtcacagggtgaacggtatgtttacagtgagagatgaataactggaaactgaaatgccatctaccacacctttggagacagcctttcaggaaactagattgtgttgagataaaggcagaatggagtctagaaaatggcacaaggtcaagggaagatttttttctttctttctttcttttttttttttttttgagacagagtctcactctgtcacccaggctggagtgcagtggcacgatctcagctcactgcaacctccacctcccaggttcaagtgattatcctgcctcagcttcccaagtagctgggattacaggcacccgccaccatatccagctaattttttgtatttttagtagagacagggtttcaccttgttgcccaggctggtttcgaactcctgagctcaggcaatccgcctgccttggcctcccaaagtgctgggattacaggcgtgagccactgtgcccggccaggaagtttttaaggcagggagatgctggaatttgctcttaggctgaggaaaattgcaaaatatgtagaggggtaggtagtcacagaaattgttttctctaagaaggatatttgttgaaagtaaaggaaatgacgttggggcttgaggtttggaataacaactgcagatgagatggggcctcagcaaaacggaactgccaagcactggtatcagggacttgggatggcctgaaccatcgcagccctgagtcatatgacacagcagttttcttcagccctgcccgtgaggtaggagactgtcaggttggttcaggtaggtctgaaggttggtaggttaaggctggaggtcaagggggtcaggggatcaggaagctaacaggtggtaagtagttcaagggattgagcctaagttcaaatataggtgcaagaggggctgaagggctggaagaaaacaaactgcctgaggagctggaactggaggtccatgtgtactggggatgggaggggatcagggaaaaggacattggaatttaggttctcagaggcagagaagttccaggtgaatctagggtgtggccatgtgagcaagctgctgaattatgtcgaaggcattggaattgaagtcaggaactgaggtcaaggcagagttcagaaccacctatgcgaaatgcacactcttgggccccagccaaacctactaagtttgaatctctgggggacggaccagaattccgtatttttacaagctccctgagtggttcctaggctccctaacacttgaaaactgctgtgctatgatgttgaatgagccatgcttgttggaattacctgatggcaggaatcaggcaggaagactaaaaacaggtgttgaaatccttagagagtctgggctgatcagtgtatgggactgatgaggaggggtggaaagaagtttgtacatgagtcaggaagagcaatggccttggcctggactattgctagtgcattcctttccaacctggagacaatgtaggagactaaaggcttccactgcagaaggcagggcagtgagagagaaggtagggaatagaagacagggatcatattcagtccagacaggctgggagctctgtgagaaggcagaggacgttggggaaggatttgtttcagaccaaaccagggttctgcagggtacagcaaaatggctcrgacaggagtycatgagaaaatggtccacgagggaaagtgagctttggttggggataacagatgaggggatggactgggctaagcagaggccagattatcccagtcaccacttctgcactgggttcacttttctaaactgaactaatttctccacccaggtctgacaagatgtctcttttctctaacatttaaacagctccaaccatctcagctccttcatgattgtttygtcatcatcaccatcgtcactgtcatcatcatcatcaycaccaccagtgatttcctgaatgccaaccaagcaccagtcatcaagcgtgagccacggtgcaaagatggaggcaggctctccattctaagggaacctctcaggccagtagggaaggcaagattcagacaccagggacaggcagcctgggatgacaggtggaacaaggaggagacacaagaacccccaccccaacccaggaacccacatcacaggccagacctgcatgatcgccaggcacccgactcgggttatgaaggtgtctctcctaagagagtggcagaggcaaactttagccttggcagtgcgcctcaagctgctcaggggagaagtcacggccaaagccctggagtgcatgggttctttagccatggttctcctgcagcttcctctgatattatgaagcgcctgccgccaccaggcttgttctgactcccttccatgatccacccttctgagtggggtttggcttctgtacagctctcctgtgggcactgagcccactagtcagagcaagagggctccagtctctggacagtcacagtgcttggtggcaaaacataaattgtcattcattcatgccttgtttctgtcattcactcattcattcagcagatacttaactgaacacctgctctgggccaggtattattcacaccactgggaatacagtggtgccaacacaggtccctccctgacttcatggggctaacattccagtgggagtgacagaaaagatccacaaaataacatcacattgtgaaaagtgctatgaaagtgaaggacgtaagcacagtaatattagtaatagagtagagagtgaggaggtggtgagcaaaggcctcatagagggagtaacattttttctttaatttgatgtatactttacatatagtaaagtgcmcaaatcttttctttttttttttcyttttyttttttttttttttttgagacagagtcttgctctgtcgcccaggctggagtgcaatggtatgatctcggttcactgtaacctccgcctcctgggttcaagtgactctcctgcctcagcctcccgagtagctgagacaagaggcttgtgccaccatacccggctaacttttgtatttttagtagagacggggtttcactatgttggccaggctggtctcgaactcctgaccttgtgatccgccctcatcagcctcccaaagtgttgggattacaggcgtgaaccactgcacctggccatgcacaaatctttaatgtacaacttggtgagtttttcaatttgcgtatgtcagactctcaacctctgtactgcagacattggggccatttgtcctggggactgtctttcttgtttgtcttttttttttttttttttttttgagatggagtattgctttatcgcccaggctggagtgccctggcatgatctcggctcactgcaacctccgcctcttaggttcaagcagttctcctgcctcagcctcctgagtagctgggattacaggcacacaccaccatacctggctratttttgtatytttagtagagacrgggtttcactgtrttggtcaggctggtctcaaactcctgacctcgtgatctgcccacctcagcctcccaaagtactgggattacaggcgtgagccatcrcgctcggcccygtcttgtgtattataggatgtttagcagcatmcytggcctctacccactaaatgtcagtaacattcctccccacacagttgtgaccatcaaaartgtccccagacattgccatatatcttctgggaggcgaaatcgccactgttgaaagccactggcatatgccatgtagccagcactcagctcaagatacaggttatttccacatggaggggttggcrtttgagctgacacccaacagctaagaagctgcctccaattcagagaactggggaaggaatgttccaaggggagrgagcataggcaaaggccctgaggtgggaaygagcgtggcacatttgaggaagtgtggctggtccgtggtgacaagggaaaggcatctgaggaggttgaagagacaggctgggccctattgagcaggggctttgtgggatacggttaggagtctgacatttcaaagaacgtttgtgagtatktaatatgtacctggcactatgccagacactggagagttgaagatgaataaattaaatccttggccctactcttttttgcttttattactatttttaattgacacacaataattgtacatatttatggggcacagtgtgatagtttgatacatgtatacaakgcgtaatgatcaaatcaaggtaattagcatatccatcacctcaaacattgatcatttctttgtgctgggaacattcaaagtctgctcttctagctatttgaaaatatgcaggccagtgcctgtggctcatgcctggagtcccaactaccgaggaggctgaagcgggaggattgcttgaaccctggagtttgaggctgcagtgagctatgattgtgccactgcactccagcctgagtgacagagtgagaccctgtctctatttttaaaaaaaagtatgaataagacccagagttggcacaaaaggggacatgcttaagcccatgaaggatcctgctgggagggttcaagaagagctttcttggagagatcacacccaatttgagtctttggggaacaaagaataaatggcactccacgcagaaggcacagtatgtgcaaaggcatgggggtgtgaaacaatatgatagcttgagacaatacctaagtagttaagtattctagggtataaagtrcaggagaggggtaataataaggcatcagcctggatgggatagaaaattcttatggcagaggaagtgaaactaaagcccacttgcagcagacattagaagtcttccagaacagtctaagggtggggttatggctccctgggcctgcatgactcccstaaaacactcaccctcactccttttcccagtcccgccttgactccatatgtttcatcaaacatatcttggatttattatctataatcttgttaattgtctggcttgagatttagaatttggtcatctctgtgttctctacaagctcatgcttgagcatgcatttcctgtttcagattacaggactgcattttaatttcttgatagaatgcctgatatagccttacctggcacagccttacctgcagaaagttgtgtgcacaatgacttttgatgatgcctccatgatccttcactttgcatgtacagacacagacacggagatgcaaactcctgcatcctacaagggtcatctgcaaattggcttatcagttttctcactcctctgtctcctctgcggtaccagccctttatatgccaggcactgagaagcaacctaattacaggcgaggagacagggagggagcaggccataggctctgtccctcaagatgtacccacatagaagaaactccaggtctgtctgggttttctggattaaacccagattcaggtattggaattacaattcagtttgaagataatttaacatatccctcacccatctccctcccagaacctcccagcagcagcaaaggtgagcttgacttttttttttttttttttttttgagacggagtctcaccctgtcacctaggctggagtgccgtggcacaatctcagctcactgcaacctccacctcccgggttcaagcgattctcttgcctcaggctcccgagtagctgggactacatgtgcatgccaccatgccaggctaattttgtatttttagtagagatggggtttcaccgtgttagccaggatggtctcgatctcttgacctagcgatccgcaggcctcagcctcccaaagtgctgggattaagcgtgagccaccgctcccggccgagcttgactcttttttttttttttttttgagccggagtcttgctctagagtgcaatggcacgatctcgactcaccgcaacttctgcctcctgggttcaagcgattctcctgtctcagcctcccgagtagctaggattacaggcaggcgccaccatgcctggctaattttgtatttttagtaaagacgtggtttctccatgttggtcaagctggtctccaactcccgacctcacgtgatccgcccccctcggcctcccaaagtgctgggattacaggcgtgagccaccgcgcctggccgagcttgactctttagagcatttccttcccttcctgtcctgggccagagctagggctggagccaaaacaagcccagccctggctcctgtgcctaaatttgtagatttcaccaccaccacgcctgtcctcacacctgcttccattccagggaccttaacaacttctagaatccatcaggagggcagcagtgagggagctgggaacggtgatgtggaaatcgccctgggtttgggagtgggaatgccccagccctaggcccctctgtgccacccatggctacatatcctaggtcatgttgctcctccagagcttgtgtggcctcttcctatccttcagggcaggacttatgtcgtccgctggggaggccctcccccatctaagttggccctctctgtgctccatatcattgccccctccttgacttcctttcgcaatttatcacgcgcatatgtatgtgtatgcataaacagatataattttgtttgctcgcttatttggttcgtcgcctcactagattccggactgtgggctccaggaatgcagacagtgtgcctttgacccttgcatcctcctcagagcctggcagagtgccaagtacataggaggagctagaaaagtaattcggcgaatgaataaatccatgaatggcagctgaccccgatgatctctcaggtttctgccagttgagaaagtgtagcagtgccctggacggggaggcgggcggggcgaactgcgagctcctgccccttcccarggctcaggcgactgtggaccccgatcagcgcaggctcgcggyccgctgtggccccgcctcctggccgccagccgggggcggagccaggccgccccccaagccgggtggccttcggggtgcttgcccggctggaggtggtgagggggcgggtccaaaggagaggtcaatgggcggggcggggccacaacgcccccacgtccagagycggcaggcaggttccccgcggggggccggggccgggccgttgcctagcaacgccgagccccgcccggccggcgcgtgcctgcccccagcatggcttggcagggctggcccgcggcgtggcagtgggtcgccggctgctggctcctcctcgtccttgtcctcgtcctacttgtgagcccccgcggctgccgagcgcggcggggcctccgcggtctgctcatggcgcacagccagcggctgctcttccgaatcgggttagtgcccgggctccgaagcgtgcgggctcgggaggcgggcgcgctgggagaggggactgggaggcgggggctggagctgggggtgggcgtggcggttaggaaggggcttggtctaagggaagagggatcgaggagacggactggagaagccactgagttggggggcctgagggatttggggggctggacaattgggataagctggggaaggaggatcggagaggcgggccagggtggccacggaaggagggcgtgagaggacatctggagcaaagtgccacagaatgggctggagaccaggaagctggacagggggatagtgcaggagccagggctgggaagaccgtccctgtccgggggtgaggtcagcagatgcccgggctccgatggcaagtgccggagagaaggaatgcctcccaycgtctgacatttaaaaccgccaactcctttcgtatgtccttgtcccactccccagcatccaactcctcaccagtcaagttaggttcttctgtcccaagcaagagtcccaaccctgttggattccagtatgtccctttccttctaaccaaagcctggcccgtgtggaagccccaggctgtgaaatctgacccaactgactctgcccacttttccagtgatttgtctccgtcgaccctcccccgctcactctgccctcctgcytccctctaccccttccttcctggccccaggggagggtggtgcctagcaagcactgttcagccccagggacactgagaggcagggaagaagacaggcctccgaggccccctgtccccttcctactaccagcctggccatgggtcaggacctcaagccccagtttagggacagtaatgttggggatgggaattgtgagagccctggccacaggccaggttgtggggagagcctaagcctgggaatttcccgagcttccgagcagacattgtgcaattcaccctctcctccccagaccaccccacacgcccagaagcttcaggcgcaggattccactcacagtctaagaaatgcagatataaaggcaggataactagaaaaacatggtgctggagggtggggtggggatcttgtgtttgtgccttttggggcattcacatctctaatatcctaaaccttggtcgcagtttagataatgtgccaagtaagttaccattgctctgcacgttgcattaaaataatgagattgaaaaatatttaggccaggtgcggtggctcacgcctgtaatcccagcactttgggaggctgaggcaggtggctctcctgaggtcaggaattcgagaccagcctggccaacatggtgaaacgccatctctactaaaaatacaaaaattagctgggcacggtggtaagcgcctgtaatcccagctactcaggaggctgaggcaggaaaattgcttgaagccgggagagggaggttgcagtaagccgagatcgcagccattgcactccagcctgggcgacagagtgagactccgtctcaaaaaacaaaaaaaagaaaaagaaaaaaaaatcccaaacatgaaggtatctaaataattttcttttttttttttttttttttttttttttgagacggagtctcgctctgtcacccaggctggaatgcaatggcatgatctcagcatggtgaaacagggtttcaccgtgttggtcaggctggttgcaaactcctgacctcatgatctgcccacctcagcctcccaaagtgctgggattacaggcatgagccaccgcacccggccttttttttttttttttttttttttgagacgggctcttgctctgttccctaggctggagtggtgcagtggcacaatctcagctcactgcaacctccgcctcccgggttcaagcaattctcctgcctcagcctcctgagtagctgcgactacaggcacctgctaccatacccagctaatttttgtattttcagtagagatggggtttcatcatgttggtcaggctggtcttcaactcctgacctcatgatctgcccaccttggcctcccaaagtgctgggattacaggtgggagccattgcgcccagcccatatttgggatttttaatgaaaacattttctccccacaaaatttctgggaattttacagccttatctggggaaagatttttaaatctacttctagctttcaaaattagtaagtttgaggtcatacaaatggcctgaggaagtggaaaatagaagtttccataaggaactggaatcagaattcctgagatcagaatgccaggatcactatctcagaatcttgagggtgtgggtatgcctggaacttgagacgtgggattttacaaatctccaaaactctaatcattggagagcttcttcaaaatgcagtatttctacaggctttcctgtgtctggatttcaaagttgctttggaatccactcctcaaatttgcagagagaagggtgcgcctrgagtcagaattccagaccctgctcctcatagtctgggaaacaatcagtccagtccccagggggagatgctgctggctgctgggagggaaaggrgatatttgcaggaaactgtaggggggaaatgggcaggtgttggtgctaggggtgcctccaggaaggatggggagggagggggaacggaatgggacaggacatgatggggagggggagggcacatgcactaccaacctgaaggtgtggctgggaggatcgcaaatagaggattctactgggggtggaaaggcaatgatggaaacaccaggctcaccgggaggagagctgttgaccatgttatcattagtaatcatcatccctggtgtttggcaatttaataaaaggctttccttaaccataactacaattgtcttaggatgaggatagctgagcacagtggccacaggtgaaactggtgagacacatgcatttggggctctgtggggcctgggagacagtgtggattgtagcaaagcacacagcatgtggggtcgaacaaatctgcttttgcatcctagttttgttgcttagtagccatgtgaccttgaacaaataacttctctgtgccttagttgtttgcatctataaagtggggttggggaygcctacctcatagggctcctgtgaagatcaaatgaaaccgcatctaaaatacacagggcctggctcaaaaagagtgttcaggaaatgttagcaggtgttcctgatgtggcctggagttgggtgggagagtatctatggccctgtgtccttctggagcttccttacttaattccacccctgtcttccaagcctgtcctacccaccacccagcaggaaactccacatcccttcattcagccagggaacacctagctgccctaggtaaggactgtggggtcccagatatgaacaggttctgatcgctgttctgcarggaaggggaaagcacaggtgaacagatataaacaagggcccaaacccgggaggaggcaggccgtggcaagctccccagaagcagcacaatatgcctggggagtcagatcaggaatgtgggactcccccgtgcgtgccccctgcttcatgcctcagttgcccttttgccttcttaggggtagtggtgggggttttgcagaacaaagtcttgaggagagcctctgtctgcagaggggagacgaataggacacaggcaggtctgggagtgtcttgcagagccgaggaggtgggtagcagctggcctgtggagaaagccagtcctagtgacagccttccctccctgaccaagccccctctccattcctaggcatagaaggtccttcctgaccctggcaaccccccctgggacggacctagcttgctctacttctgcaagaggaaagccgttatctggggccaatgcgtcccactggcttgatttcaagagtggcagaagcctgatggaagggtccttgagtgaatcctcccagccccccgaatgaggccaggtagatgcagtgagctgggctatccatgtcgcagcctggcaggaggggagcaggatccttttcctttctggggcctgtgggaccgtggagaactgtggccagagcacccacagcagcctcatgcctccctgctgctctctgctctccccactgacacagcttccccctgctgcctggttcgtcttcaaagtgtggctctgatcaagtgtccccttctgcaagccacattgccgacagtatggagccacgcccctcgcccaggcctttgcagccttcccacaccccctacagacctgcccagtttcatctcccccaggcctgagctgttcctgcacttctgtctgacctgtcctgccttccttcctccctacatctctactgtcaaattctgttgcatcttcaaagctcaccttcaaaggtacccagaatgtgaacacttctccctgcctccactgccaccactctgggccagccaggagaatcgcttgaacccaggaggcagaggttgcagtgagccaagattgcgctattgcactccagcctgggtgataagagtgaaactccatctgaaaaaaaaaaaaaaaaaggaaactgttacttaagtcaggaatggattacttctctgctcaaactcctccrgcgagttcccacctctctcatgaagtccaagtccattcgaagagtggcttcagggccctctgtgacctgcccatccttaccacatcttttagcacccttcagcctgttcctctgtctcagccacagctggtggcctctccacggtgcttcagtcctagctgagaggtctgggctaattctgtttctgccggtcgtaatcccaggcctcaaatacaccaagacaaccctaccatcaggcctttctgtggctccacatggcttgctgcctcacttccttcaggtctctgctcaaattttgccttatttgagagccctgccctgaccacctcacataaaaatagcaccaccctcacccctgcaccctgtcccctctctggctttatgttcaccctagttcacatcaccatgggacacactaaatgttgattgtttttctcccccaaccagaatatggctacacagggggagaaactttgttcaagactgtatcccagattccagaacagtgcctggcacctaggtggcccttactaaatgcctctgaatgatccttttgtaattcctaagtatgactgggttttcacacacataggtaagatgcacctccctcaaaccttgtgatgatgtcagcacggtatccgtctgatgtgaaagaaaaaaagtttctgaatgaatgcatgcgtgcatgaataaatgaatgaaaagcttggctcaggtgcccttttctccatgaagcctgcccggcctcctcagtcaaaatgaacctctgtctccagaccgcccccagcactgtcttccctcttcgagcttcccgtgcgcattcttgcttgtactggagttaggtgttcacggaccggccttcctgactgckctgtgttcctaaggggccttggggccgggcacagtggctcacacctgtaatcccagcactttgggaggccaaggcaggtggatttcttgaggccgagagtttgagaccagcctggtcaacatggcgaaaccccatctctactaaaagatacaaaaattaactgggcatggtcacgcacccctgtaatcccagctactcaggaggccgaggcaggagaatcgcttcaaactgggaggcagaggttgcagtgagtggagatcgcgccactgcactccagcctggatgacagagcaagactctgtgtcaaaacaaacaatcaagcaaaaactaaggggcyttggagcagacccggctccactagaaccctgtgtccttggtggccctctgggaccctcaggcctagctcagggagcatgatcgaatcaggaaggcctgggattgcgatgagcgaggagagaaggggaaagccacaagaaacaaaccaaaactaaacaaagcccagagcccttggcgggcaggtggcctgggattacacacatggagacagaactagccaaggcctcccagccagggctgagaccatggagaggccaccagctcttactgtgcytctggtcctagccaagagccctcagcagcccctccccttccgtcagtgacagatgggcgtcctctggagagggctgtgaagtctggggaagaacctgtcctgggatgggcagggcgatggcagaccctgacctggggatctcctcttttgaccacggagcagccctgtccctctcctgygcatgcggaagtccccacgcccccaggcatgctggcaacttcggggaaacccttaccctcaagggctttttagctgttttgttatcttcttcagtttcctcagttttgagaatgcacaaaacatggagctgctctctgcattcctgaggggcctctaagcagacctcgggtcccatagaacactgtgtcctggtggccctccaggtccctcagctctcagacaggcactttcagttctgtttcattaggagtgccctgtcgttggtgagatgcagagcctgggcagtctgggtcctgaggacatgaagggagaaaccagaacagtccccggccagggccccaccagcctgagcttgcctgttgggtcccagtggagtctggggccttgtgggatcggggggacatttaaggggtgtaggaggaagggaggagtcaaggcaggtgaccctggcaataggggctttccagatcattctgtgggaggcagagcccctgttatgctgctcccctgccttccaccctccttcctactccccctggcctgaggccggccctgggcctagctgggacagaggcttgaaaaccttcaggcttctctcagggctgcccaggatggtgaaatggccccacggaggagagaagagcttcattgtgtgttttccactgtgtgccagagggaggggcgtctgggggggcagtggctcactgtccccagctgtcccacattgcctcccacggggctggaggctcacattcagataccagagacaccaactgctggctcactgaggcaaggagtggaaggtgcactttgaccctacactggaggtgctggtgctgtctgcagctgtaaccccacagggagggtcccttggggcagctgccacttgcccaggctggctgctccccatcttgcagaatggtttttctgcctcccacctaagtcccagaggaccaattgggaaattttattttctttttggtgaggtgatgatgggtagttcctgtccccagaactgctgaatcaaaatctaggaagagggaggaggagaagaaggtcagaatctttttgtttaaccagcacccccagatcattctaatataggtgggccaaggcccatcttagagaagcactgtcctggatcccagcttgctgactgtgcctgggaagcccatggagagagcgtgaacccacatctgggcctagggcatcagtattttcttgtgagtcacatgaacttactggcccagcctgcaagggagcactcaatttgacagaaagggaaactgaggttaggggagtgagttcctgcttcttgcctccagcaacagaagaagccgtatctctggtaatggcttaagaaaccaggggccataacatgggrcagtgacatcctgggaaggtgggacgggggattgaagacagaagggcacaggttccagccggacatggtggctgatgcctgtaatcccagcactttgggagggcgaggcaggtggatcacctgaggtcaggaattcaagaccagcctggccaacatagtgaaacccgtctctactaaaaatgcaaaaaatgtggtagtgggcacctgtaatcccagctacttcgggaggctgaggcagaagaatcgcttgaacccgggaggcggtggttgcagtgagctgagatcatgccattgcactccagcctgggcaacaagagcgaagctctgtctcaaaaaaaaaaacccaaaacaaatatacaggattgttttgcatgctttttatttttatttttatttatttatttttttattttagagggagtcttgctctgtcacccaggctggagcgcagtggcacaatcttggctcactgcaacctctgcctgccaggttcaagcagttctgcctcagtctcccaagtagctggaattacaggcttgcaccatcatgcccggctaatttttgtatttttagtagagacggggtttcaccatattggtcagactggtctccaactcctgacctcaggtgatccatccacctcggcctcccaaagcactgggattacaggcgtgagccaccgcgcccagccatgcttttgtatttttaatgaatatagtcatattgttttctctgtggtatgtctcagcataacaatacgtgcttgagctttgtgaatgttgaaacctgttgctctagatcatgtgtttcccttgctgtgcagttttccaaggtctgagtatgttgggatttatttgtacattttgctggtggcagtcatttagggggtttccgccctttcactcttgggagcacgggattatcactgggcggtacaggaggggaggaggcagtccctgctgtggtctcagtttccagaaggcctgactggaagttggacatttgctaataagcagtgaggagccactgaagacttttgagcaggagcaagyctcagcaaaatgcggcgctttaggaacttctttttgccagtgctttgcagtttgggttggaggtagagagctgggggacagaggctcttgtaaggccctaggtgagtttccagggcctgttctcacaggtgaggctgcgctgggggcagtggaaggcaaaattgagagggatcctgttttggttgcatatgccagggagagggctaaatgcaactgcgaggacagggggcctttcccagaaagagaagaagcaggatggggagctgaccatggggactgtcactcaccaattctgcaggcagatggagggagagcctaagctaagtggcttagagagtcctgtggaagcccttggcagggcagggcacagggctggggagagccactaggtcctcaggctgctctccccttcccttcctccttccccatctcagccctgccttctcctgctttgcccaaagatcaagacctcaggccagcaaggactgcaacctgtccctagcccacatccaagccaggcacaggtctcccatccccctgccaccccaccctctccaccttcagcaccccctctatccaggcccctgtctctctcccacctggatgactcggtacctcctgccccttttctccactcagcagcccagtgagctctcagaaagggagtctgatcctgtgcaccctgttctaacaaccaccagccattttccactctctgcatggcctggcccctgcccacctcaccaaccccttctccagcactgttggtccctccagccctgcccaaagactccgaggcctcctgacaattcctaaaattccacactcctcctgccttggtgccacatcacccagaaccgtccatgccgctggctcggtcttgcagtttccagcacgaatgtcaccctctggggacgaggccttccctgggcaccctgtctacagtagggcctcttcccttccggccactcttttccacccccagccatagttactggcagtttgctgactaatccggtttctggtttaatgtctgttggccctccctttccccacattacaagctccccgaaagcaggaccccttctgccttgtttctgctgtctccactgtgtccatcatgcacagtatttgccagatacagcgagtgacaaggaggggccttgtttactgyggcttcttggtgcagagtccctgcccgcacagatctgtcctttcttagggacagaacctgggaacacgtagtcagcatttagtaaggggaggcggggagcttatcacccctyccagatgtgcatgaccctgctctagcagctgggaggacttcctggctgaatttgggaaggaaacaacagttgctaaacatcttccacttgccaggctctcggctgagtgctttacattagttttcttattttaggcacttaatcttcacacagtccttcggggtaagtcacagcattgccatgttatagatgaggaacctcatctgtgaaactcatgacttgcccaaggtcacagagtcaacaggggccaggctatgatgggagcccagatctttctgttgccagwgcctctgttctttccataagcccatgtagcgagaaatgaagacaggaatgggactcaggcatcggtgcaaggtggtgtctgtcagaggaaagggtgattttatttaattttattttttaacttttcattttgggccaggcgccgtggctcacacctataatcccaacactttgggaggccaaggcgggtggatcacctgaagtcaggagttccagaccagcttggccaacatggtgaaaccctgtctctactaaaaatacaaaaattagcygggcgtggtggcgggcacctgtaatagcagcttctaaggatgctgaggcaggagaattgcttaaacccgggagatggaggttgcagtgagccgagatcatgccactgcactcctgcccgggtgacagagcaagtctcagtctaaaaacaaacaaacaaacacaacttttcattttgaaatgatttcagacttgtcaaaatagtatatagcattcccatatgcctctcgcccctgaatactatcgtctttcataatcacagtacagtcatcaaaaccaagaaattaacatcaatactatcctatgaagtactctcagagcttactcaaattcactatttttccctgctgttgccctttctctgatctagaatccggtccagaatcccacgttgcatttatctcctggtctcctccagtctgggacagtttctcagtctatctttcatcttgtcaatacatttgaagagtagagcctgggcaacatttgaagagtagagcctgggcaatcatctctatactaaaaatttaaaaaactagctggcatggtggcacgcacctgtagtcccaactactcaggaggctgaggcgggaggatcgcttgagcccaggacattaaggctgcagtgagctatggatcacatcaccgcactcttgacctgggtgacagagcaagacccaaaaaaagaattatagatttgcatttttggcacaaataccacagaagtgatcttatgccctcctcagtgcatcataccaagaggcaaatgatgtctatatattgttactggtgagattaactttgatcactggcttaaggtggagttagccaggtttctatggcctttataattagtggttattttgtgaaggagatactttgagattatgcaaatatcctctttctcatcatacttgggtgatttgactggggtctccaggtgttaagagtgtgctcttgtgtgttagaaactctcggtgttagcctgggagcgaatcaagacatcttctcttcaaaaaaataataaaaataattagctgggcatgtctgctcatgcctgtagtcccagctactcgggatactgaggtggaaaatcgcttgaaccccagcgtttcaggcttcagtgagctgtgactgagccaccacactccagcctggctgacagaggaagatcccatctctttaaaaaataaataaataaataaataaatataaatataaataaaaatgggctgggcgcggtggctcacgccagtaatcccagcactttgggagactgaggcaggcagatcacctgaggtcgggagctctagaccagcctgatcaacatggagaaaccctatctctactaaaaatacaaaattagacgggcgtggtgtcgcatgcctgtaatcccagctacttgggaggctgaggcaggagaattgcttgaacctgggaggtggaggttgcggtgagccaagatcacgccattgcactccagcccaggcaacaagagtgaaactccatctggaaaaaaaaaatgttaattgtcctgtctgtcctactagatagaaccttcacaaggacagtgagtttgccttgctcagtgtgtgttcagtgcctggccaatagcaaggattcagtaaatattgttgaagaaatgaaaatgtaagttggccaaatctaatttagaaataaaaccaaaaaaaaaagaaggcctacgaaaaaggaacataaagacaaataaaggttggcaaagcccttcaaccatgtgcccagattgccaatcaatataaacccatgggtacatagagcagacaatgcagtgattaaactttacctaaatcatatctacaaattgccatggaaacctgcttggttttgacccaactgcttgcagacaaatcagctagctctccccttaggggtctgaagagcggctgcccctgctcccacatacacggtcaatccttgtagagacttagggtcagccaggcgtggtggctcatgtctgtaatcccagcactttgggaggccaaggcgggttgatcatgaggtcaagagattgagaccatcttggccaacatggtgaaaccctgtctctactaaaagtacaaaaattagccaggcgtggtggtgggtgcctgtaatcccagctactcgggaggctgaggcaagagaatcacttgaacccgggaggcagaggttgcagtgagccaagatcgtgccactgcactccagcacggtgacagagtgagactccatctcaaaaaaaaaaaaaaagtttggaaaaaatagccattaaaagtactaaaatatgaagctttttttcttctacaatctctattttgacctgtgatgtttttaatttgctatttaatgtcattctaagtaagaagcatttaaattattagcaggaattttaccatttgcttaatattgtgcaatgcctgttttaaatacaaatataaggacatttaactcctgtagaatcacagaaacgacataattaatatttcttagcttatacatggatgtgtatttagttcttaccaggagagggtctcctctgtcactcagactggagtgcagtggtgcaaacatggctcactgcagccttgacctcctgggttcaagtgatcctcccacctcagcctcccaagtagctgggaccacaagtgcatgccaccatgcctgcctaatttttgcatttttagtagagacagggtctcgccatgttgcccagtctggtctcaaaatcctgggctcaagcacttcttccatcaccacctccgaaagtgctgggattacaggagtgagtcaccacacctggccttcaattcttttttttttttttttttttttttcagacagagtttcactcttgttgcccaggctggagtgcaatggtgtgatcttcttggctcaccgcaacctccgcctcccaggttcaagtgattctcctgcctcagcctcccaagtagctgggattacaggygcccaccaccacaccctgttaatttttgtatttttagcagagatggggttttaccatgttggccaggctggtctccaattcctgacctcaagtgatctaccagcctctgccttccaaagagctgggattacaggtgtgtgccactgcacccagccttcaattcttttctttttttttattgagatggagtctcactctgtcgcccaggctggagtgcagtggtgagatctcggcttactacaacctcagcctcccaagtagctaggattacaggcgcctgccaccacgcccagctaatttttgtagttttagtagagatggggtttcactatcttggccaggctggtcttgaactcctgaccatgtgatccacctgccttggcctcccaaagttctgagattacaggcatgagccaccgcgcccggccttcaattcttaatacgtgcacattctgccagcactgttggcttgctagttaataaggaaggatggaaaggaaaaggatggattggttaccctatcttccctttcctttctatatcgctatttgcagcataaataggtggataacacaaaagcaagaaaggatgcagcagagttccttggtcattcgtgtttcttagaacacctctgtctttgtgcacttgaagcacgttctagtttgaactgaaagcttggcctcttgggtcagtcataggtgtgcactcgccttgtacttgctttgagtcttgttgaactcccatgcgttgtgtgtcccccagatttgtgtgctcatgggcattgcagactctgtataggtatgataagcgaggaacrgagcacactcactgtgtgtgtctcttgctccctgcatgtcccactgtcctatcaggctccacttgcaagacacaaggtcaaagataaaatcattaagaatttcagggtcgggcacggtggctcacccctgtaatcccagyactttgggaggccaaggtgggcaaatcacgaggtcaagagatcgagaccatcctggcccacatggtgaaaccccatctctattaaaaatacaaaaattagctgggtgtggtggtgcacgcctctagtcccagctactcaggaggctgaggcaggagaatcgcctgaacctgggaggcagaggttgcagtgagctgagattgcaccactgcacccctgcctgacgacagagtgagactccctctcaaaaacaaacaaacaaacaaaaatttcaggcttggccaggcacagtggctcacacctgtaatcccagcactttgaaaggccgaggcaggcggatcacctaaggtcaggagtttgagaccagcctggccaacgtggcaaaaccctgtctctactaaaaatacaaaaaattgccgggcatggtggtgtgagcctgtaatcccagctactcgggaggctgaggcaggagaatcacttgaacctgggaggtggaggttgcagtgagccgagattgcaccactgcactccagtctgggcaacagagcgagactctgtctcaaaaaaaaaaaaaaaagaatttcaggtgggacacggtggctcacacctgtaatcctaacactttgggaggccaaggcaggaggatttgttgagcccaggagttcgagaccagcctagacaacaaactgagaccccatctctacaaaaaagataattgggattacaggtgcccatcaccacacccggctaatttttgtatttttagtagagacggggtttcaccatgttagtcaggctggtcttgaactcctgacctcagatgatccacctgcctcggcctcccaaagtgctgggattacaggcgtgagacaccacacccagcctcagatgatttttttttttttttttttgagacagggtcttgttttgtcacccaggctggagtacagtggtgcaatcatggcttactgcagcttcaccctcccgggctcaagcaatcctcctgcctcagctacctgagtagctgggaccacaggcgtgtgccaccacgcccagctattcttttttttgtgtgtgtagagaccctatagggcacaatgttgcccaggctggtctcgaactcctgggctcaagtgatcctctctccttccctcccaaggtgctgggattacaggtgtgagccactgtacccaaccttcttcagatgattaggatgcatgctaaagtctgaccaccactgttctttctgaaatattttttctacctcatttcagcctcctaattcctactccttcttccctgcaaatgtcacttcatcagaggtgctagaccctgggctagattaaacccctcactctccaagtctctctttttttttagacagagtctcactctttggcctgggctgcagtgcagtggtgcgatgcccaattctcctgcctcagcctcctgagtagctgggactacaagcgtgtgccaccacacccgactaagttttgtatttttagtagagacagggtttcgccatgttagtcaggctggtctcgaactcctgacctcaggtgatccgcccacctcggcctcccaaagttctgggattacaggtgtgagccactgcgcctggcctctccaattttcttctgtgagttcctcagttcatgtctccctgatagattttgagttctaggtgtgtccgtctcattctccatcttgtcctgagtgctaagcagggcaaacagtaggcacataataagtgagagtggaattgcattggctcacagggtcaccaaaggaatggagatgtggggcctgcaggcatcacgaaggagtctaggggagctagggagaaaaggctaatcataggccacccactcgccctctaggtacagcctgtacacccgcacctggctcgggtacctcttctaccgacagcagctgcgcagggctcggaatcgctaccctaaaggccactcgaaaacccagccccgcctcttcaatggtgagctctgactgccccggccagcatcccccattctgtgcccccaccctccccgcctgctccccttcacataccccagcccctgggctccctgcctgttaccccgcccacagcccatctctgtccccaggagtgaaggtgcttcccatccctgtcctctcggacaactacagctacctcatcatcgacacccaggcccagctggctgtggctgtggacccttcagaccctcgggctgtgcaggtgaggggagggcagggagcagggggtgcctggagtcaccttggggactggcagtttcgccttgctagagagggctgacccttgtccgtctgcccgtgggatgtgtcccatatgctccatgttcacacgtgcacatgcgcacacatagcctggggaaggggggtacagggcatggctgggcagaaggggagagcaggagtgggggatgcagagccagagggctgggggtgttggcccaggactctgggtctagtgagtttccaggctggctttcactcccattggcccccttcagaccccctttctttctgtcacctctgtctgtcagtatctgggtctctctgtctttccctcccattccttatctctctgtgtctgcctctctctatgtacaagtgtccctctgcctccatgtgccccgtgcttcacattcctggatctctcccctccagctccatccctttcctctgcttcatctctccatgctctcctctcctctccaccagcgcccacactcctggctcttgctgcttcaagtgcctcttgcatcctgctccccagtctccaaacctcctctctctcgcaggcttccattgaaaaggaaggrgtcaccttggtcgccattctgtgtactcacaagcactggtaaggggctcccgtcttccctggcccacccttgtcccagctgggcttgccaggactgggcccattgaggacggccggggccagagatcaagaagtcagtacgggccggcacccgccttcctcgtgaagtcacctggacaccagcagggagggaggagaggggacagtctcccaccactccattgatcaagcttctgaagccccagagggcagggcagtcatttctctttcatttcatgggcatgtattagatacctactgcacactgggcatggacaaaagttatgactcttccatcaaggaaattctaagaccaataggggaggtagccctgtatcaaagtatataacagcggaggcaagagggttgggagttcaagcccaacctgggcaacatagtgagaccttgtcttcaaaaaagaagtatgtgatatttaggtaacagttggcacagggaacagggatgggaggcccaggcacggtgtgatcagatccacttggagaattgaaagatgatgacctgagctgagggttcaggaagctcggctggcattggccagcttgagttgttgggggcgatgttctgggcaagggaacagcttgaacaaaggcctagaggtgtggacaacttggcttagtccagaagccacagccccagcacttaaaggcctggagatgctgtggtaaagaagggggcttaggtacagttgcccctcgaagccccctgcctgtctctgctgtcctgcagggaccacagtggagggaaccgtgacctcagccggcggcaccgggactgtcgggtgtacgggagccctcaggacggcatcccctacctcacccagtaagtccctgacctaggcaagggatggcccttccatgggccctttcccccacccccagccttcagtgaagtgtttcaggggtatsagcaggtggatctttgccagtgcccttcctggcccaatcccagcctatctraagacyggcactgcccatcccccaactgatccagccatagtccccaaaagaggaaagggggagggttcggacctgagacycgaggcactggggtgacttcttttgtatggaagcccactctcttgtgaatcacccagccccttgggcctgggatggggrcagggatcagcatggcacagatccaataccttctgtcccctgctcccttgttccccagtcccctgtgtcatcaagatgtggtcagcgtgggamggcttcagatccgggccctggctacacctggccacacacaaggccatctggtctacctactggatggggagccctacaagggtccctcctgcctcttctcaggggacctgctcttcctctctggctgtggtgagtttccccgaaagagagaggagctgggagaggagggagagacagaagycagggcagccacagtcccatggagagcactgaagccttagttttagcacagatgttgccrtggcagttacttccatctgtgttactcagattggttttaatccttgagacttcccttggggcaccttgggaggctgaggcaggaggatcacttgaggctaggagttggagaccagactgggcaaaatagcaagactgtctctacaaaaaaattttaaaataggccaggcgtggtggctcatgcctgtaatcccagcactttgggaggctgaggtgggaggatcacctgaggtcaggagttcaagaccagcctggtcaacatggtgaaaccccgtctctactaaaaatacagaaattagccgggcatggtggtgcatgcctgtaatcccagctactagggaggctgagacaggagaactgcttgaacccgagaggtagaggttgcagcgagctgagatcgcgccactgcactccaacctggaagacagagtgagactctgtcacaaaacagaaaaaaaaatttaaataatataaataatataggccaggagcagtgactcaggcctgtaatcccagaactctgggaggccaaagcaagtggattgcttgagcccaggagttcaagaccagcttgggcaacatggtgaaaccccgtctctacaaaaaatacaaaaattagccagtgtggtggtgagcccaggaattcaaggttgcagtgagctatgattgtgccactgcactgcagcctgggcaacaatgagactctgtctcaaaaataaaaaagacttctgccagctgcgggacagaatgggagaatgtctgtagctgagtaaagccctgcagggaattagtttcccctgggtggagactggttctctgatacagtgactggcaggactaggttatgaaaagttaagaacagctaggtgagggggtgggtgaggatcacaagtcccaggctgcatgaaatcccaaagggcagcctaggcgaagaagtgttccgtgggaaagagcagccctgcgtctaccaagcctggggcctgcagcccgaagattccacagcccctcccttcaggtgtcactgtgtgcaacggaggcctcggatgggcttggtcagggggtgaccagttgggcccagttcccagtgaggagggaatagatgcctggggtgggtctggaaagtgcacagtcagggctgacggccagccagagcattacaagctggttcccacctgtctgggtgtgccttatgccatattgtgttatcctggcaccttgtgacataccctccaacccccacccagggcggacctttgagggcaatgcagagaccatgctgagctcactggacactgtgctggggctaggggatgacacccttctgtggcctggtgagacacccccttactactccccatcctccagccccacgctcagcctgggacaagggccttcccaccccctcactcccctagaaagcaggccagcccagttcctggcccagaagcgacacagctccacctctaggggtagggacagagttctggcctcccttcttsctggagtgctggctccgtaccacctctgcttctcacactaccttcccctgccagtcagccttcagcctcttgggagccttgcaggccccagggcattccagagagatgtctaattgttcatagccttagcccagaacagaaaatagcctttgcttatctggggagaagtcagtaaatccactctgcatgtaaccattgccttgtggtgcataaaaacattcacagatatctgttaatcctcagaacatatattcattcattcattcattcatcaagtactttatgtgcacctaacacataccaggctctgttccaggcaccaggaacacagcaggtacatctgtgtctggtggcatcattgttctctccacttgccaaatgagaaaattgtgcctcagagaggggccatgactagaccgaggtcacatgctaggcttggtggagtcagggctagatgcaggcctgccagctccaggtctagtggttttttcccctggaactattgccaccttttcacccatggctgacttgtgcccacagttagagaagcagctcctggcagttggggttttcctggaagtgctgacctcatccctagttgtcaggtgcccatcagcctggacctggggcagggaagactgttctgactgtaccaccaatctctctctgctctgtgtctcaccctcatggctgtcggtaggtcatgagtatgcagaggagaacctgggctttgcaggtgtggtggagcccgagaacctggcccrggagaggaagatgcagtgggtgcagcggcagcggctggagcgcaagggcacggtgagggactcggggtccaggaggagctgtgtgggcaggcactcagccccaacgggaacccatccatgctgaccccaggcctgcgagcacctccccaaarctctgacctctttggcccatgggccctcaagtcagaactcctgaactccaggatggggcaggggtcgggtcaggcttctctgtcttgggtccatttcccagcttctctccaccaaacctggttcctctcacccacagtgcccatctaccctgggagaggagcgctcctacaacccgttcctgagaacccactgcctggcgctacaggaggctctggggccggggccgggccccactggggatgatgactactcccgggcccagctcctggaagagctccgccggctgaaggatatgcacaagagcaagtgatgcccccagcgcccccagcccagcccactccccgcatggggaggccgccaccaccaacacctcatcatccttctcatcgctaacaccaccamctccatcggcacccaagcgggcatcatccccccacactgctcaggggaggggagggatcaggcgatgagactgtgaggccaaaagaagggggcctgttggaggctgggaaccccgcagcgcgaggctgcctcatcaacggcaagaggaaaggaggggtctcgggacatctccagaccctaccaactgggagggtcccctcctccttccctactcctgggacggcagcaaggacatgggggctgctgttagcttctccgtcaggaggcctcatctcactgtagccctggaacccagggtccatcttgcccttcccccatccatggttgggaaagaagctcagcccctcacagtggcctcaagtgtgatgccttacaaaagcaccactcagatgggcagctggactctggtgtcctgagactctgccctcttcccacagcctccctgccccacccatccctgcaaagccatttttcagacagagccattcctaagaacactgaagggctggaatgctggctggccactctctgcctcagtggcctccctacagcctggaagaaggagggtcctgattgccaaggaaacctcctcattgggctaaggagacactggagtctggagtgtggagccccacagtcttgcaggtcacatgctctccttgcacatctggcctggttgtacccactggcctctgcctctgccctgggccaaaagggcccctccttgccaggggagagacagcyacggtcctctttggccgatgctgtattctcattttggcccttgttcttaggcccgtctgcccgccytcctccatctaacctttcctgttttatccgcagcccttttcttctttgagttagtaaagatttattctgtaacctgacactcatctggccctttgcagtttgccagccatattcccatgtgatttcccactggatccaggcccccatccggctggcaggagggggctctgacgtrcaggttggaaatcagaagtctgtgagagcgcgggagtgcatggcagctctgggtcccagacctggcccgacccctctgcttcacctccagctctgctgctcctctactcttgggtcgagatccctttggagccacagcgaggaaccctgtggtcctcaggcaggtgtaccttgagtcagccaggagccctcttttcctgtgtcaaagcctgccctcgggctctgctcacctctggtgaccctccaagatgcccctgccctcagtttcccctcatgatctggcctctgcccccttctctagccacagcctctagtacactttagcaataccaccagactagttagagttccccactcaccaagcaagacatgcagtttcatgcctctgtgccttcgctcatgctgtttcttccgactggaatgccttcccctgctcctcctgccttgtctgcctggcaagttcatctctcacgatcccctcaaaggccccctcctccaggaaggcaacccctgtgcccctcccctccaggctacctytgcactttgtcaatgcttctcttgtggcacttatcacactgtattttacttgtttacatgtttgtctccccttctagactgtgaatccttaagggcatggactgtatcttatgcatctctgtatttctgcgcctagcacggtgcctagcacacagtaggcgctcaataaatgttgaatgaatgaatgatttaatcaagacttgatcacccaacagcttgtctttgttgctacatgagtgaaaacagcagagaactttctcacagttttcccatctcagttccaggcctgctaacttgcagttaggcacttcaagagttttgatcagaaatgatgcccaaaggctgggcgcagtggctcacacctataatcccagctctttaggaggctgaggcgggtggatcacaaggtcaggagttcgagaccagtctggccaacatagtgaaacctcatctgtactacaaatacaaaaaattagccagacatagtggcaggagcctataatcccagctactcaggaggctgaggcaggagaatcacgtgaacccaggaggcggaggttgcagtgagccgagatcgcaccactgcactccagcctgggcgacagaatgagactctgtctcaaaaaaaaaaaaaatttttttaaaaagagagagagaaatgatgcctaaaatatgttcttcccaagtcccatgggcatttgttcagggtttacgatttgcttatctcaatgtttcccaaagcttgagatacacaagtgtaccactggccaaagtagggtggctgtacatggccacagcacagcaatcaattggacttcaaggacacggtcttggcactagtctgtctttaatgtctttggaaagaaagacccgggatccaggttcatactttagttgggaaatgtctgtagttaagctttaacaacatcgttttgttttcattatatttatatttgggttcaatatttatttttgacaagtgacactggttttcagttcataaaaatgattaaagggccgggcgtggtggctcacgcctgtaatcccagcactttgggaggctgaggcaggcggatcacgaggtcaggagatcacgaccatcctggccaacatggtgaaaccccgtctctactaaaaatacaaaacttagcaaggcatgatggtgagcgcctgtaatcccagctacccaggagactgaggcacgagaatcgctgaacccgggaggcagaggttgaagtaggccaagatcgcaccactgtactccagcctgggcaacagagggagattctgtcccaaaaaaaaaaaagatgaaatttgggtggggacaaaaagccacaccatatcattataatagaacaacttatattcctttgggtatataaccagtaatgggattgctgggtcgaatggtagttctgtctttaggtctttgaggaaacaccacactgtcttccactttggttgaacaaatttacactcccgccaacagtgtataagcgttccttttactctacaacctttccagcgtctgttattttttgactttttaataacagccattctgacttgtgtgagatggtatctcattgtggttttgatttgcatttctctaatgatgagtgatgttgagcttttattcatatgtttgttgtccacatgtatgtcttcttttatttatttatttatttatttttaattgatcattcttgggtgtttctcgcagagggggatttggcagggttataggacaatagtggagggaaggtcagcagataaacaagtgaacaaaggtctctggttttcctaggcagaggaccctgcggccttccgcagtgtttgtgtccctgggtacttgagattagggagtggtgatgactcttaacgagcatgctgccttcgagcatctgtttaacaaagcacatcttgcaccgcccttaatccatttaaccctgagtggacacagcacatgtttcagagagcacagggttgggggtaaggtcatagatcaacagcatcccaaggcagaagaatttttcttagtacggaacaaaatggagtctcctatgtctacttctttctacacagacacagcaacaatctgatttctctatcttttccccgcatttcccccttttctattccacaaaaccaccatcgtcatcatggcccgttctcaatgagctgttgggtacacctcccagatggggtggccgccaggcagaggggctcctcacttcccagaaggggtggccgggcagaggcgccccccacctccccaacggggcggcggccgggcggaggcgcccccaacctcccggacggggcggctggccgggcgggggctgtccccccctccctccctgatggggcggctggccggccgggggctggaccccgcctccctcccggacggggcggctgtcttcttttttttgttttttgagacagagtctccctctgtcaccaggctggagtgcagtggtgcgatctcggctcactacaacctccacctcccgggttcaagcgattctcctgcctcagcctcccaagtagctgggactacaggtgcatgccacacacccagctaatttttcgtatttttagtcgagacagggtttcaccgtgttagccaggatggccttgatctcctgaccttgtgatccgcccacctcagcctcccaaagtgccaggattacaggggcgtgagccacctcacctgccaatttctttctttttttttttttttttttgagactgagtcttgctctgttgcccaagactggagtgcagtggcacgatctctgctcactgcaagccccgcctcccaggttcacaccattctcctgcctcaggctcctgagtagctgggactacaggcgcccaccaccacgcccggctcattttttgtatttttagtagaggtggggtttcaccgtgttagccaggatggtctcgatctcctgacctcatgatccacccgcctcagcctcccgaagtgctgggattacaggcatgagccaccgtgcctggcctcaatttcttattcttaataactcctaccacattcctccctgcggcgatatcacgctaactgctgttaaggggttttgggcaacgactctttctggctatttcctactgaaaagggatgttgaatggggaacagcagccagggctcctgctggggttgatttaggggttcttggaagaatggcgtgtccgtgtgtggttcagtttgcagcaccatttggggtttgattgcttctaggcgagaagaaacaatttgagttatagtactgagtagacttcgtccaaatatcaatacaagacatataagcaagagagggcttaataaacggattaaccattccataaagaagactgtaatttattaaagagggattgtagccactgagggctgaagctggcattttccctgagcctgttaataattttgattttatctttaggtacctgtagattttcctttactttactaggtgttaatccaaaagcagcatgtttcatttaaaagtgcatcactagggccaggtgcggtggctcatgcctgtaatcccagcattttgggaggccgaggcgggcgtatcatgaggtcaggagatcgagaccatcctgggtaacacagtgaaaccctgtctctactaaacaaatacaaaaaattggccaggcgtgctggcgggcacctgtggtcccagctactcaggaggctgaggcaggagaatggtgtgaacccggaaggcagagcttgcagtgagtcgagattgcaccactgcactccagcctgggcaagacagcaaaactccgtcccccaccaaaaaaagtgcatcactaaacccaattaaaaagtcctagctgacttagtgatagtaaaacttttatgcttcctttttgtcaataactattatcccggttataaggataataattaagcaaaataggacagcaatggaaactgtccaatattttagttagaaggtgctactgtgtataacactattgcaaatagtagagtgaggacagcaatttccacaagtgtagtgtggtagataatttccacctaatattttacttgccggccggacgcggtggcttaagcctgcaatcccagcactttcggaggccaaggtgggcaggtcacctaaggtcgggagttcaagaccagcctgaccaacatggagaaaccccgtctctacaaaaaaatacaaaaaattagcggggcatggtggtgcatgcctgtaatcccagctactcagaaggctgaggcaggagaattgcttgaacctgggaggcggagattgcagtgagccaagattgtgccattacactccagcctgggcaacaagagtgaaattctgtctcaaaaaaaattttttacttgccaagatatagaattccccttttagggtctctgaagttccttggttttattttcccaaacaaagaaacctcccggttatgagcaccttactcactttctttacctggcaaaatttgcaagataattgcccagaactagagtattgattcacctttttaccttacccatcgcttttttttttccaagctgcagaagatcacctcttgattcacaggaataagcagggttagtctaaaatgtaagcaaaaagtttaaaaacaattaatgaaactaggatttaatgacaaatgtatgataagctttggatcaaaatttttctcttcagtcctcatttttggtaagcactaattatgaataaactttagtccttttagaaataaattatcagggctgcaaaagaaatagcactcaagaccaggtgcggtggctcacacctgtaatcccagcaatctgggaggccgatgtgggcagatcacaaggtcaggagatcaaggccatcctggctaacacggtgaaaccccgtctctactaaaaacacaaaaaattagccaggcgtggtggtgggcgcccatagtcccatctactcaggaggctgaggcaggagaatggcgtgaacctgggaggcagagcttgcagtgagccgagatcgcaccactgcactccagcctgggccacagagtgaaactccatctcaaaaaaaaaaaaaaaaaagaaaaaagaaaagaaatagcactcaaacataaatttaattttctcagcaaggcaattttacttccatacaagggtgtgtctcacggatggagcaatggcgagagcacacctgaacaagggaggggaaggggttcttatcctaactcagctagtccctactgctgtgtctttcccctattggctagggttggaccacacagtctaagctaattctgattggctattttaaagagagcaggggtatgagccagagtggtgggataggtagtttggcaggaaggatggttacagaacaggtgactcaggatgactaacaacagagcaggtgaccaagggtgactaagttcagagcaggtgatagaggctaggagggggttgtttactgtaactaggggcaaggagatgtaaagaacgagaaactttaaaatgaagaacaaagaacaggagagctgaatatactgatacattggttctttgaagaggatctcagaactcattgtgcttaacaatttataggctaaaacctttgaagaggaatttattatatcctacaatcttatacttggcctgattatttgcgtaaagtgcagcaagaatggttatttttacttacataggccttttgcattggctttaatgaaactctgtttcacaaggaatttcagataagacttttaaagccaagcccagccatgggtttgtatcctctaacacctgtgagttgggtgatcctctcttgaggtcccaagataaactcagagcttccagacctgttacaaagttatgtgtctgttcttttaccagtaccatgctgtttggttactgtggccctgtagtgtagtttgaagtcaggtagcgtgatggatgcagctttgttctttttgcttaggattgctttagctatttgggctcttttttcatctgatattaattttaaaatagttttttctagttttgtgaagaatgacaattgtagtttaatggggacagcactgaatctataaattgctttgactagtatggccattttatgatattgattcttcctatccatgagcgtggaatggttttccatttgtttgtgtcatc

SEQ ID NO: 93822 - DNA, 33045 bp, Homo sapiens
  misc_feature (1)...(33045): n = A,T,C or G
agtgtgtactgcgattctcccagaacacattctcctaggccgatctcttccagatctgtcccctccctaactcttggttcttgcatccctgaagcatggtctcccatcccctactagcagacatagagccttagatcaggaggagccagtacctcttgctcctgttgggcttcacatttattattcatctgatctgcaagcctttgaagcaagagatttttagcatgccttatatttgaggaaaacaggcttggagaagctgcatggcttatggtgtacagttgaggttccatcccttttctgtgaacctccattctgagcatacgtattcttgggcctgcacaaagagccctgggaaactggccttgcttcttggggtaacaggcctctcactaggcctgcaggcagtgatgtgttggctctcgtcagtaggtgggccagcacgggcactcatcagtagaagatgccacgacagccatggagctctaccggctggtggaggtgcagtgggaacagcaggaggcccgcagcctctggacctgccccgaggacagagaacctgacagcagcacagacatggaacagtacatggaggaccagtactggcccgatgacctggcccacggcagcagaggaggagccagggaggcacaggacagaaggaattgagaagggggcggggctccctggctgggcttccggtgtggccggtaggaagtgggggccaggagagcagcgggcactccttcctgggcagggtggggcaggatgcagtgagccagccccagggccagaggagttggggtcatctgttaccttgacaccctctgcacacagcatagccctctctctctccagggctgttggttctttctcctgactcctgtggttttgctaatggcactttacagactccatggagatgtcaggtggaccatcttctagggcccagcaggagtagggaatgtgccaacagactgcccaggttgccgtggccttccccaccccccagatctcctgagtcatcatgctgtgctaatgaaagggatcatatcatcctctctggggatggtgggtgggggtgtcaatatcctggagctcccttaccccaactcaatgacttgggggtaaagttctcttccttttgttgcctacctcttcctccactcatttgggttcagaataaacatgccctgaagttaaagaggagttaagtcctaaaggaggcatttcttccccacctccctgacctggaactctggctacagccattgtaggaactccgtgcctggcctgtcagctccctgctaggctacagtggaatagcagagcccacaggcttctcgtggggagttggctccttaacatttcttggcaacagaaagccccaggcacagctcagggaggagggaaggcaggtaagctttggacgagaactggcatatttattttgacccaaatcagggatttccccagtccacccagtactgggctcttaagcaaaagtctgagaaacaagacagtggtttgaattctggggcctttgtgtaggattgtgcctgacctttatttatttattaacagcagggccactcgtctagggcagtggagtctgcgtgtctcctggggctggggcagggcattggcagttatgcagtggccctgaacctggtctggtgcccccgaacctggtctgatgccccctcagctctttgacaatcactgtggctgttgggttttctcctatttctaaaaatgttctcttctttcctaagtgacagttttgaagtattggataaccaagagctcaggtcacacagaccttggagccccatctttgcttgcagcttagctttgagatactaagcaagcgagggacttcactcttgagcctgttttttcctcatctgtaaagtggggatagtggtacggcctacctcatagggttgtaatgagcactaaatgtgaagtgcttggcacagtgcctggcacatggtgagccacagctactgtgagtttctgtttatcccccttttttttttttaagcccattgtttattctttgagaatttgttgtaacttcttcaggataacacctgagtccacaggctgagcagctgtggcccagacagaactgctccggcttggctgttccagcaggtggggcgctggcctcggtgagggcacagcagcaaggttcacggatatccgtgtgtcttgtctgtggccaccaggcacaggtttggcttccggtcagtgtcccgacactgtgcgggaggtgacaacagagcaaagcagcgcaggggtcagggaggtacagacactgctgaaatcacactaccccaccctcagctgaagccccacgttccacaaacttggggtcatagattgtccagtcactggctccctccctgtcagcacagcacagaggaaggggctaactgaatcttttaccacttctggcctggctccagaactttgttctagattccttaaaagtcggtagctgatgtcaaactcaattgagcagtagctttgatcccttggtctgggggtcgaaggaagatggcgctgttatcagcggggaaatgtactatttaagatcagctttgttgtaaaaccatttgttctagaataaaactcaattggaaacgtgggtgaagtggcccttcctgtgaattctcaagctgggattggagggtggctcattgggggtttgggagggggactggggcactaagccttgctgggtgctttggacttcgagaaggcagttttcaagaggatgcagtgggctccagcaagaaactagcagagctacagaatttagataatttatttcttattgccctattacagagcacaagttttgtgttttgttttttgtttgagacagggtcttactcctgttgcctgggctagagtgcagggtgcaatcatggctcactgcagcctcgacttcccaggctcaggagatcctcccacgttggcctcccaagtagctgggatgacaggcatgcgccaccccgcccagctaatttttttggtatttttagtagagacggggtttcaccatgttagccaggctggtctcaaactcctggactcaaggaatccactcacctcggtctcccaaagtgctgggattacaaacaggagccatcgcacctggccatatttgttttaacttttttgtttctccctgaagctatgtactcacttaaaaaaagtttttaattgtagtagaatacacatagaaaatttactatgttaactacttttagtgtacagttcaatagtgttatgtctgtatccacattgctgtgcaacagatctcgaactctttcatcttgtgaaactgacactttccatttcccccttttttcttttattccttttttttcttgagacagagtttcactcttgttgcccaggctggagtgcaatggcgtgatcttggcttaccacaacctccacttgccgagttcaagcaattctcctgcctcagcctctcgagtagctgggattacaggcatgcgccaccacggccggctaattttgtatttttagtagagacagggtttctccatgttggtcaggctggtctcgaactcccgacctcaggtgatccccctgcctcagcctcccaaagtgctgggattacaagtgtgagccaccgcgcccagcaatttcccccttttttcaacccctggcaactaccattctactttctacttctatgaatttgactagatagctgatacaggtggaatcatacagtatttgtcactttgtgacgagcttatttcacttagcacagtgtcgtcatccatgttgtggcatgtgtcagaattttattttttaagagactcttgcccaggctggactcaaactcctgggctcaagttatcctcttgtctcggcctcctaagtagctgggactacaggcatgtgcccccatgcctggcaactattttttttatttttttttttagagacggggtctcattatgttgcccgggctggtcttgaattcctggcctcaagtgatcctcctgctttggcctcccagcatgctgggattacaggagtgagccactgcacctggctagaattttctttttaaggctgaatgatcctttgtatgtatataccatgctttgtttatccattcatctgtcagtcaacaatacttaggttacttccccccttggctgttgtgaataatgcagctatgaacatgctgaaagtgctcccaagtgtacaaatacctctccaagaccctcctttcaatttatttgaatatatacccagcaggggaattgctggattatatggtaattttttttttttttttttttttttttttgagacagagtctcactcttgtcatctaggctggagtgcaatggcgcgatcttggctcactgcaacatctgcctcccgggttcaagctattcccctgtctcagccttccaagtagatgggattacaggcgcatgccaccacgcctggctaatttttatatttttagtagagacggggtttcaccatgttggccaggctggtctggaactcctgacctcaggtgatccacccgcctcggccttccgaagtgctgggattacaggcgtgagccaccgcgcctggcctatagttttttttgaggaactgctgtgctgttttctttagtagctgtaccattttacattcccaccaacagtgaacaagggtttcagtttctccacgtccttgccaacatttttttctgtttttccatagcagccatcctaatgggtatgagatgatgtggtttggatttgcatttccctaatcattagtaatattgagcatcttcttacatgctttttggtatacagttcctttttaactaattttcttaacatgtgttttgtaatatgtatcagcatagttttacatgtattaaaccacatgaaattgctaatattctagttttttgcttttcgtttttgtttttgagacagggtttcacttgtcacccaagctggagtacagtggtacagtcttggctcactgcaacctcaacctcccaggctcaagtgatcctccagcctaagcctcccaagtataatagctgggactacaggtgcatgtcaccatacctggctgattttttacatttttagtagagacgaggtcttctatgttgcccaggctggtcttgaacccttgggctcatgggatctgcccaccttggcctcccaaagtgctgggattacaggcgtgagccaccgtgcccggccacactgtttcttatggttcaacctttagtatatacagttgacccttgaacaacatagggattgggtgttgactccccacacagtcaaaaatgtgcatgtaacttgattccccaaaaattcaactaatagcctacttttgattggaagccttactgataacaggtagccaaataacacatattttatatgtcatatgtattatatactgtattcttataatcaagtaagtgagagaaaaaatgataaggaagataaaatatatttactgtatttatcggtattgtaaggtttttactgtatttacatatgagatgaaacatctgtctgaaatggcagcaaccacagctgtggacttcaatctgtggtacatatcaagcaattcagctttttcttgtaatgtcacgacttgttttctgcttcttgggagcacttccagcatcagtagtggcacttcatatgggtcccatggtgggattcaaggtttacagtattgcactaagcatgatgaaaaataccacaaaaactgcaagaaatcactttttccatcttactgggataccagatgtcctggatatgaactgctgaagcggggatgggtagtgtcacacacgttttaagcagatacttgcagcgcttgagctcactacagtaacaacaggaagtggctacattaacagcacactgtgtactatagttaattttatgcagttacggtttcagactgcatcccgacattggtttacatttctcttgactgagaatggtgccacgtgtggtctgtaagtaggtaagttttgttaagttttaccttttaataatagatgtgcatattttatggtagtaagtgataaaatagactagtatttacatgtattttatacattcatgacataagtagcttcttaatttctttgatatttctaggctgtgcaattcatctgagttttttcaaattgttgaaaaatctctcccaaaatttccaatatatttattgaaaaaaaatctgcatgtaagtggacctgtgcagttcaagcccatgttgttcaagggccaaccacaatttaggaatacacatacacattttaggcgtacatgcccagcaggactggagatggctggactgggagagcgtgtcccttgtggggagaggggcctctcgccctccagtgtgagttgtctcagcctgaggccagtgctgtggatccagagagggccacagagtggccgacttgtacctgttatggtcattacaggtggtcagctgtagctggatgtgtgccttgaaaggctgacaagtttgccctgagtgactcacctactgtcacctgatccaacaagatttgtgggcgtagcctgccgatgggtgacgccagttaaaggtagagcgtcggcaccgggaaaccctggctggggtcgggcttctctctgggtactgggccaccggtgcctggcgtccaacatcagagcacacaatacacttgaaaaacagttcagctggacccaggcagggttctaggtgctggggccccagytttgaactaaacagatggcagggggaacagtaaatgaacaagtaaaatacagtttcagagggtgctaattcctatgggaaaaggccagagaaggggataggaagtaaacttttagtttttaaagacaaggtctccctatgctgtccaggctggagtgtattggcactgtcatagcctcaaactcctgggtgcaattgatcctcccagcttagtctctggagaagctagcactacaggtgtgattcaccacaatggattattttttaattttagagatgagatctccctgtgttgctcaggctggtctcgaattcctggcctcaagcaaatccgcctcagcctrgagtaactgggattatagacactagccatcgccctggcaggaagtgcggttttaaatagagaggtcagggacagcttcatggaaagacgtcatggaatgggagcaatgtgaccccccaggccacattggaagacctttcaagagtaaggggacagcaaatgcctgggccttgagacaggagcatgaccagaatgttggaggaagacagaaagagccagtgtggttggaagtgtgggaggtgggaatggtaagggcatgggagaggggcttacctttgtagcactgcctgtctcttccacctgaagcagagacctgatcttactggtccctctggccatcagacctagtccttgggagatgcagggggtttcagaacaacctgctgatggtttggcagaagtcaccatgtgcataaaccaaagccctggatgtgggtttaaacctaaaagaaaggccttaaattggatagtgatgcaagatgaggttgggaaggctggtggaytgatggaagagggtctggaaactgcctggagttgaggtttgattttttttttttttttttttggacatcaggaaatcacaaaatttcttgagcagagaagtgcctcggtgatgaacagtacaagagattagattttgggaaatgtaacatggtaggactcaaaggacccttttgagcagggcatgaagatggaggtgggagacccgggagcgactcctgcggccacacaggccaggcaggtgaggactagggtagggcttccacaggaaaggggaaacggtaagaattagaggcagctcaggtgagacagagcaggcacagaaccatggggaaaatattggaggagtgggatgtgttctgactragacccgaggaggtgagcagaggtggaggyatgaggggttgcagcaaacatgttcctgtctgaggagcaccacggggcactggggggtcctatggggattgtagaatcaaacctatgattggatctttagggggttactttttaagtgcatgtttccataaagtaacaggaatgttacttcatttcctcctaaatcagggtaacctttatgcatttsaaaagcataaagtccccacacagtctgaattaaagcaaaagttgcttattcaggatgggaatcaaaaactctcacacctcaaatttgcatccagtgaacagtaagcaggagcagggctttctcatgaagacgtatttcagtctttggttttatttttgaggtttgttaaagttgggcatccaaatcccacttggtgaaaatactacagacctggggaagttacttttcaaaccacagatcttcatgacactgggaggcagtcagattggagggatcagtgtggattctgcacagatctggggtaggaggcaascgtgggkaacgctcagcttattgttggatctcaccacagtgaaagacaagcacttccctcattgaaagttgattttctttttgccccagttgtaactcatttgacattcactaaataccaagccctccctatctggcaggcactgttctaagagctcaaagtcctagcctgggagagtgtggacccaaggaagtgtggccgggctggtggggcctccccgaaggcctgcttctccttcaccctcacagagtcagccccactggaggcagagctcattgaggcatctggaacccacggaggcctgtaagggctccctcgctgctccttgccttccctgggttggaagtgggggctagccactcccaccacaagtttctcctgcccattccaataaaagcctgtatgtcccaagagccagcttccctaccccataagagaccactgagtatcagactggtagcaggctccagaagttagttgtgggacattccctgagctccagtcctggggatgtttattctctgggcggagggtgagaaaggaaacaaagatgttgcaatccactccacgaacgtcaaatgcgtcatctgaggagggggagggccggggcaaaggaggggcaccctgacatggagcctgccagctccgtcagccctgactcggcccggagctgagctccccacctgccggtagcccaggagatggagcagcccagcccacgtgcccggccttccgcccctgacttcacttgataacaaactagaaactgaaacagggtcgggatgccgatgccggcttggagttagagatgagtcaccgctgagagcagctgcagtagctgagcagtggcagcagagaggcagacgtgagctgagggcgcagaggcaggcaggtgagagcgggagctggagcagcagctggggaggcagcgggaggggccttcccggtccccaggctgcggggcaggccagaggccctgggacacacgggcagggtaaggcaggggatgggggaggcaagaggccagcttccactgtggccaggtggtgtcggaaacaaagggcagggcggagggtaaggccagctggggttggctgaggacacctggaggcttggtttgcccaagcgtgagaccgccccccatacccctctctccagcatctctgagggtccccaaggarcatggctgggagccgtgaggtggtggccatggactgcgagatggtgggggctggggccccaccgggagagtggcctggctcgttgcagcctcgtgaaygtccacggygctgtgctgtacgacaagttcatccggcctgagggagagatcaccgattacagaacccgggtcagcggggtcacccctcagcacatggtgggggccacaccatttgccgtggccaggctagaggtgagtgaaggccmggccagcaggggctttggaaataacccctctcccacttccctggcccctcttccctggtgcccatctgtgacctgtgaccccacttgtaagatttcccacactgctgttgggagaaagccggtggtgtctccatcacatcctggagaaggcttcctgtcttcagagaaccatagactcacatctggaagccgcctttggggcatctatctggatctggtccaacttgccggtcttaaaatggggaaactgagttcccccacacagtgacttggggtctacattccccattcttccctctaccccaggctgccactggtgagacctgtggggaaatgagaggattcttggctgaggctctggcaagaggctttggccctcccagtcctggagaacaggctgagcctcgggctgaggaccttgctctcaggctagcattctgacccagagtaggctgtctgctcagtttgaatcctgagttcgtggtccagggatttcctgcactcttgctcttagctgattgtgaggtcatctccccgtctcactttctgtttctctgaattactaagtggaaagcaaaacttaaaggtgtcaacacggttagccacccctgggaaatctcagaagggcaggcgagctcgtcagtttctagacaccatggtagggtttgaggaagtccaagaagaacacaggttcctcagcagcacacacccaatccgtgccaggctccaggtgctggggatgaaatgacaacaatagctactattgactgagcactcactatgcactggccgctcccctaagcactggccattcctgagctcattcactcctcacaaacagccctgccaggcaggtcctcaggaactgttaacgcagagttaagagggtcagtttcaatctcagttcccattacttaacagctaaggtaccttggacaagttactcaacctctttgtacccagtaaaagaaaagaaggataatagtagtagcaactttgttgggttattgcgaggattgagaaagggtctagatagagtgcctaaataggtactcaaaaaaatgttagctattggctgggtgcagtggctcacatctataatcccagcacggtgggaggcggaggcagatgggtggcttgagctcaggagttcaagaccatcctgggcaacatggagaaaccccatctctacaaaaaaaagtacaaaaattagccgggcatggtggcacatgcccatggtcacagctactccagcagctgggatcacttgagctcagaaggtcaaggctgcagtgagccaagatggcacccactccagcctgggcaacagagccaggaaaaaaaaaaaaagttaactgttttgattgtttttttgtatgtctgttttattattattttttttttaaccggagtctctctctgtcacccaggctggagtgcagtgacatgatcttggctctctgcaacctctgcctccaggattcaagtggttctctggcctcagcctcccaagtaactgggactacaggcacccgccaccatgcccggctaattttttttgcatttttggtagagatggggcttcaccatgttggccaggctggtctcgctcgaactcctgacctcaggtgatccgcccacctcggcctcccaaagtcccaggcatgagccaccgcatctggccatggttgtttaccttattatccccatattacagatgaggaaactggggctcgcttgattatttgttagggctgccataacaaagcaccacacactggtggcttaaacaacaggaatgtcctgtctcggggttctggaggctgcagtctgagatccaggtgtcgcccaggttggttccttttgagggttgtgagtgggaatctgttccctgcccctctcccagattctaggggttgttgtcaaagctttggggtaccttggcttatagatgcctcactcagatctctgccttcatgttcacatggcattctctctgtgtgtgtccaaacttcctctttttatttttattttttatttttgagatggagtcttgctctgtcgcccaggctggagtgcagtggcaggatctgggctcactgcaacctctgcctcccaggctcaagtgattctcctgcctcagccttctgagtagttgggactacaggcacgagccaccacacccagctaatttttgtatttttagtagagatggrgttttaccatgttggccaggctagactcaagygatccgcctgccttggcctcccaaagtgctgggatgacaggcatgagccactgcacctggttagcttcctctttttttttttttttttttttttttgagacagagtcactctgttgtctaggctggactgcagtggcacgatctcggctcactgcaatctccacctcttgggttcaagcgattttcccgcctcagcctcccaagttgtagtataggcgtccgccaccacgcctggctaattttttatttttagtagagacggggtttcgccctgttgcccaggctggtcttgaatgcctgacctcaggtgatctgccctccttggcctcccaaattgctgggattacaggtgtgaatcactgtgcccagccaacttcctctttttcaaaggacaccaatcatattggattatgagcccaccctactactccagtgtgacttcatcctaccttaactaattctatctgcaacgaccttatttccaaataaatcacgttctgaggtattgggggttaggattttaacatatgaatttgagagagcgggacacagttcaacccataaactgagtaacttacgctgttaagatagatggaatatgggacaactgctcaggaatccaaactcaggcttacagtctctagaactatgctgtccagtggggtccccagcagccatatgctgctagtagactgaattcagacctggagtgtagctggtttgaactgagatgtgctgaaagtgtaaagtccacactggattttttgttgttgttgttttgagacgaagtctcgctctatcgcccaggctggagtgtggcggcgcgatctcggctcactacaacctccatctcccaggttcaagggagtctcccgccttgacctcccaagtagcctcccaagtagctgtgcaccaccacgcctggctaatttttgtattttcagtagagacggggtttcaccatgttgccaggctggtctcgaatgcctcacctcaagtgayccacccacctcagcctcccaaagtgnnnnnnnnnnnnnnnnnnnnnnnnnnnnnnnnnnnnnnnnnnnnnnnnnnnnnnnnnnnnnnnnnnnnnnnnnnnnnnnnnnnnnnnnnnnnnnnnnnnnnnnnnnnnnnnnnnnnnnnnnnnnnnnnnnnnnnnnnnnnnnnnnnnnnnnnnnnnnnnnnnnnnnnnnnnnnnnnnnnnnnnnnnnnnnnnnnnnnnnnnnnnnnnnnnnnnnnnnnnnnnnnnnnnnnnnnnnnnnnnnnntggtgcatacctgtagtcccagctactcgaggaggctgaggtgaagtattgcttgagcccaggcagtttgaggctgtactgagctatgatcatgccactgcactgcagcctgggtaagagagaccctgtctctattaawwaataataataattaaaatattaaaaagagccataaaatgtctcaataacttytatattgattacctgttgaaatgatagtattttggatatgttaggttaaataaaacgttaaaattaatttcacctatttactttttacgttttgaaacatggctgttgggtgatataaaattacatttgtgggccaggtgcagtggttcacacctgtaatctcagcatttgggaggctgaggcaggtggatcacttggggtcaggagttcaagaccagcctggccaacatggtgaaaacccatctctactgaaaatgcaaaaattagccgggtgtggtggtgggtgcctgtaatccaagctactcaggaggctgacgcaggagaatcgcttaaacccaggaggcggaagttgcagtgagccaagatcgtgccactgccactccagcctgggcgacagagcaagaccccatctcaaaaaaagaaaaaattacatctgtggcttgcattatatttctattggacaacactgttctagaagtacagattgagtagcccttatctgaaatgctggggaccagaagggttttggattttggatttgggatttttttggattttggaatatttgcattatacttactggttgagcatcccaaatttgaaaatctgaaatttgaaatgttccaatgagcatttcctttgagcgtcatgttggcactcagaaagtttaggattctggagcatttgtatttgggatgctgtacctgtatcaacagtacagtgtgggaaccctggagatggtcamagtacatcatcttggttctggaaagactccgtgaagctggtggtatttgaaaggggtggaggagagtctatgtagggaattaagtgggccatagggagccattgaagattcttgagcaatgcatgggaggataaaaaccagtttcaagaaaactagaatgggaataccatgcaggatagatgggagcgagaaaagagatgacggtaagagtcagaggctgggcatggtggctcacacctgtaatcccagcactttgggaggccgaggtgggcagatcaccagaggtcgggagtttgagatcagcctggctaacatggtgaaaccccgtctctactaaatatacaaaattagctgggcatggtggcatgtgcctgtaatgtagctacttgggaggctgaggcaggagaattgcttgaacccgggaggcggaggttgctgtgagctgggatcgtgccactgcactccagcctgggcgacaaagtgagacttagtctccaaaaaaaaaaaaaagaaaagaaaaaaaaaaaagagtcagaggccctagggagcagttacaagggcctgcatcatctttggcagacagagaattggagtgaagaaaacgttaggaaaggaagaaaacgtttggagagtcaccagaaaggtgagggcaacatgaagaagaggtgggagtctgttcaggtgctgatgggaggcccagggacaccacaaggagctccccgccctcagattcccactgagcagtcagggtgggcagtatgtccctctccttcctccttgtccccaatttccctccccatcagacagacagaaaggggcagaggagcccagagcagggagaaaggaggcagtagagcagtacctctccsagtccctgtacatccagacctggaaaaccgcaattccctgggcgcccttgagcattggcctcggggcctggacgcctcagtcttcatccacatttggtgcagaaatgcttttgtttctcagttagaggatatgccaactccactctttaagcgtgtgacacggaaccctgctcagactgggcacttgatagccactgaacgatgaggcaggggttcaaagaccaggcaggtctttggaaccacatccgggcttctcagttcctgctccatcacctataggtttgtacaattgtcagcaagttattgaacctttctgaggctccatttcctaatcataaaagagaactcctagtgcctcctccctggtctcatgcgggtcagatgccgtgacatggactgtggccctaagcgcggtgcctggttcacagctgatgtttgctaattgcacccatgaagagagaagggcagaaacccagtcccctctccgacttctcttgggaactgcggtcttcgatgctgaccctcgttttctgccggctgtatcttgtgtgcatgctgctctctccyactctgctgccagagaacttccctaaacctggctcagatcatcgccgcctcccctattaaaatatctcccatggctccctattgcctaaggttcccccagctcagcacctagcagtcaggctctccaaacccctatctatctgcctttcttgctttctctcatagctcagccattgcctaccatgcatttcagccaactcctagtctctcctatcccccatccctctccctagaaataccatcattctggcagccccaggccagaagagacctttatgatgcacttacccactcctgcccaccrtcgctgccccactggtccctagcctctggccctccttgctgttgctgatgcacatcatagctcgtccattcattcacaccatctgtctatttccacagctcttactatacactttatctgcccccagactggaacctgtgttttgcacacaggtgacttgagaatgtttgtgggattgaagttgaactgattttcataaatacaaaagagttctggcagctgcgtggagtaaaattgtctctgccctgtgttggcctttgctgttgagatgtggtgatgcatagccctgatgggcagggagcaagcacactgtctttagattgggctgcatgtggatccaatcccaactttgcctctggattgctctgtgtcctctagcttgttgctcaacctctctgtgctcccctaagtaggatcctctgtaacacagagatgattaaatagtacaggtgtatccagccctgtggcccaggtgctattctgagcacgtttcatactccccaccacaaccctgaactagtaccatcactcccattttacagatgaggaaactgaggtatgagactgagtaagctgtccaaggaagggatagagcagagactcagattctggctcctgagctggagctgtggtgttcagatcccatgctcagtgtgtgtgaatgcactctataaatgctaagtgtccaatgtatgtaaggggcgaggtcctgcatagcacatgggtggaaatgtggcccagtaatggtcattatttgtctctgtggatgaggacactgagtgtcaatttgttggaggctccggaggcagtttgatcccatttatcatccataatgttttaatcccaaagacagatcaggctcacgggcccccaaatgtgctgagggcccccaaagggcagaagcctaacagcccttttatgagaycccacaaggccaggtgacacctctcaggtgagtctagggttggccagcccttggtttcatgcaggcattattttgctttcttttttgagacagagtcttgctctgtcacccaggctggagtgcagtggcgcaatcttggctcactgcaaccttcgcctcccaggcttaagcagttctcgtgtctcagcctcctgagtagctgggattacaggcatgtgccaccatgcccagctcatttttgtatttttagtagagatggggtttcatcatgttggccrtgctggtcttgaactcctggcctcaagcaatcctcctgccttggcctcccatagtgttgggattataggcatgagccactgcgcctggctatgcaggaatttttcaaaggcccctcacctctccgtctcctcccagtaaggagtagtgaswgtgcccagccagcagccagcaatcaagtagcccatggtggccaggaggctccggggagtcccaagtccacccaggagtgctttaggccactgatgtgagtgggaccccccccccactccacccctttttatttattgtaatgtggcgacattacttttataatgtaagtgcttatgatcttctgacatctctgtgtctgaccattatatagaggggatatttagcaatgttgggagacatttctggttgtcacagtggccggtatctagtgggtagagaccagagagctcccaaacatctcacaatgcccagggcagctccctcccctgccacgcacacataacaaagaagtatctggccccacatggcaacagtgctaaggctaagaaaccctggtctataagagagcgccacaaatcagactgtcagcacaggagggaatccatgcactggagactggcgtccagagaggggcagtgatttgcctaaggacatacaggaagctatgatacaaatcactgctcagattcatgggtcccacctggcgagttaatgtttttcttcttcctttttaaaaaatctaacagtaatttttagtaacttgtaaatcagttttgtgagtgaattctcttttaacgtcaacccagcataaggaggggcatccaccctgagaagcaccgtggtcgcgggcacagatgcagacagaagggaagtcatggtagcttgtgaacagggagagrtttcagctgtagccagcctggtagcccttgcacaggtgggagtgtcctgttggggccctgccacctggcaggtccctctgggtctcagccagatgaaggaggaaggcttcaatatccagatttgccccagggtaagtggccttgtgggaaccaggcactagccggggggcggggacaccaggggagcttggcaggggacaagagcaaagaatggggctggagccactccagaaggtgatagtaagggacctgtcctctgtaagaacaagattcttcagggccccttactcatagcctcctctcctggcagccaagaatgaatgaatgggtacgtgaactagtgtataatggatgaatgaatgcatggtagaggcagcaggctctggactgctcagcgggattcagtgcagagatgtgcagacttgttagatgggaagaatcccctgaaacagttgctgacacccctccctggatatttcaattcagtaggtctgtgtagggcctggccctcctggatttttggatcaggcacatctgggaaatacttggagtagagtggaaacacagtggaaggtgtgtgcaggcagacagccgcacctggyctggcactcccctgcttgtgacctgggtgcacaccgccctgcgccccgctttgctggcgggtcagatggtatggaagtcaccgccttgcaccgttatcattgtgtgcctggtagtgccctgtcccttggtccttgtgctaataataacaactacagtaacaatgatggggtcaggtggatccagacacggcactgcagctttcagctgactagctgtgtgacttgggcaagccccttaatctctctgatctcgggctccctcctctgtaaaatggaattaagaataacctcattgaggagcttcctgaggaggtaaggaaagtgcctggcacagtgccaggctgctaagagatcaataaatgtcccatcccccagccccaccccagttctttccaggaatttgagagactcctccccctgtgtttgaaagtggcaaagtctggcacacttgcctcatgacactgactcagggcaggtcctgtggccagcaggtcacacagccccgaggccagcctgccagtgcctttctccgactcctgggctccagcaggtgcccgactccttcccttttcagacctgcctcagtctgtggagccctggctgctaaagggccactcaagcctcaccagtctgggccctcaccttacaaatgggaaaactgaagcccagagagggtctttgacatccctgaggtcacacagcaagttccagcatctcttccttcccagaatctttgtcccaaagagtggtgtctctttgctaaatagatggttctgttctttcccttcttcctcttctttcctcggcttgtcctctccctcttattctatttgtctcgtggtgagtcacatagtgcctcatgtagacccccacttcccctctccagactctcaggctcgggaagtgatgggtttcctgggaatccacaccatgatgactcgtaccttctacrtctgtgcccagctgtggctgcctctgggatggtggatgagttccttcagggctttgtgtgaactgggcctgagccaagcccctagatggggaaaacaggccacattgttcaggagcacaaaggatgttagcaagaaaagacacatgacccatggccgcccacacacccacatctctccacgccccgtgccatttctgcccgccgctgcgtgctgggyggtttcctctgcacagagtttcccttgagctgctactctgaggtcgtgtgcctgttgtcatcttttaaagcctcagttttgtcgccatttcccaggtgacctctagcacactcaagtttgagaagygctggtgtggttcaggagcagsgccccttcattctccagcacactctccccagtcctctaagtcgagcgtgagctctgtccagagaaggcctccaaccagaccatgtggaccgcggggcaggctggtgacactgcctgttgacagtggatggacagactgcttcccgcatagtgaccctgggcaagtcacatctcctctctgagcctcagtctcctgtggttgccaggggagaacatgtaaaagggaacacatgatgttccaggaggccgctggctatctagaaggagaagcaggctacggggaaggtgttaggcaccagaaggctctttcctggtgtacaggctaaggtcgtgggctacatgcagagaaggagacgaaggctgtcctagagctgtccaaagtgggcctggactagccacgagccgcccctttccctaatagagctcacatctgttctattttcaggtccccttcccatcctctccaacggcagctgagtgaaagcaagctgactggcctgtgtgaccagagcagggcaggctgtccatgtgggaggcgaggcgaggaacgcggggctggggcastcacagctgggcgcctgggctgctggaggcctggagtggtcgttcactcttctggctcagtgtggcagtggcaggcgggctctggattcatcccactggcttcaaggcctggctttgccactaactagccgtgtgactgtcccagttatcaaatggtgcttggcaaatcacaccaaaacttaccggttcaaacaatgtcaatacttatttcgctcggccacctgcagtttgggcaggtgctctgcagcaggacaggccgtcagttaaggcaccttgaaggctgggggctggaaccattggaaggtttgctcacccacctgtctggtggctggtgctggcctgccttggacacatcactatctcggtggcttttccccgtggtctttccagcatggtggctttggggtggccagacatttatttatttatttatttattgagacggagtcgtgctcagtcgcccaagctgtagtgcagtggcacgatctcagctcacttgcaatctccctcccaggctcaagcaattctcctgcctcagcctcccgagtaactgggaatagccacggcgcatgggtaatttttgcatttttagtagagacagagtctcaccatgttggccaggctggtctcaaactcctggcctcaggtgatccacctgcctcacctcccaaagtgctgggattacagacgtgagacaccgtgcctggctggtggccggacttcttatagaattgcggtcccagagagaagtcagaagtcatacagsccagcccatatgcaatgggaggggagtttgattccatcttttttaagaagagtgtcaaggaatttgcaaacttgttttaaaatcatcagagtaagcctgggcatgtcactcctctgcatttcagatatttcctttgtaaaactcagttaaatgcagtgctccctcctcactgttagttttctgtggctgccgtaaggaagccatcaacttagtgattcacagcaacacagatgtcttctcttacagttctgtagtttcgaagttcagcgtgggtctcactggtctaaaatcaragtgtcagtggggctaggttccttctggatgctctggggaagaatccatttcctcgccctttctggcttctagaggctgcctgaataccttaactcacggcccctccctccatcttcaaagccagcaacagcctgtttkcctcatgtggattcactctgacctccacatgtaaggaggcttgtgattatgttgggaccacatgggtaggccaggtgatctccccatttgaaggtcgactgattagcaatctaagttctgcccggaactttaattcctctttgccaggtaatgcattcacagatcctggggactagggtgtggacatctttgggaggtcattattctgcctgccataatagaattgttgggaagattaaacaacataatatacatgacgtatgttgaggcacgcttggcacctgggaaatactcaggatgtactaaccattgctcctacacagttcagctcctgaaggagtccaggtgggcttttggcacagaatgaaactatcaggtgtgaggagggtcctagtscaatctcttcttttcaaagatgatacatttgaagcccagggaggactgataatttgcccaaggtcacacagccagtcaaggagggattgctcccttgccagccccagccccacccagaagatgctgggtcatgtaggggtgggcacatgtcttcctggccagatcctgcagctcctgaaaggcaagctggtggtgggtcatgacctgaagcacgacttccaggcactgaaagaggacatgagcggctacacaatctacgacacgtccactgacaggctgttgtggcgtgaggccaagctggaccactgcaggcgtgtctccctgcgggtgctgagtgagcgcctcctrcacaagagcatccaggtgagaacctcctcgtccttctcctcctcccccatactgcttcataaatggcagggtctttcctttcctgtgcagcccagtctaccatgcgcgcagcttggcagggagccacaggcctgctatttcactccctcgaggggcagtaacaccactgcccaactgtgacagctctaccatgttagctccttgtgtcctgtgggtcagttctggtcacagtgatcagtagcaccactgtccatgtgagcgggggcgggcgggagggctggtttctaggggcatcagtgcaggcaggagctgcctggtggggtactgagcttctggaacaaccaggcttaatgagcccagggacagagcctgggagaaggccctgggtcaggcttaaggccccagactgagagccacagannnnnnnnnnnnnnnnnnnncccccctcccccacctcctcgctcttctccccttcttccccttcctcctcccctgtcccctccctttcctcctcctccctcatgccctcgcacacctcagggcagcttgcctgaggcattgatggtaggtcctgctgtgcctggtccctggctggtagagtgaggatgagggcagggaagggaaaacacccaacaaaggtttgcttttgttgttgaaatcaagccagttaccctgtgggaagtgaagcttgctcccaccatagaactctgggcaatgatgtaaagcacacacctcacctcagatatgtctcacagcaggggccggggaactgggatatttgtacaccagttcccatcagccaccagctgctgctgctcctgsgcactgattccgcagcacttctggctggtgggcaaagcaggcaggaaaaggcatacggatatggggggttgggagttcaccctgtgggaagggcagagggagaggcgccagacactaagagccagggctgtacacagggacccttcaggtcaacagctctttattaaacacctgctgcctgctctaggccagatcctagagacgcagggtgagcaagacccrtctctgtccctgagctcttggttggttgggaggtggcccttaaccagatcatcagcacacatggtaaggagtgtgtgacggagggaagggcagtgccctgggagcaggatgaaggatggggctggcagggcaggagaccagatctgaacagagcctggagggtcttagtcaaggagggcagaagaaggcatacagagtggggccaggtgagtcaaagcctgaggctcggggaggggctggggagcacggagcccgcccctagcctgctggcaagagctgtaggaatcatgtccggagtagggaacagggctgagtctgggcctgttagcctcaargcacataaggcacataagggccaggctgggcttttcctggagcccttgccgctctgtggctctcagtctggggccttaagcctgacccagggccttctcccaggctctgtccctgggctcattaagcctggttgttccagaagctcagtaccccaccaggcagctcctgcctgcactgatgcccctagaaaccagccctcccgcccgcccccgctcacatggacagtggtgctactgatcactgtgaccagaactgacccacaggacacaaggagctaacatggtagagctgtcacagttgggcagtggtgttactgcccctcgagggagtgaaatagcaggcctgtggctccctgccaagctgcgcgcatggtagactgggctgcacaggaaaggaaagaccctgccatttatgaagccctgtggagggtgctgggcacagttctctcattccatcctttaaggcaggtataatcaggcccatttcacagaagaggaaacagaggcccagaraggaaaagtgacttgcccacggtcacagagctcataagcaggggagctgggaattgcagcctggggtttgtctgattccaaatccggggctctttacctccccacttggtaataaagggtgctggtgctgcattctgcttctgttcttggcttccttctccatagagcagagtggtagaacacataacctccctgtgcctcagtttcctcatctgtcaaggatggtgacgggcaggtatgcagaggcacagcgcagacgacgccaccatgctacctgcttgctgattaatgatagggtgtccaagccaaaaaataaaactaaacattaaaaaataaaacaatacagcgtaataaccggcaacaagaaaaagcctttttgagctgggccgtctaaccaggtgtccccaacaccctgtctggagtgcctggaaaaggagcccctgtgagaacaggaagtcctctctcgacagagggacaccaagaaaacgcagccaggtccaacagcccgctggctcccatgctgggtaccggccaggacaccagggctgagcggggcatgcgaagggagatgaaaggtgactgcastgaggatttgccctgtgtactcgcctctgcaagatccacatctcagctgcacaactggctggcttgtgtgtgagcctcagttttatcatcagtaaaatgggggaataatcatatccagctcagaggtttaacttcagcctagtgcacggaagacatggtaaatggtcatcgcttctcccttgaatggaccgagggcccccgactcccatagcactaccccataaagtctaggctcccgacttcggcattcaaggccttcagtgataaatccaggcccaccatccgtccccacaccacctttcacacaccccctgcccccaccctcgcaggcctcttattttagctgcacrtgctctccctgcctccgaaatgcttgcggcctttcctttccatttattgacgcccttgtgttctctstgagcagcccttccctgtgtccctagctggagttcctcactccctcctcagtgtcctgaagcttcttgttagagctgctgcagccactgcgtgtgtctgacagcaagtctgcagcctctgcctcccttgcgggactgcaggtgacttgaaggcacagcctggttcccaggaggctggctttcgtgccactggccccagggctgaaggcaggccagctccagccacctgctgagtctcctaagtccagagtgtcagagacctcaagagactctcacccactgacccacctggggactctggaaatcgggatgtgaccagggaagaccctgtcacggggcctctgaattcagcctcatcccaagtccccactctatacttgtgtctgcagaacagcctgcttggacacagctcggtggaagatgcgagggcaacgatggagctctatcaaatctcccagagaatccgagcccgccgagggctgccccgcctggctgtgtcagactgaagccccatccagcccgttccgcagggactagaggctttcggctttttgggacagcaactaccttgcttttggaaaatacatttttaatagtaaagtggctctatattttctctacgccatcactgggtcctcttcttattcttctctccaagctgggttaacagtagacaggacccatttctgtgtgatgttaggagggaatgaagtcttatgctggggaggtgggcaagtatcaatttccttaatatcttgaatcctgtgggtccaaaatgtggcttggaaatctaagtagcatgtggcttaattactaatcccaccctttgctgttgcatcccagccctattcctggtgcatttatgcccagagaggtggcattatttcctggggtggcattcakctcctcttgagttggtgccacagcatttgtgggctttgaagcaaaggtacaggaaatgtcaagggtgccaccccggcaaccttgagcaagtcacccctcctatttgtaaaatgaggaaggaaaggtaacaaactgtggagtcagagagaagtaggttggaatcctctttgtcatttagtagctgtttgacctaaggtggtttactgaacttctcagtttctccatctgtaaaatgagaattctagcaactcgtagggtatttgtgagatgttgcakgcaaagcccccagcaccatgcctgtcctagcttaagcacccaccaggtgtcgataagtaattgttcttccctggactgcctgcacatctagggcaccccaggaagagtcaccgcactctgtttcggggctcggctctctgaggggagggcatcctgtatggggaggagggtctggaccagagctgtccctgatcgctagaatcaacggcagaattcttgttattttaataataattaataatttagtgcttccactaaataaaaatcattggaatggtgtccaagcaatttttttttttgagatggagtctcactctgtcacccaggctagagtgcagtgactggatctcagctcactgcaatctccacctcccgggtccaagcgattctcctgcctcagcctctcaagtagctaggattacagtcatgtgccatcacacctggctaatttttgcattttcagtaaagatgaggtttcgccatgttggccaggctggtctcaaactcctgacctcaagtgatccaccccacctcggcctcccaaagtgctgggattacaggcgtgagccaccaccgcacctggccaagctgttcctttttttaacctccacaggtgattctggtcctagggtttttgagtcacctgcggtgctttctcaaccatcccagcacctgaacacggtgctgtcacactacagtgagcaactgcatcacctggcaggtgctgggtccacccccagagtttcagatgcagtgggttgcggtggagctcgagaatgtgcaagttccccattctaacaagttccccgctgctgctggcccgggggccatgctatgagagaagcactgcctaagcatcaggtgttaggatgtgcagccacagttgagagctggccccagggctgggcgccaccaaggtgcactcagtcacaggtccagcctctccccatgccgcctcccttggctgcctgttcatgcagagaggtccacagcccggcaagatgggtcccaaatggcccactgcacagatgagggactcgaccaaggttaagaacccaagagatttcaatccagacctgcctgatccccaaactcaagtgtttttttcccctcagctgtcctaggatggcaatgcctcccatctgagccactgacctctgggaagctggagggccccctcccgtgtctggaagaggtgggagatgcaatctactctcacagggttctctcccaccctgtccacagggtttcaaggtgatgacccagccccctgcagttttatgatttcttacgtgccttcaaggctgctgggtgcgtcggccttgtctggctatgactggccaccaggtggtggccgtgggccgtctgtcctcctgaaagcttcgagggcagaacctgcataatgaacattttgggatgaggtgtgagggacagtgtcttcaaaaatgcctagggggctgctccagggatgctctaggcagtcttcactcagccacagatgctaaggctcagagaggggttggagcatgatgcagcctggcctgggaggtgagcccaggctttctgactcccagcccaaggttctgtccatggcttcaggcttccttgagaggagagacaaaccaggtttcctgaagtcagagcagttcaaagggaatttccagcccgacttgcttagatgccctgaggggagagaaaaccggggaggtgcccaccacccccactcccaggcaggcaggaccccggagagcagcaggtgcggcagtcatgtaaaacacaggcaacgagagctctagaaagagcaccagctttagagtcagctgacctgggctgaggctctggcttgagtcatggcgggcaagtgtcttacttctgtgacactcagtatccgcagccaccatatgggctttcctgccacgcagggctgaaaagaagattgagagtctgtatgcagggtgcccagcactgggcggggggccggggcaggaggggcaggggctgataaacagcatccatcactactgatctaaaaatcaagagctgccttggggctgcccctctagactcctcaacacaattggagtcgatgccagcaaatgcggggtttattccgatgaggtttgaggatgggagaaggaaaggcgatgtttattgaggtggtaatgtctagcccacggggagccctatctggggtcccagtcagggcaggcagctcaggctatctggtgtcccctgagccgacgggagggcctgcgtcttagcaggtactacttcctcctcctgcagctgccccagctgagcctacagggtacacctagagagagagaaaggtgggtgtattccaggcatctattccaagggtcacagatgaaaatgtctcaagggcctgtcctgaaaaataaatgactgaaacagaccagctgtgctgtggggaacagggagtgtacgtcttgctggagcaggcagttaccactcagccccagcttgctgcggccatgcacaagtgctggccattgtgcacattgtcagggctgtgtctggcccacaggccaccagtctgaaacctaaactccagtccacctcccagctgatacctgactctttctgactgggagtcatctacccttggcctggatgtgtccaaggacagaaaatcaacttctcaaaagcacttctcagagggtgggggccctggatttaggcatagcaaggtttgtccccctcaagctcacgcccacaagaaattcaatcccactttaatgaggtgacctgtgacacatcttcaaatggttttcatgtcaccatcctctcccgtgagtctttgactttccaggttaaatgtactcattttctcaatgttttccttttatgtgaaacccctcccgatttctcctctaccccccgccagctgcccccctacccattcctacaacctggcttccttgtcccttctctccccacactccccaagccccgctctcagtgggtccttaacaaacggggaaaaggtggagagagaagcaggacccaggtgagctgagggaaagagcagcatccaccatccagctgaggctggtggaaagacctgcggcactggcaggatgaactaaggtgtcagggacaagagtcactgcctgccacctaaccgtgcaggcatcaaagagactttttgggtagctggaaataacagtctaaaacacggccccacctttctgagcacacctgagtcacctctgactcagacccagactcctgggctgacccagtgaggggattggaaaggctgccccgcccctctcagtccccttttccgtcccctcttccagcccatctcagccagaatagagaaaagtgcggcttctattcaggggtgtactcacgttcctcctaccctgaaccactgaatgtctccaggcacatcccagcccctgcttccccactgtcccccagccccatccgaaggcccattgttgtctccaagggtgtcagccagccctgtcccagttccaggagtggtaaccagcacagcccagcttcctgtccagtgttctgcgggctgggccaggctctgcagccaagaggcttactcactggtggaacaatttctcctctatatggaaagaacatatgcttttcctgctgggggatgagagactttcgagtagctttgccgagacgtggaggaaaaggcaaacgctggcctagccccagcacccagatttccagcaatgtttgtcttgtggcagaagctgcaggcctctgttcccaggcacatggggaggcccagggaacactgcttggaacccttggttttagggcactgaccgggtcccctctttcagggatggatgtcctgcactcctcattctcctattccattctcccaattttagggctagaacagagcagaaagacctgaacttagttctgccagagcccctctccagccttgaggtccctccagaatggaaatgtcagtgcccacctcagagggtgcttgtaggtttatagggacacacaacaagtacttaaaagacaataaccactgtgttgttattaatgttgttctcctcccaatgcatgtttactcagcatctcctgtgtgctgggggctgtactcggccctgggaatgaaggtagaggaagagctggctattgcccccaagctgctacctgcccccgctccacccccttaaacatgttcatgtgcatacacctgcagggcataaggcacaaataatacaacacttatgtttaaaaaaaaaaactagtttttgaaataacttgggatggccaggtgcagtggctcatacctgtaatcccagagctttgcgagaccaaggtgggaggatcacttaaggccaggagtttgagaccaacctgggcaacatagaccctgtctctacaaaaaaaatacaaaaatgagccagacatggtggtgcatgcctgtggttctagatacttgggaggctgagaatggaggatcacttgagcccggagttcagtgctgcagtgagctatgattgcattactgcactccagtggcataggctaaatagcagagagaatacagctaaatgagaaattactgagctaaatgacttggttgagaacctcatccaaaagacatcaggaagggataaagaaatgagaatgaaagacaagtcaggagatagaaaagaagaaatgttctgatctatagtagccagcttcaaagacagccctcagtgatctctatctcctgatattcacttccttgtgtagaagtcaacccacctcctcacaacattgactaggtcagacctgtgtaactggtagaatattaaggaactaacagattgtagtttccaagtccagaccataaatgtcaatgtggctttcttcttactctctctgaaatcccttgctcaggggtatgccaactgccatgttggggggatacccaatcaatcctacaaagaggtccacatttgcaggaactgagggccactgccaacatcaacttgccagtcatgtgagtgagccatcctggaatcagattctctaacaccagccaagtcttcagatgattgcagccttgaccaacatcttgactccaactttgagagactctgagccagaatcacccagctaagtcaccccagattcctgacctcaagaaattgcacaagataataaaggcttaatactgttttaagccattaagttttagggtagtttttaatgcaacaatagatctatatactagaaaccccaaaagactaaacagagtagagaaaatatttgaaaaaataataaccaagaatttcccataatacaaaagaatgcatgttaatatggaaagaatccactgcattcccaactaagtctgtaagtataaattcacatctagatacatttcagtggaatcttaaaagtctgaaagtcaaaaatgaaattcttttgtccttaatgtagagcctggaaaaaaaattttaagtaaagttctataagcttccagagaggaaaagatcacctacaaagaagtaagagtgagattgatatctaacttctcaacagcaacattcaatgcagggaaatggaataacatcttcaaagagtagaaggaaaagaactttgaacatacacttccatgtttaactaagtttttatttaaaacgcagaaacagtcatactggaaaatgggagtttcataaaaaactaaacatgcaactaccatacaacccagcaattgcattcctgggcatttatccaagagaaacaaaaacatatgttcacacaaaaatctgtacatggatgtttatagctgctttacccataatagtaaaaaactggagacaacccagacgtccttcaatgggtgagtggttaaataaactgtgatgtgtccataccatgtaatgctactataataaagggaaactatttatacacttaacaacttagatcaatctccagagaattatgttgagtgtaaaagtcaatcccaaaaggtgtatactgcatgattccacttaaaaaaatttctgtaagtgacaaaattataaacatggagaactgtttcatagttcccagaagttgcaggtgggaagaggagattgtggtggcaggtacggcattctgaatagtgagacctctcacatctgtacagcttcccacactgtgcctccaaaatgcttctgttaatctctaacctcctggcgtgagacaaaagaatttctctctgaggaaactgaccaagccaatggcaaaaacctatagatattgcnnnnnnnnnnn

SEQ ID NO: 93823 - DNA, 49307 bp, Homo sapiens
gacctttaagaaaatacatttgtattgttttaagtcactatgtttggggtgatttgttatagcagccgtgggaagctaatacacacccttcgggctatattcacgcttctgcatctttcctgaagctgtgccactggctggaatgtccttctgatctatgttgtgcagttcaacaatcaagagccatctgtggctattcaaattcgaatcaattggccaggcctggtggctcctgcctataatctcagcactttgggaggccgaggtgggaggattgcatgagcccaggagtttgagaccagcctgggcgacatagcaagaccccatctctacaaaaaatacaaaaattagccagacgtggtggggcgtgcctgtagttccagctactgaggagggagttgcttgaatccttctgcttcaatcctccttaaagcaggtagattgcttgagcccgggaagtggagtttgcagtgagcttagatcacaccgctgcactccagcctggatgtcagaatgagactccatctcaaaaaaaaaaagaaagaaagaataaattttcatttcaaatttagttcctcgggcacactggccatagttcaagtgctcagtagccacatatggctggtgactgccatattcgacagcacagctatagaacattgccatcataacagagatttctgttacaaaatgctgttctagaatttacttttgaactctacctgctcagatcttttaaattacatggtaggccaggcatggtggctcacgcctgtgatcccagcactttcggaggcccagtcgggaggatcccttgagcccagaagctggagacctgcctgggcaacagagcaagaccccatctctacaaaaataaaaaaaagaaaattagcctggtttggtggcacatgcctgtagtgccagctactagggagactgaagtgggaggattgcttcagcctgggaggttgaggctgcagtgagccgtgatctcatcactgcactctagcctaggtgacggagcgrgaccctgccgctaaataaataaataaataaataacatagtagtgatacctgtgtctgcggtcattactccagaacagcacttcacatatagtttctcctttaaggtcattctcacaacagcccagggagatagggtggcatgcttcattttataagctgaggtcctgggaggggaggtcatttacccaagatcacacagcaagaacaccagacagctggaatttgatcccagttttgactccaatgctcttgctcttcatcatcaataatttccttcaaggcgtccctcaaatgtcacttcctccaggaagccctccctgatttatgctccttccagaaagaatgggctcttcctttctctgagtctctggaacacaaggtcccagctaaactgtaaattccccaagggtaacaactggactaattttttttaatttaatttaattttatttttttgagatgaagtcttgctctgtcacccaggctggattgtagtggcacgatctcggctgaccgcaacctccacctcccgggttcaagcgattcttatgcctcagcctcccgagtagctgggattacaggcgctgccaccacacttggctaatttttgtatttttagtagagacagggtttcaccatgttggccaggctggtctcgaactcctgacctcaggtgatccacccaccttggcctcccaaagtgctgggaatacaggcatgagccaccgttcccggccttatccttgacttagaatacctaacctcctgggaatgcagcccataggtctcagccttatttcacccagctcctgttcaagatggagtcactctggttcacatgcctctgacatttccccrctcccttttataagagaacctttaatcctaagggttgtagagggaggaagatacaacttctgtgacttcttcaggctggacaggggtgacgatatacctgcctaactcttaggatctattggattcagggtagacaggagctcagtcagaaagcactggtatcactttttttttttttttttttttttgagacggagtttcactcttgttgcccaggctggagtgcaatggcacgatctcagctcaccacagcctccgcctcccaggttcaagcgattctcctgcctcagcctccccagtagctgggactacaggcgtgtgccaccaaacccagctaatgtttttttttttttatttttagtagagacggggtttctccatgttggccaggctggtctcgaactcccgacctcaggtgatccacccgcctcggcctcccaaagtgctgggattacagacatgagccaccacgcccggcctgatattttattacttagtattttactctgaattatcatgcgtgaattaagaccaaggctgtcttgtaaaataaaatttgttgtggaacaatttatacagctcctttgaggtaggaggcaggactcaactctggagatggggctcggctcgaatattggaccaaattgaggaccagctaaaacagggaggaggctgaagcaacttattatttttatttatttttattttttggagaaggagtcttgctctgttacccaggctggagtgcagtgacacgatctcggctcactgcaacctccaccttccggattcaagtgattctcctgccgcagcctcccgagtagctgggactacaggcgcatgccaccatgcccagctaatatttttgtattttttagtagagatggggtttcgccatattagccaggctggtcttgaactcctgactcaggtgatctgcccacctcggcctcccaaagtgctgggattacaggtgtgggccaccacgcctggcccgaagcaactttctatgacacgcctaccagtgtgccatgtcagtttgccattgccatggcaacacacccaggagttactgccccttcccatggcaatgaccccatgacccagaagttactgccccttccctagatatttctgcataaactgccccttaatctacatgtaattaaaaataggtataggctatttttatacctatataaataggtataggctaaaaataggtataggctgggcgtggtggctcatgtctgtaatcccagtactttgggaggccaatgcaggtggatcacctgaggtcaggagatcaagaccatcctggctaacatagtgaaaccctgtctctactaaaaatacaaaaaattagccaggcgtgttggcgggagcctgtagactcagctactcgggaggttgaggcaggagaatggcgtgaacccaggaggcggagcttgcagtgagccgagatcacaccactgcactccagcctgggtgacagagcaagactccgtctaaaaaaaaaaaatagtaagaaagaaggaaagacacaaagacagaaagaaggaaggaaagaaagcaagctgttttcccctgccttgcccctgctcacctttgaattcttttctgggcaaagccaagaaccctcgtgggctaaaaccccgctttggggcttaaagtttgcaaaatcctcccattaatctattgggaccagttgccacttaggagcattctttgataacttttacaaaacatcttttgtggtttttgaaatgttttcattttgtagatcattagcccttcttttttgaactggaatacatttcacgggaattttcaaatttaagtctgtgcaatgttacataaaatacctttgattattaaaagccatctgttttgctataacttcccttttttgttctaaagtttgtctatttctgctatttgtttttttaccatagaaatattgatttccttaagttttcaaagaaccaagttattaataatttctctaagaactagtctcaagcttgctatacaatcctatggttgatagactgtggctttcttgttgatttccatttgttgttcatttcctccaattttccttttttaaaaattataattattgtttggattatttatttatttatttatttatttgtttgtttgtttatttgagacagagtttctccttgtcgcccaggctagagtgcaatgatgcgatgttggctcactgcaacctccacctcctgggttcaagcgattctcttgcctcagcctcccgagaagctgggattacaggtgtccgtcatcatgcctggctaattttttatatttttagtagagacgggatttcatcatgttggcttagctggtctcgaactcctgacctcaggtaatccacctgcctcggcctcccaaagtgctgggattacaggcgtgagccaccgcacctggccttgtttggaaattttaagcagaatgcttagtccatttattcttcttcttttgataataatgtatgaattggcttctctatctctaagttgttttccagaggcttgataattatatccaacgttccacttgacatccccagttgatgtccaatgcataactcaaacaatatgctgaaaacagatcttcggattttctctctagcctctytcccacgtcttcctgatggtagtagatggtgactccatatttccaaatgctcaggccaaaaactttagagtccttcttttttttagacatagaacttttttctggccaggcacggtggctcatgcctgtaatcccagcactttgggaggccgaggtgggcggatcacgaggtcaggagatcgagaccatcctggctaacacagtgaaaccccgtctctactaaaaatacaaaaaattagccgggcgtggtggcgggcgcctgtagtcccagctatgcgggaggctcaggcaggagaatggcgggaacctgggaggcggagcctgcagtgggccgagatcgcgccaccgcactccaacctgggcgacagcgagactccgtctcagaaaaaaaaaacaacaacacttttttctttttttgagacagtctggctctgtcacccaggctggagtgcggtggtaccatcatggctcactgcagcctcagtctctcagcctcctaggttcaatcgatcctcccacctcagcctcttgagtagctgggactacaggcacacactaccatatccgactaacttttgtatttttttgtagaaacaggggttggccatattgcccaggctggtgtggaacgcctgacctcaggtgatccacctaccccggcctctcaaactgttgggattacaggcgtgagccgccgtgcccagctgtttcttctttcagttaataaaagagagggtgcattgctggctaatgagattgtttctatacttgggggccttcctgaatgtgtgtgattgagtttattgcagagaaaggtaacagaaaatggggttgtagaaagaaaagaggtagaggctgagtgagatgccccacatctgtaatctcagtgctttgggaggccaaggcgggcggatcacttgagatcaggagctggagaccagcctggcccaaatcgtgaaacctcgtctctactaaaaatacaaaaatcagccaggtgtagtggtgtgcgcctgtaatcccagctactcgagaggctgaggcaggagaatggtttgaacttgggaggcggagattgcaatgaggtgagataacgccactgcactctagcctgggagacagtgagactatgtctcaaaagaaaaaaaaaagttcctgggccccagaccagctctctctttgggttaaaaccccggcgtcccggagctgaggcgcacgtggctatgcttggggaggagagggcggggccggggaggaggcgcttgcaagtctgtaccgcaatgcctctactggcctctagagggcgcaatcactcgaggctccgccccaagcgaggcggggcggaagcgtgctgtgcacaggcgcaagatgggtcttgggcagcccagagcttccgattggctcttctgtggtggcggggcggggtcagaacgagatggctgtgtgcgcaggcgcaagactagcgctcttgggaccggaagttaaggcgttcgcggcgtgtggtaagtgaggggggcgggacgggtgtaccgggttgtggcggcgatggctgtcggagttgggccgcttgggggtagtttggggtgcgagtccaggggcgagggmastctcgagatgaggagaaatgtaggaggcagccgaagggccggcaaacgcggacagagatggcacctgagcgtccctgggagaacctgggcgacaggccagagaccgaaagaaatggaggcacgaaaagaagcttcgagaaactgagggactgaaagacgagggtgttgggagaggagggaagctgaaaactagagagcgtgggcgagagtgccgatgggttccagcgagagtcttagagcccacgaggccgagaggcgtggtcgcccatgaacttggggagtggagggaaaagtcggaaactgatcgtggacactagaaacagaaaaaatggaatttagatggagaaacgagacactgaatcacgggggagaccgagagatacggaaggatggagacagttgaaataggragaaccccacaaaagctggagataatggagaaygatgctgagaaatggaaaagcgagggagtggagcccgaacccctggatttgagtggctcatstaacactcggctactcacttagcctctctattgctcagtaaaatagggggtgatcatagtgcctgacagtcgtgagaaaagtgtgtgtgtgtatgtacataggtgtgggataggaatagatcatgcagataggataggtctgtgtgttaatgtgagtaagtaagcatgagctattactaaagcttctgatattgggagataaagtattagatggggaaatggagagaggtggtgatggagagtgaatactggaaggacaaaagggaggaaaaaaagattcaaacagaaaatgagaaagggcgtggtgactcactcctgtcatccacagcactttgggaggctgcggtgggaggatcacttgagcttgggaggtcgaggctgctgtacgccgtgattgtgccactgcacttcaggctgggtgacagagtgagaccctgtttcaaaaaaacaaaaatgaattttttttttttttttttgagatggagtttcgctcttgttgcccaggctggagtgcagtggtgcgatcttggctcactgcaacctctgcctcctgggttcaagcgagtctcctgcctcagcctccagagtagctgggattacaggcaggtgccaccaccctggctaattttgtatttttagtagagacgggatttttccatgttcgtcaggctggtctcgcactcccgacctcaggtgatctgcctgcctcagcctcccaaagtgctgggattataggcgtgagccaccatgcccggcctgaaaaagcattttttttttaatgagaaagatggagaaagtcaaatggagaactgaagagagatggagaaaggaagagttggattacagagaaaaatcagactacagaatgactcataagtgaagagagatgcgagctgactaggacagggaagagagatgagggtgatgatgaacaagacggactgaaaaagagacagaggcctgaagatggagtggagagagatggaggggacagagggggaaacaaacccactgaaggccatgagcccagggcaaataggccaagagaccaaaagatggtcagagacacagttatacagaaactagaagatgcagacaatctagaagccaaaaaagatagataccttgagaggagcgggatgctgtcagtggggcccagcatgcataagcagtttctagcctcagaagaatgctctcattttctttttctttttttttttttttttttttttttgagacagagtctcgctctgttgcccaggctggagtgcagtggctcagtcttggcttcctgcaagctctgcctccagggttcgagtgattctcctgcctcagcctcccgagtcgctgggactacccgagtagccaggtgcccgccaccacacctggctaattttttttctccagcctgggtgacagagcaagactccatctcaaaacaaaaaagactccaactgtaagcaaaaaggcattttctggtgtagctgagaagtggggggttgaagggaactaagcttcaagacctaaatgatgttgccaagcttctcttcctctccctctttcacctctccctgtggtgcagtgaccattcttgtgcctgtatctagttatttctctaggatagattttaggaaagactctgtcatgttccagagctaccacaaasagctccaggcttatatcaaacttgcctgattatgatggataaaatgagagcttttctgtcctagcaaccgagtgtaaattccacaaaagggccctgattggcccttcttggatcatgtgtccgcttctcaggccaatccttggttagagggggagtagactactaagactggccaggtctttgttacttgcctacccaataggggttctttgtcttaaaggccctcagaaccatgtagaatcgaggaagggctgttgtccaaaggaaggtggatactgtcctcagaaaagaagtaaagggttgtgccaggcaggcaaaaattacatataacacttgcaaaattttgccttttatctcaatgttctgaatctcactggaccccgggtgaagaacccttgccttattcttttcattatatcacacctctctcctattactgcctgtggagacaaggttctgctgttggttggccatgtgacctacatctctcctttaggtctcaggtgaaacatcccctcctcccaggatccttccctgattcccaagcatgggaaggaggaggaacctcctttggtgtcccacagctccctaggattctgttatcacagtccccatcactggattgtcacagtctgatgacgtgtgtgtcacatgagagatcatgtgatcatggccgtctgtgaggactctggtagtcatattcattacctcctttttctagttcagtgcttaagaaacaggctgttagaaatgtttctaaaaatgggctgggcatggtggctcacactggtaatcccaacactttgggaggctaaggtgggggaattgcttgagcccagaagtttgatatcaacctgggcaacatagtgagatctcatctctacaaacagtaaaaaattagctgggtgtggtggcatgtgcctgtagtcccagctgctcgggaggctgaggcgggaggatcgcttgagtccaggaggtcgaggctgtggtgasccatgattacggcactgcactccagcctgggaaacagagtgagaccctgcctcaaaaagaaaaaaacaaaacaaaaccaaaaaaagcaatgttcccaaaagagaattaatgtcttctgttctctctcttaagaatccagggcctgaaaacccagaatgaacttgtgtccatcccagagatcactgcagatgtcatgaggtaccctttgtgtcaccagctcaagcaggcctctggccactttatcatctgtggtggtcctgtsccgtgaccaggaggaaaaattagctctttgaagagaaagtagttctctattgcaggcactggcctcttaaattgttgcaggtggggaatggatgagaatatttgttttgggtgatcagaactgagactcctattgtggattagtaacatgcctcctcctagaacaagggagggcagggatcgccgagaccaccacygggctcccagcgaggaagaggccttggagaaatgggactggaattgtccagagacgcgtcgcctcttggaagatgccttcttccgtgaagaggattacatccgtcagggttctgaggaatgtcagaagttttggaccttctttgaacgcctgcagagattccagaatctcaagacctccaggaaggaggagaaagaccctggacagcccaagcacagcatcccagcgctggccgacctacctcgcacttacgacccacgttaccgcatcaacctctctgttcttggccctgccacgcgggrctctcagggactgggcaggcacttgcccgcggagagagtggctgagttccgccgagccctgttgcactacctggactttggccagaagcaggcatttgggcgtctggccaagctgcagcgtgagcgggcagccctccccatcgcccagtatgggaaccgcatcctgcagacgctgaaggagcaccaggtggtggtagtggccggtgacaccggctgtggcaagtccactcaggtgccccagtacctgctggctgctggcttcagtcatgtggcgtgcacccagccccggcggatcgcctgcatctcactggccaagcgtgtgggctttgagagcctcagtcagtatggctcacaggtgagtgggacgcaccaggtttccgatttttccagcgtgaccttgggggaataggttgcttgtccatatggcagtatcaataaaaatgaagcacttacccttggacccagcgatgattcttctagaactttatccacagagtggcttgtctgtggtctacatgacaaaggagctagcattaaccagtgtagcactttaacagcaaaacaatgggaaatgtcctaaaggctcatcactttttttttgagacggagtctcactctgtggcccaggctggagtgcattggtgcgatcttggctgactgcaacctctgcctcccgggttcaagcaattctcctgcctcagcctcctgagtagctgggattacaggcacccgccaccatgcccagctaatttttgtaattttagtagagacggggtttcaccatgttggtcaggctgggctcaaactcctgacctcaggtgatccacccacttcggcctcccaaagttttggrattacaggtgtgagccaccacgttgggctgcgagggtaattcttgacgatcactgcaatgcaaactgccatcttggaaggccaataatagtccttctgtctcatggtggtcatgaggatgaaatgggttgatatacataaagcacttagagtggcatataatgtcctggcacatagcagggactcaagaaaaggttattgctatatagttaatattatatatacatgaggcacagtgctagatactttctgtgcattgtcacatggaattctcacagcatctaggaggagaactataagggatggcattgcctgcccaaggtcagttggcactaagtggcagaggtgagattcaaacccaagstgttggactccagagtctgatgggtaggcatggtatttgcttagattttctttttgctttttcttttttttgagatggagtttcactcttgttgcccaggctggagtgcaatggtgcgatcttggctcactgcaacctccgcctcccgggtttaggtgattctcctgcctcagcctcccaagtagctgggattacaggcatgcgccaccacgcccggctaattttgtttgtatttttagtagagatggggtttctctatgttagtcaggcggatctcgaactccctacctcaggtgatccgcccgcctctgcctcccaaagtgctgggattacaggcgtgagccaccgcacccggcctgcttagattttcaatttgggcagggccaggggctggtacycaggctcagggtcctctcctgatcctttctttctcccaccccaggtcggctaccagatccgctttgagagcacacgttcggcggccaccaagattgtattcctgacagtggggctgctcctgcgacaaatccagcgggaacccagcctgccccagtatgaggtcctgattgtrgatgaagtccatgagcggcatctccacaacgatttcctcctgggcgtcctccagcgcctgttgcscacgcggcctgacctcaaggtcatcctcatgtcggccaccatcaacatctcgctcttctccagctatttcagcaatgcccctgtggtacaggtgcctgggaggctgttccccatcacggtgagtacttccccctcctcccacatccccagacctccaacctggtctctgtccaaacctggacatgcctcttctctctgctgctgtatctcccatctctttcatttaaagatgttctctttttttaaagctaccattttctgagcattcataatcagctggttagagtgctaagtgcttgttagagtaaaagctgttacaagaagacccaaaaatggctgggcgccgtggctcatgcctgtaatcccagcactttgggaggccgaggtgggtggatcacgaggtcaggagattgagaccatcctggctaacatggtgaaaccccatctctactaaaaacacaaaaacaaaattacccaggcatggtggtgggtgcctgtagtcccagctactcgggaggctgaggcaggagagtggcgtgaacctgggaggcggagcttgcagtgagccgagatcgcgccactgcactccagcctaggtgacagagtgagactttgtctcaaaaaaaaaaaagacccaaaaatgtaaagtctcaaataagagaagtttatttctctcatataacagtgtggctggtccaggctgttgggcaactctgttccatgtggtcattcagggatccgggctcctcctttgtcattactctgccatctcactgggcaggatttctcaaagtcagcaagattgacatttcagtctggataattccttgtcgtgggggctgtcctgtgcattgtaggatatctagcagcatccctggccctacccactagatgctagtagtcttctcctctggttgtgactattaaaaatgtctccagacattgccatatgttccctctggggcaaaaccacccctaattgagaaacactgtcctagtgagttatccttgtctgtatagtcaagacttacaggaagaacttcattgtctcttgtgatttctggttccggatgcccatcaatttgccttctaagcagccataaaaaaagaaagaatgggtcgggcacggtggctggtgcctgtaatcccagcactttgggaggctaaggcagaaagatcacgaggtcaggagcccaagaccatcctggccaacatggtgaaatcccatctccactaaaaatacaaaaattagctgggcatggtgacgcacgcctgtaatcccagctacttggaaggctgaggcaggagaattgcttgaacccggaggtcgaggttgcagtgagccaagatsgctccactgcactccaccctgggaacagagcaagatcccatctcaaaaaaaaaaaaaagaaagaaaagaaagagagagagagagtgcgagccgagtgtggtggctcatgcctataatcccagcactttaggaggccgaggcgggtggatcacctaaggtcaggagttcgagaccagcctggccaacaaggtaaaaccccgtctctactaaaaatgcaaaaattagctcgagtggtggtgcgcccctgttatcccagttactcaggaggctgaggtgggagaattgcttgaacctgggaggtggaggctgcagtgagccgagatcatgccactgggtgacagagcgagaccctgtctcaaaaagaatgaggctgcttcctgagaaatgttttctagggtttttgttttttgttttttgttttttttagtagagacgacgtgttgctatgttgtctgcctggtcacgcatacctgagctcaagcaatcctcccgccttggcctccsaaagagctaggattacaggtgtgagccaactatgctgggaaatcagccaaccaacctggctcaggctcagggtcctctcctggtcagccaaccaacctgatttctargtttttaatcctggtttcatcacctagaatatttttyttgttgaagctactctaaacataagataatgcatgcattgtaagtatatagcttaattagttttcaccagttacatacatctgtgtagctagcacccaggtttagaaaagtcaaacattgccagcaccccacaagccttgcagttgctttgttactttgtctttttattacatccttcagaaattatctagctggagtgtgctgtctgtcacctgactgtttctcaattaggggtggttttgccccagagggaacatatggcaatgtctggagacatttttaatagtcacaagcagtggagaagactactagcatctagtgggtagggccagggatgctgctagatatcctacgatgcacaggacagcccccacgacaaggaattatccagactgaaatgtcaatcttgctgactttgagaaatcctgcccaatgagatggtggcataatgagaaaggagaagcctggatccctgaatgaccacatggaacagagttgcccaccagcctggacccgttgcactgtgtcttctccgttagcctgtggtctcccccgtcagcctgcagcctccccagcccattgctctgagctggagggacagggtgtgcttctacctggggctgtctcctctcaggttgtgtaccagccgcaggaggcggagccgaccacgtccaagtcagagaagctggacccgcggcctttcctgagggtgctggagtccattgaccacaagtacccgcctgaggagcggggtgacctcctcgtcttcctcagcggcatggcggagatcagcgccgtgctggaggctgcccagacctatgccagccacacccagcgctgggtggtactgccactgcacagcgccctgtctgtggccgaccaggacaaggtatcacaggaagcccgagtggggcaggcggggggtctgcatgagtcaggggtggctgcgcacaggacttgtgtaactccacaaacacagggctcgggggctgtacttgtgcaaagtcgtagccacctagtggcagagccaggctgcgaacccaggtagtytggccccggagcccatgctctaaaccagaggtcggcaaactttctataaagggtcggagtagatgatgtcagtcctatcgaccatgggctctctgtctgtcacagctactcagccccactgttgcagcatgaaagcagccataaactgagtgggtgaggctgtgttccaaaacagtttttttttttttttgaaacagggtcttgctctgttgtccaggctggagtgcagtggcacgatcagggctcactgcagccttgacttcttgggctcaagtgatcctctctccttagtctcccaagtagcaactataggtgtgtgtcactaaactccattaatttttttttctttttgggacagagtctcactctgtcgtccaggctggagtgcagtggcatgatcgtggcttactgcaatctccacctcccgggttcaagcgattctcctgcctcagcctcctgagtagctgggactacaggcacccgccaccacgtccggctaatcttttgtatattgagtagagacggggtttcgccatgttggccaggctggtctcgaactcctgacctcaagtgatctgcctgcctcagcctcccaaagtgctggggttacaggtgtgagccactgtgtccggcctccgttaatttttttttgaattttagtagcaaagaggtctcactgtgttgcgcaggctggtttcaaactcctgagctcaagcgatcctcccctagtgggggcagtgccagtttatgcttcagcagatccctctggctgccatgtgagtctacaggccagagatctgaggggaagctggagtaggatcagagtgggcgaggagaggcctggaccagggcaggggctgggctgtcggaggagggaaggatttcaagaaaagttccagatggcctggtacattggctcatgcctataatcccagcacaggaagctgagacaggaggatcactcgagctcaggagttagagaccatcctaggcaacacagtgagaccttgtctctacaaaacggaagaaaactagctgggcatggtggcatgtgcctataatcccagctacttgggaggctgatgcaggaggatcgcatgagctcaggaggtcagggctgcagtgagctgtgatcacgccactgcactccattgtaggccacagagtgggatcctgtctcaaaaaaaaaaaaaaaagttcaagatgttcaggtcgggggagcagktgtggtggctcatgcctgtaatcccagcacattgggaggccaaggcaggcggatcacctgaggtcaagagttcaagaccagcctggccgacatggtgagaccccgtctctacttaaaatacaaaaattagccgggcatggtggcgggcacctgtaatcccagctgctcgggaggctgaggcaagataattgcttgaacccgggaggcagaggttgcagtgagccgagatcacgccactgcactccagcctgggcgacagagcaagactccgtctgagggtgggggagggcccaggatggcccaggtgatggggtggacggtgagccatctccaaaagggaggtctctgaaggaggaaagggttccagggaagctgctgacacgggggtgggcaagaaattggacacataggttagtcggggctgagttagttcctgacaccaccccctcccttcctcccaggtatttgatgtggcaccccctggagtccggaaatgcatcctctccaccaacattgctgagacctcagtcaccattgacgggatccgcttcgtagtagattccggtaaggaccaccatgagcccctacccaccacccccaaggacttaggagcatggggtccggaggtgtgcgtgtgtggcaggggcgcaccagcttggattgggaagtacagttgactttcccatatccaaaatgcttgcttgcaaccagaagtgtttggaatttcgggtttttttgaatttggaatatttgtatcaattttattatttgagtatgtcaaatccagaaatctgaaatcctccagtgagcatttcattggagggtcacgttagtgctgaaaacatttcagattttcgagcatttcagactttggatttccagaattgggatgctggaagacgatgtgtggggccatggaccaatggcaacatcttagtttttctcacaccttccaagcctgcttctgccctggggcctttgtactgttctctctgccgagagctgtctttctccaggtatccacacaggtgacgccctcacctcatttcagggcccgcataaatgtccacccgtcagagaggcccatactgtccactctgtctaagagatatcccctcctccatccgctgttgcttgtcatatgagggggattgacattctgtttgttgttgttgttgttgttgttgttgttgttgttttgagacggagtcttgctctgttgccagactggagtgcaatggtgcaagctccgcctcccgggttcaagtgattctcctgcttcagcctcccaagtagctgggattacagacatgcatcaccacgcccggctaatttttgtatgtttaggagagatggggtttcaccatgttggccaggctggtctcgaactcctgacctcaagtgctgcctgcctcagcctcccaaagtgctgggattacgggcatgagccaccacgcccagcccgacattctattttatgtgctgctctgtttgctcactttctgtcttcctgactggaatgttctctgggaagtcagcatagcatagtgtttggagacactggagcctgcctggccaggtttagtgctggctgtgtggctggggtcatgtgactgacacttcatgtatcggttggctcatctgaaaaatgacaatggcaggccgtcccggctgggcgcggtggctcacacatgtaataccagcactttgggaggccaaggcaggcaggtcacttgaagttaggagtttgagaccagcctggacaacatggtgaaactccgcccctactaaaaatacaaaaattagccaggcatggtagtgcgtgcttgtagtcccagctgctcaggaggctgaagtgggagaatcacctgagcccaggaaatcgaggctgcagtgacctgtgattgtgccactgcactcaagcctgggcaacagagcgagaccctgtttaaaaaaaaaagagagagagagaaattaaaaaaataatgtctgccaggtgctgtggctcatgcctgtaatcccagcactttgggaggctgaggcaggtggatcacctgaagtcaggagttcaagaccagcctggccaacatggtgaaaccccatctctactaaaaatacaaaaatgacccgggcatggtggcgggttcctgtaatcccagctactcaggaggctgaggcaggagaatcgcttgaactcaggaggcagagtgagccgagattgtgccattgcactccagcctgggcaataagagtgaaactccatctcaaaaaaagaaaagaaagaaaatgtaaaaaaaggttgttctgacactggaggaaatatggtgctctgttcagtcctgtgagactaggacctttgtttagctcactgctgttcccctagtgcctagtgcagtgcctggtatatagtaggtgcttaataagtatttattggataagtgaacctctgaagaaacaaagacttgggaaaataaatgaaaagatgtgtgagtgaaaggctgggtgcagtggcccacgcttgtaaccccatcactttgggagcctgaggcaggcagattgcttgagcccaggagtttgagatcagcctgtgaaaccccgtcactgcaaaaaattagccgggtgtgttggtgtgcacctttagtcccagctactcgggaggctgagctagtaggatcatcgcttgagcctgggaggttgagactgcagtgagctctgactgagccactgcactccagcctgggagacagtgagaccctgtctcaaaaaaaaaaaaaaaaaaaaaaagatgtgtgaggaaatgaaagaataaatgaacaaaatgtcagagttgggcccagaataagccctcagttagcattaacagaataaaggagtaagtgagggtgttggcgagtgacaagagccaggcgcgtggccagctgcacgtggctgccacacacagactccctttcctcattgctyccatccaggaaaggtgaaggagatgagctacgatccgcaggccaagctgcaacggctgcaggagttctggattagtcaggccagcgcagagcagcggaagggccgggcgggccgcacgggccccggagtctgcttccgcctctatgccgaatcggactatgatgccttcgccccctaccccgtcccrgaaattcggagggtggccctggactcgttggtgctgcaggtgaggcaygggcagaaaggggactatatcctaactgctggcacagggaggaacctgggaggccttttttattttattttattttattttattttgagatagcgtcttgctctgtcactcaggctagagtgcagtgctgtgatcatggctcactgcagcctccatattacaggctcaaatgatcctcctacctccacctsccaagtagctgggaccacaggcacacaccaccacrcttggctaacttttaaatttttatttatttatttatttttgagacggagtctccctctgtcgcccatgctggagtgcagtggtgcgatctcggctcactgaaacctccgcctcccaggtttaagtgattctcctgcctcagccttcctagtagctgggactacaggtgtgcaccaccaagcccagttaattttttgtatttttttttagtagagatggggttacaccatgttagccaggatggtcttgatttcctgaccttgtaatccaccctcctcggcctcccaaagtgctgggattacaggcatgagccaccgcgcccggcctaactttttttatttttagtagagatcaggtcttgctatgttgcccaggctggtctcaaactcctgagctcaagtgatcttcccaccttggccttccaaagtactgggattacagccatgagccattgtgcccagccagccaggaagcatttacataggacccaaccccagagtgtcagggtcaggaaggatagggctagccaagccactgaggggaacccatcccttccaaatgtcaaaacccttgttgaggggagaattgttccttaaatccatagggtcagctgggcatggtggctcacacctgtaatcccagcactttgggaggccaaggcaggtggatcacttgataccaggagtttgagaccagcatgaccaacatggtgaaaccagtctctattaaaaatacaaaaaattagccgggtgtggtggtgtgcacctgtaagcccggctatttgggaggctgaggcaggagaattgcttgaacccaggaggtggaggttgcggtgagccgagatcacaccactgcactccagcctgggcgatagaacaagactccatctcaaaaaaaaaaaaaaaaaaaatgtccatagggtcaaaggaagaaccagtgactcaatcagaatgctttcagctgtaacaggaaacctagcaggaaagggcttttaaaaccagggtttctcaatacattttatgtcatgatttgtatctcatttgttaatttagcataggttagactgccatgacaaatacacatggtcacgaatggccaacagcggaatggtggtttacaggttggcaggcaattttctttattcagggacccagggtccttcactcttgtggctctataatctccccaggggcttttcctgcatatgtgtccagccagccaaagggtcaagggcatgggaagtgagtacaggagggtttgcgggtcgagcctgcaaatggtgcacttgccttgcactcaccactcctggtcagtcctcagtctcgtggccacgcccaaccgtgaaggaggctgggaagtgtagtccttgtgctcaggaacaaaaggaaaaggaaagttgggagcagctgatggtgtctgccacaggctcacgtgcgggtgtagcacaaaccagtggccttcctgcaggaggtgcacactattttctattctgtttgatttcatcttttaaaaaaaaaaatactagtgctgccgggcacaatgagtgactcatgcctgttatcccagcactttgggaggstgaggcaggaggattgcttgaggccaggaagtcgagaccagcctaggcaacacggtgaggccctgactctagaaaaaatttaaaaattagcccagtgtgatggcacacacctgtggtcccacgcaggaggctgaggcaggaggatcgctagagcccaggagttcgaggctgcagtgagccttgattgcatcactgcactccagcctgagtgatagagcaagaccctgtctcataaaaaaacaaagtccatggggtaggtagtcttaccctaatttttggaccagaagaaggatgcagagagagagaaaatattgccccaggtcacacagctggcaagtagtagagtcagggctccatccgaggccaccaggcgtcagagcctgcttcgtgagtggccgctggctccaggcacagtgggcgtcacctcctcctcctttaccatccggaggcagaagcaaggaactgcccttctctgtgggtctaatttttaaggccacaggaacattttctagactcctctggccagtctctcatcctctcttgtcagcagaaccgggtcatatgtgttcaccctatgccccgcaattgtctagggttgtggcattgcctgagttgatcagagcagtgtctcagccccagctgcatactagaaacacctggagaatttaaaaaaaccccaggccctgccccctgcctctttaaattgagcttctaatgtaaaggttatttatttatttatttatttatttatttatttatttttgggacagagtctcactctgtcgcccaggctggagtgcagtggtgttatctcggctcactgcaacctccacctcccaggctcaagtggttctcctgccttggcctcccgagtagctgggaccacagatgggtgccaccaggcccagctaatttttgtaattttagtagagagggagtttcaccatgttgatcaggctggtcttgaacttctgacctcaggtgatctgcctgccttagcctcccaaagtgttgggattacaggcatgagccaccgcgcccggcctataaaggtttttaaatgagtattgggtgaactcatagacggcatcaaggcttggtcagcagggaggaaggagcagcagctgcttgcaggtggacgccagaacttctagtgccctcggatcaaagccaggcaaacagacttctctgagcttccttctcgctctctggctgtcacatgagctgccttgccagcctctccttcttccagtcaccagagaggtgctgtttgcttacgtatgccacgccagaccccggggtggacatatgctgtcacttaattctcccaccatctactgcctgcctggactgctgcattaattgggattcttttggttgtaagtgagagaaatacaactgaaactattgtaggcagaaagggggatcttaccattttgtgcattcatgaggcggcatgtctaacttaggaacaatccaagaatttctccatctgctgtaggtgggcccatttccaaaaaatggacaaagtcaaaggtcacagcagttctgggttaataagatagccttccatcctggccacaaccagagaggatgctgggaatgctcttcctggctccagtctcatggaaggattctgattggtccagctcaggtcacgtgcctctsctccatggtctggggcaagatgtgctaggcagacagatacagagacagcagccctccttgcctgcctctgcacagtggatcttgacattgggaattttattttattttattttattttatttttgagatagaatctcactctgtggcccaggctggagtgcagtggtgcaatctcggctcactgcaacctccgccttccaggttcaagcaattctcctgcctcagcctcccaagtagttgagattacaggcactcgccaccacacctggctaatttttgtatttttagtagagatggggtttcaccatgttggccagtctggtctcaaactcctgacctcaagtgatccacctgctgtggcctcccaaagtgctaggattacaggcatgagccactgtgcctggctgacactgggaatttgagatggagtctcggtgtattgccaggctggagtgcagtgcagaggcgcgatctcggcttactgcgatctccacctcctgggttcaagcgattctcctgcctcagcctcccgagtagctgggattacagtcatgcaccaccactaatttttgtatttttagtagagacggggtttcaccatgttggccaggatggtcttgaactcctgacctcaagtgatccgcttgccttggcctttcaaagtgctgggattacaggcatgagccacaacgcccggccaacactaggaattttaaaacgtcatgaatttgtgatctctgagccccgctgtgctgcacagtggctcttgtgttccccaatcttgggggttttgcttctcattctagatgaagagcatgagtgtgggggacccccgaaccttccccttcatcgagcccccaccaccagccagcctggaaaccgccatcctctacctccgggaccagggggccctggacagctcagaggccctcacacccattgggtccctgctagcccagctgcctgtggacgttgtgattggtgagtacccacccccctcstgatcactcagggccccaggagcgggtatgggcacagctcactctctgagtggcctgggggcaagtctgtttcttccctgggtccagttcatttattcactcttcactgggccaggcactgttctaggtgctgggcatatagcagtggacagaacagacacaaatctctggcctcagggagctgacattttggtgaagaagaccagcaatacattaggacaataaggaaaaggcatagtagatcagatggtgcctagtgttctggagagaagaaacaacggggttggggaatggggagttgcagtttgtaatacaggcctcatgtataaggcagacctcatggggaaggtaacatctgtgcagagaaatggagatgagggctaggagccatgcaaatactagaacatgcttgccagcagaagtcgagaaacatggccggcacagtggcccacacctgtaatcccagcactttgggaggctgaggcaggtagatcacgaggtcagcagttcgagaccagcctggccaacatggtgaaaccctgtctctactaaaaatacaaaaattagctgggtgtggtggcacacgcctgtaatcccagccacttgggagggtgaggtaggagaatcgcttgaacctgggaggtagaggttgcagtgatgcagtgagccgagaccatgccattgtactctagcctgggcgacagagcgagactccatctcaamamaaaaaaaaaaaaaaagcaaaaacaaacaggygasattcattttgataaaatagctgattcaacctaatatacctaaaacatcacaattttaacataatcaatagaaacatttttgcaagattttatgttattttttaccatacgacgtcttggaaatcttggtttggaccagccatgttcaactgctcagtagccatgtgtggccagaggcggccgtattggacagtgcagatggtgcatgagggtgttcgggcagtgggaacagccagtacagaggccctgtgggggcacatgcctgctgctacaggaacagtgaggagccccgtgtggctgcagtggagtgagagggagaaggtgggagatgtaaccaacagtctcatcattcattcattaaatcctttttttttttttttttttttttgagactgagtttcgctcttgttgcccaggctggagtgcaatggtgccatctcggctcaccacaacctccacctcttgagttcaagcgattctcctgcctcagcctcccgagtagctgggattacaggcatgcgccaccatgcccggctaattttgtatttttagtagagctggggtttctctatgttggtcaggctggtcttgaactcccgacctcaggtgatctgcccgccttgacctcccaaagtgctgtgattacaggcttgagccactgctcccggtccattgaatgtgtgtgtgtgtgtgtgtatatatatacacacacacacacacacacacatacacacacatatatatacatacacacatatatatacacacacatatatatatgtttttttttctttttgagatggagtctcgctctgttgcccaggctgaagtgcagtggtgcaatcccagctcattggaacttctgcctcctggattcaagcaattctcctgcctcagcctcctgagtagctgagactgtaggtgcccgccatcatacctggctaatttttgttttgttttgttttgagacagtgtttttgctctgttgcctaggctggagtgcagtggtgtgatctcagctaactgccacctcctgtgttcaagcaattctcctgcctcagcttcatgagtagctaaaattacaggctcacgccaccacgcctggctaatttttgtatttttagtagagacggggtttcatcatgttggccaggctggtctcgaagtcctgacctcaagtgatctgcccacctcagcctcccaaagtgctgggattgcagacttgagccaccgtgcccggccagtatttgttttttcagtagagaaggagtttcaccatgttggtcaggctgatctcaaactactgacctcaagtgttctgcctgcctcccaaagtgctgggattacaggcatgagccactgcgcccggccaatatttgtttttttagtagtgtcaaggtttcaccatgtcggccgtgctggtcttgaactcctgactttaagtgatctgcccacttcggcctttcaaactgctgggattacaggtgtgagccacagctcctggcccattcattaaataatttttgagcacctgctctgtgccaggtcctagtctagatgccagagatacaacagtgaataaaacaaaactcctgccctcacggagctcacatgtaacaggggagatggacaggggcagataaatgagtgaaaacacggaatgtcagccgctgattgctgctcaggtggatgcagggcacggtgggcacagtgggggctgggagcagtgttaattggctgtcctgggaggccaattaacagtgacatctgggcagaggcctgaaggaggggaggggacagctgtccctctggccctgggtcaggtgaggagctttgaattaaatgggaagtgtttaagtggaactgggtcctaagtggctgaaggtggccagaaaattgatcagttgacctggcggttctgtgaggatctggaaagggcgggtccacagaggtcgacggagaccattttcagttcccagccctcctgatctcaggtcttcagtagccagtcacaagcagatgtggtgctcctcgtccccacgctgtgtcatcaggaatagggcgttaatcttgagggatttggggccagcagaccctctgaccctgtckttcttgtgtgcaccgtcagtgtctcaggcactcacctgacgctgcagatgccaccaccagaggctgggtgtggcctgtggtgtctggcttgcaaggctgtttcagagaatgtgacgcaaagtgccctggttgtgcgtgagtgacaggaaagacaggctctctcgcttggattccccagcacttggggtcatgacagggcctcccttgggaggcacaggcaggtggagtacccaagatcccccaaacgcagaaagaagtcttggcttttccacagctcagacccctcccacctctctcctctgcacagcgtgtccccagctctgccccgcacccctctcttgcgggctcaaggatgtcaaaactcttcctctccctcattcctgagtcatgctcacccctcccggggagctcactgactgaggcttgttcatcttgcctgattctcctgactcaagactttctatttccagcagcctgaggcccaccatggcaggaccacccatgtatgtgtgttaacaccattaaagcccccatccttgcagcayagcagggcttcagtgtgggcaggaggctggatccgctggacttggagggctgcccaggctaagaagatggttcatttttgttttatttatttatttagagatggagtttcactctgtcctccaggctggagtgcagtggcatgatcttggctcactgcaacctccacctcccgggttcaagtgatcctcccacctcagcctcctgagtagctgggattataggcatgtgccaccacactcagtttttgtattttttagtagaaacagggtttcaccacattggccaggctagtcttgaactcctgacctcaagtgatccgccagcctcggcatccctaagtgctgggattacaggcgtgagcccctgcgcccggcttcatttttgttttggaaggaaacagggctagagcagggagaatctgaactgagaagcagaagaatgttctgtgagctcttgctgtgtgccggcgaaaggctctgtggactttccgttatttcatccttacctgctgagggcagggcctctgatcgcccccagtgtgtagatggggaaactgaggctgggcccaggaggctcctgagggcatggggaagcctggctttgatcggaggtgatggtaaatgcctcactcacattatctccctgagggctgggkgcaggtgcccccacttgccctgtggggaaaacgaggctcagagaactgctgctcagggtcacagtgggaactgagaggcacggatgaccctgtgctgggcgtcctctgtgccaggtggagttctgaacgcttcacagggtgaaacacaaagcatcctcttggcagcctgaggagaggccaatgctgttgttcccccgtttacagatggggaagcagcgtcacggcgaggtggggccacttttccctggtgacagagctggggtgtcctggaataggacaggggcctgcacagtacagccccaagccctgctttactgccacctttgttttatgaggccagctttttttgtttgtttggtttttgagacgaagtcttgctctgttcactcaggctagagtgtaatggcaagatctcagctcactgcagcctccgcctccagggttcaagtgattcttctgcctcagcctcccaagtagctgggattacaggcgcctgccaccacacccagctaatttttgtatttttagtagagatggagtttcaccaggtttgccaggctggtctcgaactcctgacctcaggtgatctgcttgagtccagttttgtgacaggcactatggaaagtcagtgaaggtcaacggtgggggcgggtcagacacatgacacagaccactagttactggacaggtgggcaagggagcccccagaagtccagcgtcagctcgggcgcccagaaccaggggatgtctagatgcccgctgtggagcgctcacagatggagacagggttcacctgtctccaggtgagactcggccaccctgggagacggttcctgccacttttcctctctgtggcctcccctctgtccttcctcccctttccctacctctcccagcccctgccccatctttctccatgtcttcrccttctgtcccctcttcstcttccacttccaccttgacctaaacaaaggctgcaggagaagattcatcctgtgataagcacaggagtcagtgcctgcctgtgccagggcagagctagagggactcacttacaggtgacactctagcgcggaggagagacgtccaccgtgatgggtcaaaatgagctcctagagcaaagaccaagccagggaagcatcagagcgctgggggagtgggttgtaaatagcaaagtggggaacttggtgacaggagtagtcagcgcttagacagtrtctcctgtgtgtccaaggaggcagggactggccatctccaatctacaaatggggaaactgaggcccttgcccatggccacgtgaccagaaagcacagcgcgtgggtttgaatctccatctgggtcacragacccttagtgggcaagatggagggggtgggagcaggagggcaggcgggagggcaggctggggccccgaggggtgagggctgcgcctgtcctggcacccaggagcctcaaccccgtgtccgccgctgcagggaagatgctgatcctgggctccatgttcagcctggtggagcctgtgctcaccatcgcagccgcacttagcgtccagtcgcccttcacccgcagcgcccagagcagcccagagtgcgcggcagcayggcggccgctggagagcgaccagggtgaccccttcacgctcttcaacgtcttcaacgcctgggtgcaggtgaggctggtggtgggggccctctgtctgtcaccctgctcagggccaaggccttctgtggctgtggctcctcctcgtgtcccaccctcagccccaccctgggaggaccactgagccccccacagactgggcctgcctggggagggccatgtctccatcatccatgctttcggctcaggacagcatgtgcccaggcccggggctgagaggagcctggggtttctgaagcactgatgaaaacctgtgccacctggagaaagtccaggctccttgggaggcatctggagatccagtatatgtcccttgagtcctcaccctaaccctggccctgtagtgtagtgctgggggcccatcagtgccaaaactaccctggccctgccctcccggggytcacagcccagtgcagggagacagaccactgatgtgacagtgacaacccagagagggctggaatggggagtccagggggctgggacaacccagcggggcatctaacccagtttgtgggtagtctgggagggcttcccataggagggggcactggggctgagacctggaagcaggagagcaggtgtccctgagggatgcccattttggggctctgggtgctcggtcagcccctccctscccgcactggccaggccctgacaccctggcgtctgctcctccacccaggtgaaatctgaacggagcagaaactctcgcaagtggtgccgccgccggggcatagaggagcatcgactgtacgaaatggccaaccttcggcgccagttcaaggtgaggctcgggaggaggggtaaggccggccccactcaggcagacgtgtgtaagcacactccagaacactgcttccccttcccrgacagtggtcagaccagaatcccaccctgcacccacctcccccaccacccggtgaccaggtgttggggcagctgggcagagcaaagggagcagaaatccaggagggcttcctggaggggtggaccgagtcagtggacatgcagcatcctygggaagagctcgccctccrgactggggatgctgagctggctgcatgggcatggtgttggaggcagcctacggttgtggttggccggcacatctggagccagacacctcagccacaratcccagctctgccatttctgacagcgtggccccgggtgtgttactgcttgtctctgggcctcagcttcccctcgataaaaagagaggataaaaatagcacttgccagccgggcrtggtggctcacgcctataatcctagcactttgggagggcgaggtgggtggatcacgaggtcaggagatcgtgaccatcctggacaacatggtaaaactccgtctcttctaaaaatacaaaaattagccaggcatggtggcacgtgcctgtaatcccagctacttgggaggctgaagcaggagagtcgtttgaacccaggaggtggaggttgtggtgagccgagattgagccattgcactccagcctgggcaacaagagcgaaactccactcaaaaaaaaaaaaaaaaaaagatttgggtttctcctgcgcccacacagttctgcagcttgtttcatagatactgttctccatctgagtgcagacagacctgctgttaggtccttttccatggttgtatccatggattgagaatagaataaaagggttcctggtgtaatccattctgtttggttggagatgggcaagctgaggcccagagggggcagtcacccagccgacacctcckgtaccatttctggggtcccggtgttggggaccacagatgccccgawtgctctgagcatgggtcccgagttctctctggctgctagagcagtgttcaggcttcattggtccccagatgctttgagaatctaatggaaagtgtgagccctttgcacccacatgcacacatacagacacacatgcacgcacaatctcctgtgtcctccatcggtcagggctcagcaggaaacagaaggtccaaccaaattgggtcacttgaggaatgttgacaagatgtgggcacggggagggcaggggtctcagattttatgggtcacaggcagctggagggtctgttgggtccagatggccaaccccgccgagccccctcctctctccacttggtcgttctgggatgaggcccaggacttggcattcccagcatgtgcctagatgccccagggctacactcagaagcactagtgcaggacgcccaccagggctgtgtgggaaagcagggccccccagacccaaggggcaggtggggcagtcagcagagcctggagccagctgtgggaaaaggcactggacgcccgcacctgcctcctcttgcccctggccccggtgttccctccactgaccagcgaggacagctctctctctggagcagcgatccatgcccagcaccatgcgaggggctgttttcagccccctttgggcactagcagccctgccactgggagggtccccatttccatgagtccagagcccactgagtctgccctgaggccctcacccctacccacctgcccctaggagctgttggaggaccacgggctgctggctggggcccaggccgcgcaggtaggggacagctacagtcggttgcagcagcgccgggagcgccgggccctgcaccagctgaaacgccagcacgaggagggcgcggggcgcaggcgcaaggtgctgcggctgcaggaggagcaggacggcggctccagtgacgaggacagggctggcccagcccccccaggggccagtgatggcgtggacatccaggtgggcgccatgggctgtggggtgtgggggtttaccaaggtgggccttggcctctcctgggggggtcccaggggacatggccctgtcctcatttcaggagccgggtttccatggacggtgcttggtcccaggtatctgcagagcctgggggtctgcggatcatggtaggagcccctcaggtcccctaagactctgcctccccgtgctccccccaggatgtgaagttcaagcttcggcatgacctggcgcagctgcaggccgctgccagctcagcccaggacctgagccgcgagcagctggctctgctgaagctrgtgctgggccggggcctgtacccacagctggccgtccccgacgccttcaacagcagccgaaaggactcagaccaggtggggcctgttctgccccatcctatgttttgtcctccaacacacgaaccctgagtgcctgtcctgtgccgggaatgcagtggtgactgaaacaaccctggttctgtccccatggggctcacaacccagtgggaggacagacccatccccagacaacccagagtgggcagggcttggggagtcmagagcactayaggagcccacagggggcatctgccccagatttggaggagtcagggagggcttcctggaggagggracctgggccagagggtggaggagaggcatcctgggcagaggagagagcagataggagggcttgtgctttctctctgtcctccgcagattttccacacgcaggccaagcagggcgccgtgctgcaccccacctgcgtcttcgctggcagccccgaggtgctgcacgcacaggagctggaggccagcaactgcgacggaagccgaggtacagtgagcccaggcggaaggaacccccayccgggatgtgaggggcagggataccgtgaactcccaggcccctctggctggggctcccacaccggcccaggctggtattgacgggggcccacaggaggggaagttccagggccaggcctccctgggtagccttgggtgactcacccctgctgggcctcaccttccgcatggtggtgatagtcaacctaagccagtgtggctgtgcccagagmgtgagcaccggtcagggggcctgtcctatggactctgtgagctcccaggtgggtcctgcagagggaggcccccctggcacccgtgtgcatggaagggtgtctcgctgcaggcatggctgcgtgctgggagtcacattcagatttggctgaccttcttgtctgagccaggccaccaaagccatgccgtaagcatactctttctatcgatgtgtactttgaccgggtgggacaggcgggcttctgatgggcctgggtgggccagggtgggcctgagcggtcctcctcaacctttcagacgacaaggacaagatgagcagcaaacaccagctcctcagcttcgtgtccctgctggagaccaacaagccgtacctggtgaactgcgtccgcatccctgccctccaggtgggcctctgccccaccccgcccccatgcccagatatgagagctgcgttgcccagggtggtgggtgggggcaccgcgtgggcttggaggggccacctggcacctgggctggccgcaggcgtcagccttgggccgttgctgtggctgctttttctctcattcatggacttgctcaacagttaacctgccaagtgcctgctgggtgccaggcgctgtgccaggtgccaagggcgcagcagggaaccaggcatgaagcccagcccctgccctctcgggctctagtggcaggggacagtgacagcagtagcacagtgatgccctgagcgacgtgtgggagggtggacacagggtgtggtacaagataaggccacctggtgtccccaggcagagacccaaagaggagagcgtgtggatctcggggcagagtgttccaggcagtggggtggcctgcacagaggctccgaggcagacatgtgcctggcgtgcagtcagcaagggagagcgtgtggagatgaggccagagaggcgagggagacaggaccctggggacttctcagagctgggacagggtcccagccaggagggctggcagctgccaggagggagaggagggtgctgccccggtggaggctgaggccgaactcagatcatggatgcccttgcatgggcaccggcagcagagccatgggccccatggcagccactgccctgcccctagtgctcctcgagcgtctttgtgatcctaggcctggcctcggagtcctcacgcagccctgtgggtctccctttatagaggggactgaagctcaggcaggggcggggatacgtcacctaagtcacacaccgagcaggtggccaagccagagctcctgggtcacactgccccctcctgcctcctggctcactaccagcactccccggcttgggtcccagggaacgtggaggggagagaggaacctgcaggctcctagagcctcagggttttgttgacactgcgattgccaccaacaccacaaaagccagctcagctcagtcacttctgtgygtgtccacacctccctcgagcccgtctggtgggccaggcactgttagtgttcagtgttctggggccgggggtgcagctgtggtcaatgtcaaccaaactccccaccctcatggggctcagataggatggtagaggcagacggcaaaccaaaagggtgatgccaggtgctcatgtgagcatgggaaagcaggcagcacgcaggccgagggacagaggattggcgaccagccgggccgcaggaagcggaacagacctgctacctgaggcgctctctccctgcactggactgcttgttgagagaayctggccagctcacacctggaatcccagcaccttgggaggctgaggtgggaggattgtttgagcccaggagttcaaaggcagcctgggcaacatagggagacwctatctrtctctacaaaaaattttaaaaagttagctgggcgtggtgttgtgtgcctgtaatcccagctactcgggaggctgaggcaggaggatygcttgagcctgggagattgaggctgcagtgagctgtgattgttgacactgcactccagcctgggtgacagagtgagacactgtctcaaaaaataataagccgggcatggtggctcacgcctataatcccggcactttgggaggccgaggtgtgtggatcagttgaggccaggagtttgggaccagcctagccaatgtggtgaaaccccatctctactaaaaatacaaaaattagccgggtgggtggcgcgtgcctgtaatcccagctactagggaggctgaggcaggaaaatcgcttgaacctgggaggtggaggttgcagtgagccaagattgcgccattgcattccagcctgggcaacagagtgagactcatctcaaataaataaataaattaataataakaakaakaagaagaagaagatggagaaacttcacattcacataagcaggcagaacagtatatggagccctcctgtaccatccccggtccccaaaccatccacgcatggccagtcctgccctttcctctgccctggccccagccctgaggattttccccaacatcttatgagccacagcactgstaattacagcgctgacttccgtcctcacagaggagcgtgtgctcagggtctgggctctccctgcacgtcgtgtgtgtctgagtgcctgctgtccctctgccaccctgcctgagaatgcagctgtctctctcccagcacgctcccatctgccgccccgccaccccagcccccttccctgactcagcggctgccttgttcatgccgtatccccagcacccgaaggggtgcctggtacagcgggtagatggcgggtaggtggatgcctcacatagacagggctggtgggtgggcaggagcccagccgggcagrgcctgtctccaatagcgccctgcccctcccacctactccctgtcttctgcccccyctctttcagtccctcctgctttttagccggtctttggacaccaatggtgactgctcccgcctggtggccgatggctggctggagctgcagctagcagacagtgaaagtgccatccgactcctggcggcktccctgcggctccgtgcccgctgggaaagtgccctggaccggcagctggcgcaccaggcccagcagcagctggaggaggaggaggaggatacgccagtcagccccaaggaggtggccaccctgagcaaggaactcctgcaattcacggcatccaaggtaccctccaccagggtgcccgtgcctccctatggccagaaggggcatccgtcactgggcttgagcctcgggaaggcctggcttcccattcactccacatgggcacatttgggggttttcaggccacagaggttcagtcacttacacaaggtcactccactggtctgggtggagctaggatttgatcccaggagcctggttccagaggccacactacccactgctgccttgtttactaagcaccttctgcaagcgtggctgatcccctcttgctaacagtaaaggacaggcagggtgtgagagggaagccgtagacgtctgcttgtggatgggaagaactgaactgagcagacttgaaaccagcccctgactcttaggtggggagtggaaattgctcgtggttctacttcatgtgggtggggtggggagaagggtacaatccaggctgacttcctggagtagaagggcttgaggacaaaggagcaggaacccagtgagccatggagaggggaccaaggctgacatgctaggaggaggaggggggaggtggccagacttgaaggttagactcaaggtctgaatggggtcccaccagtgacaggggcagaagaggggcctggggagggcaatttagatgggggtgggttatcaggtatattctagacagacccctggtcatgtgtgtctgcagccaaattgtgattggtgtaagcacttggctcccgtaactgcaaagcccgagggagggcttcaggcacagctggatccaggtgctttggcggcatctccctgagtctgtctctctccattkcctgtctctccttccttagattccttacagcctccggcggctcacagggctagaagtccagaacatgtatgtgggaccccagaccatcccagccaccccccatcttcctggcctctttggcagctccaccctgtccccccaccccacaaaggggggctacgcagtcactgacttcctcacctacaactgcctcacggtaagcatgaaccctccttccctgaaggtgggatttcaggaagaccccaccaccccgtttcaccttagtccagggacatagttcccaagtggggcccrtggccctgagggcttctgggaagggtcccgggggggcacttgggtggtgggtggcacttggcgggggcccagccctgacagctggcctgccacagaatgacacagacctgtacagcgactgtctccgaaccttctggacctgcccccactgtggcctgcatgcgcccctcacgcccctggagcgcatcgcccatgagaacacctgcccccaggccccacaggatgggcccccaggtaagcacaggactgtggggacccggccacctctgcccagccgtctgyccatcccatgatggtctcctgtgcgtgtgagcacttgctagagcttcgaggactgacgacctccacccgctggccctggctggtgccacacacaggccttgtcctgaagatcaggagcccaaggcagggagagcctggagcgccacctctttctgtctgcctgtcccctgtggtgtctctgtgttgctgtctttgtctctgtttctgtctctctgtggctatgtctcttgttatttttctctgtcctgcagctatctctgccttggtcacctccaccctgttgtcacccagggatgccacacactggggttcagtgggggagatagcactggggccacatgcctccatccccggctggctgtgtctgcctstcagtctccatgtctctccttgtgtctttctctctgtctctctcactggcagggatgcrgagtaaagacagacctgtgtatttttattaatctgggagggcttcctggaggaggcaaaactgggttctccaaaggccaggagagaacctgagccccacaggtgcctggcatttgggtgcrggtagacctgtgcactggaacacgcccctcacagcctcctccttttcctcccttaggggctgaggaagctgccctcgaaaccctccagaagacatctgtcctgcagaggccctaccactgcgaggcctgcgggaaggacttcctctttacacccacagaggtgctgcgccaccggaagcagcacgtgtgagctgggccaggagccctgcccacctccgtgcagctgacctgcyctccagcccaggactaggggcaggactcttgcctgaacccccagcctgggcttagccctgtggtccygtcccagtgcagagggcctggagcacggattgtgaataaagcckcacatgctgatacacactgttaggcctgcacctgcccatccagaaagcagcagctgccttgttagtcctccccagggtctagctttccttcttcctgctgcagggtgctgcctgaggggtcctgggtaggaggggckttagagccagcagggacctcccatgtctccagattccaggtgcaggttcttagcacctccgcagccgctctctcttgagtccatcctcagtctctcctwccccttgaagtagggggaccctgaatttgcccatccacctgggtcactttgagagttgtgcaggggggctgggagcactggtgttcacgtgggaccacaggctgcaccataagacccactcacaataaaaaaataaaaggccgagccgggcatggttgctcactcccgtaataaaaaaataaaagaacaggctgagccgggcatrgttgctcactcccgtaatcccagcactttgggaggctgaggcgggtggatcgcctgaggtcaggagttcgagaccagcctggccaacatagtgaaaccctgtctctactagaaatacaaaaacttagctgggtgtggtggtgggcatctttaatcccagctactggggaggctgaggcaggggaatcacttgaacctgggaggcagaggttgcaatgagctgagatcatgccattgcactccagcctgggcgacaagagtgaaactccatctcaaaaaaaaaaaaaaaaaaatcaggctgaggcaggtggtttgcctgagctcaggagtttgagaccagcctgggcaacacggtgaaaccccatctctattaaaatacaaaaaattagctgggcgtggcagcgtgtgcctgtaatcccagctattcaggaggctgagacaggagaattgctagaacccaggaggcggaggttgcttgtgagccgagatcgtgccactgcactccagcctgggtgacagagcgagactccatctctaaaagaaaaaaagaaaatgaaaagaacaataaaatcactcaggagaaaaagaaggcacggcataggaatggaaggaggacaacctgtaggtcctacagatgcgaaaaggagaagagaatacgataaacaacgtgccacacagaaattcactcatttgaaatggaaaaaattattgaaagacactarctacccaaagctcattcaggaagaaatagataaccggaacaactctattaaggaaatgtaattcatagttaacaaagagaacaggctcagatgggctccctggtgacgtctaccaaacatggaaatgatactcgcccacacccacttggccacagcataggggaggacgcctcctgactgatgttatgaggtcagcattatcctgctgctaaaagcaggctatgacaatgcaagaaaagaaaactctaagccttatgaacatagacaaaaaccctaaataggagttcagcacatcatatttagcaatatataaatacagtacatcatggccaactggggcttattctaggaatggaaggttgatttaacatttgaaaatcaatctgattcaccatattagaaacagaaaaaaaaaaaaaggttgggcatggtggttcatgcctgtaattccagcactttgggaggccsataagggtggatcagttgagtccaggagttccagactgggatggggaacatagcaagaccctgtctctattaaaaaacacaaaaattagccaggtgtggtggtgcacgcctatagtcccagctgctcgggaggctgaggtgggaagatcacttggtgtcagaaggcagacattgcagtgagctgagattgtgccactgcactccagcctgggcaacagagcaagaccccatctcaaagaaaaaaagtatataaacccctagtcttagtcagggagatggatttgagagtcatttcccatctccttggctgcacatctcattaaagccctcttccttggcaatactcgctttagtgattggctttctgtgcgaccagcagcaggacctggactgaacccctgatttttggtaacagattccattcaacagtttttttttttttttttttttttttttttttttgaggcagggtctcgttctgttgcccgggctggagtgcagtggtgcaatctcagcttactgcagcctccacctcctgggctcaagtgatcctcccaaatcagtctcccaagtacctgggattacaggcrtgtgccaccatgcccagctaatttttgggtgtgaataggtttttttgtttgttttttgtagagagtttcaccatgatgcccaggttggtctggaaccatgggcttcctttctttccaaggaagaaggctttaatcagatgcgtggctgaggagatgggaaatcagtctcaaatccgtctccctaactaaaactaggggtttatatactttttttctttgagatggggtcttgctctgttgcccaggctggagtgcagtggcacaatctcagctcactgcaatgtctgccttctgacaccaagtgatcttcccacctcagcctcccgagtagctgggactataagcgtgcaccaccacacctggctaaattttgtgtttggtgatctgcccacctcagcttcccaaaatgctgagattacaggtgtgagccactgcacccggctcattcaacagtatttatttaatttatttatttttgaggcggagtttcgctcttgttgctgaggctggagtgcaatggctcaatctcggctcactgcaacctccgcctcccgggttcaagtggttctcctgcctcagcctcccaagtacctgggattacaggcgagtgtcaccacacccagctaattttgtatttttagtagagacgggggtttctctatgttggtcaggctggtctygaactcccgacctcaggtgatctgcccgcctcagcctcctaaaaatgttgagattacaggcatgagccaccacgctcagcctcaacagtcttttaaaatgttcctcttgaaggctaacatgcacaaattataagtaaacagcttggtgaattttcccagatgaaacatacctgtgccagcagcacccagataaaaaaataaaacaccagcagccctccacccgctgcagcccagctcctccgtctcccaggagtgwccaatattytttttttttgagatggagttttgctcttgtcgcccaggctggagtgcaacggtgcaatctcggctccctgcaacctctgcttctgggattcaagcaattctcctgcctcagccttccgagtatgtgggattacaggcacccgccaccatgcccagctaattttgcatttttagtagagacgggttttcaccatgttggccaarttggtcttgaactactgacctcaggtgatcctcccgcctcagcctcccaaagtgctgggattacaggcgtgagccactgcacccggccgtgaccaacattcttaatctgtcctctagtgctggccactctaaaacttcacaagaatgtgctgtctgtgtctagcttcttttacccaacatgagsttgcatgggcttggttcattcattctgttccatgaattcatcacaatatatccattcttttgtccagggacatttggcttccagaaacctacccctaacaccagcccttccctccctctgcagaacaaaggccccatcagaggggacgtgctgggtgtcagcgtcagcttctgggaggaggaaggtcagagctaaggcctgaaggatgatgaggtatcargtgggtggaggggagacgctcaggaggtgggaaaggcggaggtgcacaggcttggttccaggtacaaataacgttactaggagcacacagtacctggattttgatgaatacattgtacatttctgtcctgtatgtatccagggttataggacgtgattataggacacgcatatatgtttggttttagtggactcttaaaaattgttttccaggggccgggcacagtggcttacgcctgtaatcccagcactttgggaggcctaggcgggcagatcacctgaggtcaggagttcaagatcagcctgaccaacatggagaaaccccgtctctattgggaggccgaggcgggaggatcacaaagtcaggagatcgagaccatcctggctaacacggtgaaaccccgtctctactaaaaatacaaaaaaattagctgggcgtggtggcgggcgcctgtagtcccagctactcgggaggctgaggcaggagaatggagtgaacccgggaggcagagcttgcagtgagccaagatcgtgccactgcactccagcctggttgacagagcaagactccgtctcaaaaaagaaaaaaaaaaaaaaaaagaaaacccgtctctactaaaaatacaaaatttagccaggcatggtggcgcatgcctgtaatcccagctactccagaggctgaggcaggagaattgcttgaacccgggaggcggaggttgtggtgagctgaggttgcggtgagctgagattgcgccattgcactccagcctgggcaacaagagcaaaactccgcctcaaaaaaaaaaagaaattgttttccaggccaggtgcagtagctcacacctgtaatcccagcactttaggaggctgaggcgggcggatcacgaggtcaggagtttgagatcagcctggccaacacggtgaaaccttgtctctatgaaaaattcaaaaattagccaggtgtggtggcgggcacctgtaatcccagctacttgggaggctgaggcaggagaatcgcttgaacccaggaggtggaggttgcagtgagccaagattgcactactgcactccagcattgatgacagatctagactccatctcaaaaaaaaaaaagaaaaaaaaaaagagttgtttacatattcctgaaacaagtcgtttgttagatatgcatattgtaaatattttctccaagtctatacttgccttttcatttcattatttctattttttgtagagacaggcagggtcttgctgtgttacccaggctggtctcaaactcctggcctcaagtgatccttccgcctcagcctcccaaaatgctgggattacaggtgtgaaacagtgcgcctgacccatctttatcattttcttaacagtatcttttgcagagcagaatttgtttttttgagacagggtctcactgtgttgcccaggctggaatgcagtggtgtgatcatggctcactgcagcctcgacctgcccgggctcaggtgatcctctcacctcagcctcctgagtagctgggactagacgcacatgctaccacacctggctaatttttgtttttttttgtagagatgaggttttgccatattgcccagcctggtcttgacttcctggggctcaagtgatcctctcaccttggcatcccaaagtgctgggattacaggcatgaactactgcacctgacccacgtttatcattttcttaacagtgtcttttgcggagcagaagttgttgttgttgttgttgttttgagatagggtctcactgtgttgcccaggctggagtgcagtggcataatcacagctcactgcagcctcagcctccttgggctcaggtgattctcccagttcagcctcctgagtagctgggactacaggcaggtgccaccacacccaactaatttttgtattttttgtagagatggcatctggccatgttgcccaggctggtctcgaactgggcttaagcaatcctcccacgttggccttccaaagtgctgggattacaggtgtgagttgctgctcctggacaagagaagttttgtattttgatggaatttcaaattatcattttcttttgtcatttctactttttctgttctacctaacaaatctttgcctaccctcaagatcatgaagttttttcttatgttttcttctagtttaatagttttagatttttaatataaaccgttaggtctrtggtccatttccagttaggcattgtgtatgatgtgagttaacgctcatggctcatttttctgcatatggatgtctaatggttccagaaccattttttgaaaaaagtattcatttccccattgaattaatttaatacctttactgaaaatcagtagactaggctgggcgcagtggctcacgccagtaatcccagcactttgggaggctgaagcgggcagatcacttgaggtcaggagttcaagaccagcctggccaacatggtgaaaccctgtctgtatgaaaaatccaaaaattagctgggtgtggtggcatgcgcctgtagtcccagctacttgggaggctgaggcgggaggatcgcttgaacctgggagcagaggttacagtgagctgagatcgcaccattgcactccagcctgggcgacagagcgaaactccgtctcagagtaaataaataagcaaaaattagcctggcatggtggtgggcacctgtaatcccagctactcaggaggctgaggcaggagaatcacttgaacttgggaggcagaggttgcagtgagctgagccgagatcacgccactgccctccagcctgggcaacacagtgagactctgtctcaaaaaaaaaaagagacagattctcgctttcgctttgtcatctggggtggagtgcaatagagcaatggctcaatctcagctcactgcaacctccacttcctggattcaagtgattctcatgctgcagcctccaaagtagctggaattacaggcaagcaccaccacgcccagctaattttttatttttattattttttatttttttattttttgtagggacaggttttcactctgttggccaggctggtctcaaactcctggcttcaagtgatctgcctgcctcagcctcccaaagtgttgggattacaggcgtgagctaccgcgcctggtcggttcttctttaatttagcaatatttcataattttcagaatacagatcttgcacaaacatagtgcaggcgcccaggccacagtttcccctcaccaggggccaaccattgctgaatcacagagagccctgtgggccgggagtaggcaaggagaatgttgtcatcctcattttgtatggctgctttatcatttgtaaaaggaagttaaggatcgttcccacctcacaagttgttgttgagagttgatgcattagtccacgtgcttagagcagggattggcacataaacggttctcagcaaacatcagctacagtgatcactaaggcaacaggaaaagtaaccaacatttgactgtcactcttcttctgtgacatcagagacaaatagggctacttcccaagtcagcaatatgggtataggttttctctcttacctgctgcacccaatgagtccgtaggccctgtccttcctccctccatcttctgctgtgtgtgtgtgcgcacgtgtgtttgagacagagtcttttactgtcacccaggatggagtgcagtagtgcaatctcggctcactgcaacctccgcctcccagattcaaacaattcttgtgcctcagcctcccaagtagctgagactacaggcatgcaccaccacgcctggctaaactttttgtatttttagtagaggtggggtttcactatgttggccaggctggtcttgaattcctgggctcaagcgatcctcccacctctgcctcccaaagtgctgggattacaggcgtgagccactgcacccagccatgttttgctgtttaccccctgccagttgctgtagcagccacacactgaccatccctggaaggtgacacatgctcattttggtgacaccctcatctccaaaatgcctggctctgtttcccaatatcctttctctttctcttttttttttttagatggagtcttgctctgtcatgcaggctggagtgcagtggcaccatctcagctcactgcaggctctgcctcctgggttcaaatgattgtcctgcctcagcctcctgagtagctgggattataaatgcccgccaccacgcctggctaatttttgtatttttagtagagacagggattcaccatgttggccaggctggtctcgaactcctgacctcaagtgatcctcccacctcggcctcccaaagtactgggattacaggcatgagccaccatgctgggccccaatatcctttatgcaccttcctgcagtccctggatgagcccctccctccctgtgctcctcccctcctcgccaccctctcgcctccactctgcctccctgtgtaccaaaaccccacagactggatgacttgaaacaacagatctctcacattcttgggggccagaaattggaagtcaaggtgttggctgggctgagctccctcgggaacctgccaggagtcttccctgcctctctctagcttctgtcacactgctggcagtccccttttatagaagggcatgtgtcatattggaccagagcccaccctatgacctcatctgaaaagaccctttttccaaataaggtcacatgcacaggcgctgggaagaggaattagcataccctctggcgggacacaattcaacccatcctaccccgtctaatccactggagggataaagcgctagcccgactctgtcccttctctgctcagagttcttccaggacaatgaaatatcattcagcaatgaaaaggaatgacaggctgggcgtggtgactcacgcctttaatcctagctctttgggaggctgaggcttaagcccaggagatcgagaccagcctggacaacatagtgagaccccatctctacaaaagatacaaaaaatagctgggcgtggtggtatatgcctgtagtcctagctatttgagaggctgaggtgggaagatcgcttgagcctgggtgatccaggttgcagtgagccgagatcacaccactgcactcagcctgggcaacggagcgagaccctgtctctaaaaaagaaacaaaacaaaaaatacacacaaaaaaatggaatgactgacagacactacagcagtgctgcagctggaagacatgctactgaaagaagccagtcacaaagggcagtgtagcgtgattccacttacgtgaaatgtccagaataggcaaacccatggagacagaaaggggattagtggttgccgaggactgggggccggcgatcactgttaggaggttcagagtttcttttggggatgttgaaaatattctagaattgattgtggtgacaggtgcacaaccctataaatacactaaaagccattgaactgtacgctttaaatgggtgaattttatgtatgaatcaggtctcaatgaagctgttaacaaaaagaactctatggctctccagcgccccctggagggatgcaggatcattgccttccctcaaggttccaccaggccggcctcccttccgcggctccctctatcctgtcagggcctgtgcacctccgccttccccatctcctgagcttctcccctccacccacatcacgcctcatcatccttcaggtcttagctcccaccttcctcctcccggaagccgaccctgacgcccagcatgtcccctctgatggggcctttgttctgcagagggaggggaggggctggtgttaggggtggattcctggaattctttttaaaaatgtattatctttagagatagagtctcattctgttgcccaggctggagtgcagtggcacaatcacagctcactgcagcctcgacctcctgggctcaagtgatcctcctgcctcagcctcccgagtagctgggaccacaggcctgcaccaccayatctggctaattgtttaaactttttgtagagacaggtctcactatgttgcccaggctagtctcgaactcctggccttaagagattctcccacctgggcctcccaatgtgttgggattactggcatgaaccaccgcccggccaagtcatagcactctggtggctgctctgactctgctgtccaagcggtaaccacccaccttgcctttggtcattaagttctgtcacttggtccctgccaccctgagatccaattatccccattggagtcaggctttccgattcttgctctgtccacccaggctggagtgcagtggcgtaatctcagctcactgcaacctccgcctcccaggttcaagcaattctcctgcctcagcctcctgagtagccagggattacaggcacccgccaccacacccagctaattgttttgtatttttagtagagatggggtttcatcttgttggccaggctggtctcgaacccctgacctcagtgatccgcctgccttggcctcccaaagtgcagagattacaggcgagagccaccgtgcccaccataatttttgtat

SEQ ID NO: 93824 - DNA, 34208 bp, Homo sapiens
ctgtatccgagcagcccacagtcctagctgacatagatgaatgtttgttctctgcccatcctgccccagaatataagctccttgaggagagaactggtctgtttagttcacagctaaatattcccagccctctggaagtccctagcactaaagagatgcctcactgaggctgggtgcggtggctcacgcctgtaatccaagcacttcaggaggccaaggcaggcagatcatctgaggtcaggagttcaagatcagcctggccaaaatggtgaaaccccgtctcccctaaaaatacaaaaattagctgggcgtgatggtgcatacctgcaatcccagctacttgggaggctgaagcaggacaatcgcttgaatccaggaggcagaggttgcagtaagccaactttgcgccactgcactccagcctgggcgacagagcaagactcctcacacacacaaaaaaagatgtttcggccaggcgcggtggctcacgcctgtaatcccagcactttgggaggccgaggcgggtggatcatgaggtcaggagatcgagaccatcctggctaacaaggtgaaaccccgtctctactaaaaatacaaaaaattagccgggcgcggtggcgggcgcctgtagtcccagctactcgggaggctgaggcaggagaatggcgtgaacccgggaagcggagcttgcagtgagccgagattgcgccactgcagtccgcagtccggcctgggcggcagagcgagactccgtctcaaaaaaaaaaagatgtttcataagtatttgttgaatgaataaatgaatgaaacgggccaagtgtggtggctcacacctatgctgtaatcccagcactttgggaggttgaggcaaaggatcgtgtgaggccaggagcccaagaccagcctggtcaacataggaagaccccccccacacacacctctctaccaaaaaaaaaaaaaaaaaaaaaggtgcttcaaacaccgtgacacgagagaactagaaatcatggatggtgagaccagtgacacagatctggaaatgtatggcttcgagtccatatgcagaattcttccgtccttccagtgtcttgctttttacacaaaatatgccccaccccacctatgggcaggactgagaaggcaggagttccatcagcagcaggagccttccatttgtcctgctttttytgttccagatgagacaaaaggacccagtgaaaggaatgacagcagatgactaaagccgcctttcccctctgcactgtacgtaccaaatttctcactgtgcgtgtcacagacgctaaaatcagtttgggtttcaaggcctcagcagctcactatggagtcagaaaacctattcctccttccctctagtaatgatggttgccacgctcgatagctctccacttccactaggagattatggcccttgggacatttcagggacattttccaaagaaccacccagatagagacaatggacagggagggggtggtggatatagaaggggagttcatctgctgcgaatcactcctcctgtctgccagcttgatccatctcaagttgcagctgtcatgttgggcactccctggccttcccacgccagcgccagctcccaaaagctgccattacctgcccttcccccttggaaaacttgctggccagacagcttttgttagcacccactgttgtctggtgcttcatttccttctttatacccccgatcccatactaagctgccctcatcagaggtggcatctttcagatgctgggagggtgtttctgcccaggtcacagggccagattgggggccccttgtttcatgttgtcacttttccccaagccccctccttccgttaactctcggtgctggtttcccagtgccctgtacaccacccgagtcatgggattccagcagctcaaagcagtcttaatcactgaatgaaaaacctggctctgctcccaattagcctcagagagaaaattatttttacaaataaaagctggcctctaaccctacgggcaaggagggccagggtctcaccaggagtgacggcaggccctgcttactctccctgccccatgttcccaaagcagcctcggggaggctggagggtggaatgaggcggactgctgtgatgccagcttctcagtcactgctctgggcctcagtgctctcccccactcccttccccacccacccactggcttccctcctcctcttgaaattatccattcaggacgatttacagtgtttctgttttctcctcttgcttccttaatactttcatttttcttctagttttgcaagacagtggtcaacaggaagacccagcagctccaccctcccaagtgacaggccattttcggacgcagccgttctgtgcccattcttcaggcaactttcgattccttactgtagctaattctagatgcccttcagtattgtgaacaaatagaccgtctggtgtcacagagcccgcgtgtgcaggagcctgctcctccgagatacgtggcgtgtaggttgctgtagttacagcgcctccgtctctctccattgtgttccgayccatttctgtgtgttcccccaacctttatttccaagtgacattttcagtctttcaaatagctgccttttgtgatgtggtgatttaaatgatttaagttcatttgttctcaaccttggggtaaactgaggtattttgcttcctgggaagatcttcgcaattttgagtgctcctgtggggagcggggatgagctaaagatacaatgtttccctgccccgcaccgcttccacaaaatagcaatgtggttttgcagctctgacttctgctcccagtaacccatcgttagggcactctagcactatggaggtacccaaggctcagccagtctctatttaagaaaatttaacaaatacgagtaaccctgtcccaatcactgaatctctagttactactcttagaaacacctgtggcttcttggccctcctgttgcccgctctgaatctctctgcagtctacaaaatcgccccagtcaactctccacttggagggaattgtccagtgtggcccctagaattgagtcaccccctagataccaactgtctgaccccgaggagctctgtaagtccctgctcctcytcttccctttggggctggtgctgccactcagcaataatcctcttttctctgtgctttcttaggtccctgtcctctgtctttgaggctggttaggaagcaagagtcctgatctttcatgctgcacaatatgagcatgcaaaaagctttttccagcagaacatgttccctcrtctccagttgccggraaggaatttggggatcaagaacttagctcgtcctacccccatgttgagttctgccctggaaaacccaaagcaagtagtgatcatagtacagaacccgaccaaagtaggctggtgaggaagtccaggctccaggggaacagacgctgcccagtgttcatagcttcctgcaacttgacagagcctgagtttgcctcttagtgggagaatgagagagagctgtagtgtcacctgacattccccaaaccttgtgaagcacgttggcctaagtgtgccgtgatcccagcccacactagcctgggtgcatctgctaatgggagaccaaatctttgtccgggaagcaagaagtgggtgggagaatgtatcctgtttttgtcagtttgtttgccttactcatttctaagtgcaataagggagtgtctcacaggattgcacctgtgacatcctgatggatgcttccctgtggcyctcctggggcaagggtggacagactcagacccccagcatggttagcgctgaccttcattgaggtccctttggaaccagatgtcttgttacagacaccttcctctgtgtaagtctcctcaccttgaggggtctttagtaatgcatctgggtagcatctcaactgctggtagcatttatctgacttggaaagttggagaagaggcattcctactggagaaaaatgtcagtgttttcctataagctctgtgttagctattcattatatttgtgcttaaakatgttccttcattcatcaactaggggaagtccagatgcgggttatcttgaaagaaacaaactgacattctaggcagacagttgtctatgtggtctgagggtcagcagctgttagtctccttcctttggctcttgagacccacacatatcactttagccctaacaagggctcctcccacctccacctgttgccccagttgaaaagcatccattatgagctgaggtcagcctggatctggaattgcagcccacataaacataaaggaggatgtccctggtctgttccatccccacggatggtgttgctgctgggcaacagtgttggcttcttttaagtaccccctttcctcctcacccacctccaaactgactagcactcagagggacttatgataaaggttcagctccaggggtagtacctgagtgtgtgccatgccccttcagaccagctgcttccatcagaattccagggtcacagccccaacagaagcagcagtgcctctgtaggaggggtgctgggctctggccttctcatgcagagaggtccgggacagggtcagtatcgtgggcatgtgtatagcttcccaagttcttttacagtccctgctgggactccctgacttactttggttggttcctagtgctacttgttttacmaactacactttgtagaaytgattagattaccttgtttatttaatgtgagtttgtgcctttytgtctcaatcttccaatacaggtatattgagaaaaaaagcagtctaataaaatcctagacagaactttctggagtccagtttggtgatgtccattttccagctgtatgtatcctcaaacttgcactgataaccgccattttaccagggcaggattaggaagaggtacaaaggtgtgtctgaaaatttttgcacgtggatttctgcatataatagtcccgtgtcagtttacttatgcaaacattgcacatctgaattgtaattcggccgtttcctactgacaggatgtccttttgcttttgtctgcctcctcttcacatcttcctctttatccaccctaccaaacaagcaaaacatttatttaaagtagttttaggccgggcgcggtggctcacacctgaaatcgcagcactctgggaggccgaggcgggtggatcagctgaggtcaggagttcgagaccagcctgaccaacatggcgaaaccccatctcggctaattattattattattttttttttttgaaacgaagtctcgctctgtcgcgcaggctggggtgcagtggcgcaatctcggctcactgcaacctccacctcccgggttcaggcgattctcctgcctcagcctcccgagtagctgggattaacaggcgcgcgctatcaagcccagctagcttttgtgtttttagcagagacggggtttcaccatgttggccaggctggtcttaaactcctgacctcaagtgagccgcccgcctcggcctcccaaagtgctgggattacaggcattgagccaccgcgccccggcctacgtttcatttattgacggctaattctgtaggagtccaggaatccccaaacgtcccatatgcaataggtaatccaataagtttggagtagaagcctgaaagtgggcgtggagaacggaggcgctcccgcagtagcaggaatggggagattacctgcagccggggggcgggggagaccggatcccaggcaggacagtggctaggctgcgtgtccccacccccgaccctcgtttgacccctgggagccggggcgaagacagcacaaggacggagccctcggatccctcacgagtggggcagaggctgcggcggcggcgaagagacaacttccgccggaagacggcccctggcgcggggcacgctgggagctgcggacggcgggcgcggkctgggccgggtctagtggcggccgcacacctcgcgtcgtctggggcagtgttgcgcgtgcgctgatgacaggcccgacacgcccctcttacgtccgcgaacccgtcttcgctcagcctctcgcagctttgcgctcgtgggagagtcccgcctccttctgcgaaccgcaccacccagatcccggggtgcgcggagggcgcgtctctgacggaagccggggcggacggtcggagtccggaagaaaaacagtccgcgacagctaggcgcgtgagaccggccgcccgcagggctgctctggcckggacccgctggccgggagacgcgaacctgccggaccaccgcgcggggacgacggcggccatgagctcgcggaagctgagcgggccgaaaggcaggaggctcaggtgagggcaccctggcggcagaggcaggcctgctcggggggatcggcgccccttgggctgcgggctgggggtggacaaggcaccagacctccatgactgcctttggttcagaggcgctctcgccttctcccacgcctgtgtcaggtgggctgtgttgggcccgagcctcgcgccccctctaagccgaggccgccaagctcgttcccactggggcgcagcaggtgtcccggttgctttctggagaggacagccgtgtggggttgtttgaggttaaagacataacgaggccgtcacccttcggctctcggttagaaatctttttcctacttttcatcagcacatacatcaggaggtctgcctgatcccatggtgaaccccgggaatccgaaatcagattgagataagatcctttagggaagtgacttagcctggtctcttgcctgctctttcacggggaacaacgctaatcgcccacttagtctaagtcacgatgcttggatttgctgctaatcgtcggatttgagagtgggaacaagaaatccggacttttgctctccatcctcttagagtgagtctgggaaaagaagtctctgagtaaaaggtctttgttccttaagcctctgtcggacagcagggggagatcgtaaacaaatgaagctcaaaatctcaggccgagtgcctgggaaggtggtttctgtatagtgttgtttatgctaacagggagggacaggaagttgctttaaactggccaagaatttcttgaagtgcttttgagaacgtcgacctctaaggacggggtctgttggaggagagatgttttggcattaactgcccttttctcccatccccctgtaccctctgccattccagatctccagctgctgcaggtactcctcatcgtgtgcctaggactcatgctaggctgttcctggtctctgcagggtctgtagctcctgcccgctctgtgctccgcacagtctgaggcttcttgaagagctgctgtgactgactgttccactaaagacatctgtaggtctctctttcctgagcctctgactggatccagtgtcattgaggccccttatctagttttcttgcttccctaagacttgtaagctgaggtggaaaatatccaactgatgacttttccccagagagtactctttatttttcacggaatactacgcagacatagagcatagactcttaagagagatgtcgagaaacctgttacttaaaaactccttggccgggcgcggtggctcaggcctgtaatcccagcactttgggaggctgaggcgggcggatcacctgagagatcaggagttcaggaccagcctggccaacatggtkaaaccccgtctctactaaaaatacaaaagttagccagatgtggtggcacacacctgtaatcccagctacttgggaggttgaggcaggagaactgctggaacctgggaggcggaggctgcgatgagccgagatcatcccagtccactccagcctgggcaacagagtgagactcagtctcaaaaaaaaaaaaaaaaaaagtctcgctgaagtgcttggcaaaattggcttgctccagggatctgctagggaggagagaggaagggaatatggtggtgttatctcttttattttttaaattcctctgcccttgtagtgctgaggcctatcacaaggtgaaatctgaatccctaggatcttcctggtggtcttaggaacacttggggtgagaagtagggatcagaagttgccgactgagccatagatgatgacagaggggtgtgggtggctggaggagctgatggaattaatacattcctggcagttcagccccctaacccttcgctagcctgacctgaaattcttgggctccctttggcgactctgctatatcagcagcaccagtgctgccgggtgtgggtggctgtgagccagcatggaggacccagtccggggtggggatttcttgcttcagcagagaaaggtgaggacggacagctgatggttcagtatccccattccctccaccagcacagaaacccacatttcccatcatgagtgtggcagattgcagtgacataagcaggcctagaccccgtgcactatctttttttttttcttttgagacagagtctcactctgtcacccaggctggagtgcagtggcacaatgtcggctcactgcaacctctgcctcgtgggttcaagcaattctcctgcctcagcctccagagtagctgggattacaggcgcctgycaccatgctgggctaatttttgtacttttagtagagacggggtttcaccatgttggccaggcttgtctcgaactcccgacctcaggtgatccgcccacctcggccgcccaaagtgctgtgatgacaacgtgtgagcctctgcgcccagccgaccccgtgcactatcttatcctccttcctccatgacttccctctgcatcccttccgcagcatacacgtcgtgacttggaacgtggcttcggcagcgccccckctagatctcagtgacctgcttcagctgaacaaccggaacctcaatcttgacatatatgttattgggtaggtatctgcaggctccttcgcccatccctgaccagtcccaggtttccctgtgggaagcactgtgacctgccctcctccgctctggagtctgaaggctgggagctttcagcctgcttcagggacagtcccatgtctctggtcccgggtcagcaacggcaaagggggctggagatcagcaggcaggggagggagacctcatggccatcaraactcaggccttgaaagtccgtgaagatggtatcaaatatctgtggcaggggaagtagcctggaggccaggggccaagcctctgagctggcatggtcagtttgcaggaattgaactctgggatcataagcctcctttccgatgctgcctttaatgactcgtggagcagtttcctcatggatgtgctttcccctctgagcttcatcaaggtaacttgccagttcattggcacttgacaactgtgttttcacatctccactgacccctgcttgttgggtctgatgtgttcctcttactcctgctcagcctttcatgytgtttcccatttgtttaaagggctaaacctcccttccacctggaccccggggcccctgcctgccttcgcctttctgagggagctggagtctccaggggttgggttaacacctggatatgtttcagcttgggaagattctgaggggaggtgcagcagggcttgtcatcacctcagtgctggccgctgccccagccaccagtctctactcaaatgcccatcctgaagtctctgagtgtaatcatacggctgtcatttatcaagtgcttacttgttgttacacatcataagtagctctttatagtatatatgttattttaaaatcttaacaagtctgttgaaatagagatattttacagagaaaaccatggctcagaagccacatgcgctatctgggatttggatccagatctctcaaacttcataacccaagttcttaactactaataccttattgctatgctggtgaactctaagactgacagatcttaggcgtggctagcctgctggtgtcatagggtatcctcaggtcatacgggacgtgcacttcagattctgggggtccagaggttaggagaggggagtcaggtgtggtgggtactttgggcggctttcttagtctgagagaccagtatactctggggtgtctttagacagtaggagagtccacaggaaggccctgggttgccagatcttcaccttcaccttggttctgccctgcacacctgaggawtgaaacacactcccattcacagcacctggtatacagctgcttagaaataccagaattccctctttccccttcctggatgactcttgttcttcagaatggattctgtcagcctagtttgcctgggggtactgaggcaagagctgtgtgtcctttggagggggagcagaatggggaggaaagaatctaaggtttagaactcctgctgaggatagaaaacaccagcccgagtccttggttccctccacatcaaacccagaggcctccttctgtagatagggagctagatccttacagaggacacaaccacttctctctcacccgccactcccttcccaagactgcaggcctccttgcttctcggctgactggcaaaggattggtaggatggaattgagccaaggaaattagctcaacttgtggcagagacacagccctttctacccatgtggcctactgagattgggaggccagactgagggcctggcacccaaaatgaatgcccttctttccccagccaagaatcagggtggatgggtgagctccgtgcatttgccagctatagactgagaagggctgacccccttccactgctccagggcccccagccacctcctgctagtcctttcttcgctcctcctacttcatttcctccaactagaactttccctagaactctcctgcttttcccacagccccaccctttctcccagtctaactctgtcctgccccgaccccaccctccccgcccccacttccctgctgctccttcacaaagcgagccagtgtctttgtggtggaacccagtggcctaaagctgctttgtgggtggggattaagcctgaaacttttcctgagtctttatcagtccccttgcttcaatcctgaccctgggagtcagcccctcatggtccagcccgtcctccatccctgttggcacgtgtgcttgggtgtaggagagagaagactggggaggaagtaggcttgaggacacacctgtagcaacctctggcccacctgaagttctgatgcctcccttacccagtgctgggtttgaggttccccctgcttygactccgctatgccagggctcgtggcctgcaggatcaagtttcataattcctggaaggccccagtacacgctccccacccggggatttcctccttggcctccacacttcattctccggaaacggctcctcgggtgccggtggtagacagcctgaacctgagagggagagctactggctgcggcccattcccaccccaccttttgcagctgcagatagtagggatcttggcagtcctagccctttgatgttsttttacaatacaggtagccctactggttccttagcctccctaaatcttagttcctcaactacaaaacagggacggtgattccttacaggcttggcaggagtaaatgagagaggaggcacttgagcagatgttagctattctccctagcctgtgcacatgtgtccttacccactggcattccatgggcgttgccttcatggacacccagctgcacgcagtatatagttatggggtttggggggagcattttcttatttttttttcactgagctataatgtacacagaaaagcatgcagaaattcagtgtacactttgatgggtttttgcatatacccatgttaccatcagccacatctagataaagagcaggccgagtacagtggctcatgcctgtaatcccagcactttgggattatagaggcagggagattgcttgaacccaggagttcaagaccaccctgggcaatatggcaagaccctgtctctacaaaacaaacaaaaatagccgggcatgttggtgcacacctgtggtcctagctactcaggaggctgaggtgggaggattgcctgagcccaggatgtcaaggctgcagcgagccgtgattgcaccactgcactccagcctggtagacagagcgaaatcctgtctctaagtaaaaagggaggaatgggggcagctggtggataaagaacatttccaaggagagagggaggaagggaaggggataaagaagagcatttcccagtatcctggaaacctcttatgttccttccttttaagaatgcttggccgggcgcggtggctcacgcctacaatcccagcactttgagaggccaaggcaggcagatcacctgaggtcgagagttcaagaccagcctggccaacacggtgaaaccccatctctactaaaaatacaagacctggtggtgggcgcctgtaatcccagctacttgggaagctgagacaggagaatcacctgaacccaggaggtggaggttgcagtgagccgagaccacgccattgcactccagcctgggcgacagagygagactccgtctcaaaaaaaaaagaatgctgaaaccaaaaaataatagctttcagataatccccacagcatctatgagatggattcctactttatcaatgagaaaatacactgagaaactgcctcaatgtcaaatactaagaatcagagccagggtttgaacccagatctaacttcaaagccagtatccttagcttatcttctcttcccgccacccgcacgcctaggcgcagaatcgaaaacctcagcccccagaatgtatcatttggcagctgagaagaagaatggaaaggcttgaaactctgagattcaaactgggatatcgtagaccctggagcaggacactgcatgtagctgagggctctctagagtccctagcacggagcttggaagggatgcacttggcctgtgtggtttaatgagcgacctttgccctctctctcctgcaggtctcccatgtccgtatgcaggggatcctcttactggtctttgccaagtatcagcatttgccctatatccagattctgtctactaaatccacccccactggcctgtttgggtactgggtaaggactgagctattgtctgagtcgtgagctgggaagggctgggaactgtggagctgggcaaaagaaaaaggaagtgaaaggaatcttggtcctctgtccagcccaatgcatgtttgttcttttgcctcagagtgggcttgctatccctgaggccaggcgaggcgagctgggctctgtgcatggagagatcaccctgggaagcttagttactgtccctaggagaccctgcaggaagtgagactgtctgccctcaggtccaggatgtggaaagaggggtgtgtccaacccgagtagcttcccactcttctgttgacctgttctaccaggggaacaaaggtggagtcaacatctgcctgaagctttatggctactatgtcagcatcatcaactgccacctgcctccccacatttccaacaattaccagcggctggagcactttgaccggatcctggagatgcagaattgtgaggggcgagacatcccaaacatcctggaccacgagtgagcctgggtctgcagaccgttccccgccctctgccccacgctaacccccactaacccccacgagtgagcctgggtctgcagaccgctccccgccctctgccccacgctgaccsccacgagtgagcctgggtctgcagactgttccccgccctctgccccacgctgaccgccacgagtgagcctgggtctgcagactgttccccgccctctgccccacgctgaccgccacgagtgagcctgggtctgcagaccgttccccgccctctgccccacgctgacccccacgagtgagcctgggtctgcagactgttccccgccctctgccccagctgaccgccacgagtgagcctgggtctgcagactgttccccgccctctgccccacgctaacccaagccagcatcctctgctccatcacggatcccccagccagtgtcgtcagtgttctggctcccaccctctccctgacccttccctggtgcccatctgctgtctccccttgctttgcctgcctggggtccccttcctccagcccgtctgtcttgcttagaaaccctgaacacttgggaacaggtcaaggaccttgtggctcctgaggtcaccaggagggcttctcagcctttcctcgtgaccagttaaggagaggaaggaagggccacagcctgctctgtgtttgccagagcaggctctttggtaggtctctccggtttgaatggtggtttaggagccatgagaacagttccagaggacccacgcgtgccctggcgtctcacttgcccctcaggttttctgtgccccagcagcccttgggttgarcaggctgagccacctggtgatctcccttccccgacttcatcacaaatcctcaggctgccctcctttttttctgaagcctcattatctggtttggagacatgaactttcggatcgaggactttgggttgcactttgttcgggaatccattaaaaatcggtgctacsgtggcctgtgggagaaggaccaggtatccagtgaggggagggtcccagggggtgatctgagcccacggtgggggccatgtgagctgtgcagagtgttgctagatgccctcgctgctgttttcttttgcccaggtctggtgggggaggctgtctagcagggcttcgcatccaggggtgaggcagccacgcctgatcttcacatggaaaagccagggtaacagaccctggatgtgctttagaatagagagtcagatacaaagcatgaaatgaattatttaaaaaagaagaataggggccgggcacggtggcttatgcctgtaattccagcactctgggaggccgaggtgggtggatcacctgaggtcgggggtttgagaccagcctgaccaacttggagaaacctcatctctactaaaaatacaaaaaaaaattcgccgggcgtggtggcacgtgcctgtaatcccagctactcgggaggctgaggtaggggaatcgcttgaacccgggaggcagaggttgcagtgagcagagatagcgccattgcactccagcctgggcaacaaaagcaaaactccatctcaaaaaaaaaaaaagaagaagaatagggaaccagaagggctttgcaccaggtaccatcatgcgtcagcccatcgtgtccctgtcgtctttcccatccccagcctcgtttccctcttggagggtgaggtgcccctttggagaaccctggcttccccaggttcccctctgacacatgtctgctagtgatctcccctagagatggaattccaagttgggtccctgcagtctaaggactgggaaacggcagacagctgcctcccctgggccttggtaatgtttccgaaaggattcgcctgctttctggtgggagtgggctgctgagtagtcactggggcagtgaggaattggagtggcattgcttgactcttgccccatttgtgacggcatgtgctgatcccttgaatggagtgtrgtactgggccactgggtcgagactactgggagayggggactatgactktgtctgcagctcarcattgccaagaaacatgacccgctgctccgggagttccaggagggccgcctactcttcccscccacctacaagtttgataggaactccaacgactatgacaccaggtgaggagggagtgsggggccagaaggtctaggaagtcaggttacactgaccctgctggcatgggaactgtctcagaatagaagtgttagggggggcaggaattggtctagtcatcccctctccagagtggcacctcctgtccacttcatgaggcgctgactcggggagccgtcccagatctcgagagagtgggaggaaagccagtgccagcaagggcaggagaggtgtgtagggggtgggggtgttacagatagaaccagaggagagggtggagcagctgcctcctgacctaggagggactgcacttcagcttcgggaaaccccagaccttctggtccccaaacggggcagaaagcttggcccagccagttactggtattaaggaygcctgccccagcctgtgaatgggtcaggtcttgtgtgagaaggtgaagtagtaggtagagagtttcatcaggatcagtgtagagatcatgagtctggtagttagaagcacggctctgtcttattttagccaaagcgtttaggccttgattttgtcagctataaggtgtggatgagaagagcacacacctcatgaggctgaggactgaaggaggccgtcacccagtaaccatgggagagaacggctattgtgacttttcgattcatgccggctgggcgcggtggctcacacctgtaatcccagcactttgggagggccgaggcaggtggatcactgaaggtcaggagtttgagaccagcctgaccaacatggtaaaaccccatctctactaaaaattcaaaaattagctgggcatggtagcgcgcacctgtaatcccagctactcaggaagctgaggcaggagaattgcttgaacccaagaggcagaggttgccgtgagccgagatctcaccgctgcactccagcctgggtgacagagcgagactccgtctcaaaaaaataataataaaataaatagattcatgtcttcccgtgatagatttactaaaaacctttctaagaagctgagaaggggccaaataaccaccaaaacctgagaaagaaccactggcaacatgtccctgactcattttggggcaaggaacctaatctctttgaagaaaagaagagccccttacatgtcatgagggtctttgttccagcgggagcagcttgttcattcctcctagctggagtgtctctgtgagggaggcgggaggtaccggcagggcagcccagggctttgggatttagccagggaagaaatatctccacagccagaccaagacaagaggtagaactcaagcttggttctggaagtgttacagcaaagccaaaatatccttgtcaaggaaagggggaaagagtgagccgattcagcagtgtggagcaagacagggtagggtcgtgagcagggccgtccacagaagaggaggcagtggacgctggggaagggacccgccctgggcaacagagcaggcaggaaaggaggtaagaggccaggctgcagcaggatggccggcccagatcaacagctgcagggagactgccagtctctgcagccatccattggaaacaagagtcctggtgggagctgtaaggacagggtagggccttgggtgggragggggtgcttgaagccaggagttcaagacctgcctgggcaacatagttagaccccgtctctacgaaaatttaaaaattagctgggtgtagtggcatgtgcctgtagtcccagctactcaggaaagctgaggcaggaggatcacttgagcccaggagttaaaggctgcagtgagctgagattgactcactgcactccagctgggcaaccctgtctccaaaaaaaaaaatcctctttaaaaacttaccagcaggaagagagctgctggcaggccctacggccaggcgtccccttctcccagccctatggcagagagacctccaggagactgaagtttgttgcaaaagctggatctgggctggagttggcagggtcagaaagggtagagagctttggagaagttcaagggcttccccaggtagctcagccagtgagtggcagagctggggctgagactgatctctgagtctgtagcccacagtactttcctcaagcccatcgtacctcaggattcatggtcatccttgccagcaagaggaaaaaggatggcacggtgaggaaggcagactcccgctaaggaggaggcacgcacctatttccaaataacagctcattgtgattggcgtgcaggtgtgcgccaaggctttgcctgtatcagttcctaccatgtcctcgttaggtaaacagtgttattattgcctgtttacaaggaaagcaactgagtctcaaagaatatataagtaaggagtaacaggcttcttcatcgcacgaggattggaactcatatctgtgtctgtagactcatgagccttcggtactgcttccctttggctggagcccaggaaatgcaagactgtctgggcgggaacaggggacatggtaactgaaatactcctggctggggccaggatccaggggcagctgggagttttgcagtgagcagggcctgagcccacctggggaacagatattcctgtctaatgacactgttattttatccttggaaacccagttgagacatcacttctcctaggacgccttcccggcccctcctcatctcactgagagttcctctcctgccttgtgccacccccagccttgcgcatgccatgctttcagtgttgcttttgagacacagcgtacctttcttactgtactgtgattgcccagagagcagagacgatctgatttaggaccatccctgggagtagcacagtacctggcatatgttaccaagcctgggagttagtcaatagaaggtttccagaactccgtgcagaaggttggagcaaatgttaaggaggtgaacagctaaagctaggagaggcctgtcagacttcctgtcaaggacagtatcttgaaggaggcacagagtttcgcagaaagcagaaaggcgggctttccaatcagtcagcacactgacgagaggaacctggagggggccggtttgatgaagtgactgtgagcgttagtgtgctgggccagccactacggtgtccctgagccaagatgtaatgagaaacgaggccagctcccttatagggagggcaaaagggctgagggcagggcgggaatcctgctaaagtccggggttacactggagttttgttatagttgccactgtgagcccagacaaagtgttttatttttttcgagacagagttttcttcttgtcacccaggctggagtgcaatggcatgatcttggctcactgcaacgtccgcctcctgggctcaagtgattctcgcctgcctcagcctcctgaatagctaggattacaggcacccgccaccatgcctggctaattttttgtatttttagtagagatgaggtttcaccatcagagtgagaaccctccccctgcaaaatttttttaaaaggcctggtgtggccgggtgcggtggctcacgcctgaaatcccagcactttgggaggccaggcgggtggatcacgaggtcaggagatcgagaccatcctggcgaacacggtgaaaccccgtctctactaaaaataaaaaaaaattagccgggcatggtggcgggcacctgtagtcccagctactcgggaggctgaggcaggagaatggcgtgaacccaggaggcggaggttgcagtgagccgagatcacgccactgcactccagcctgagtgacagagcgagacttcgtctcaaaaaaaaaaaaaaaaggccaggcgtgatgggtcacacctctaaacccagcaatttgggaggcagagacaggatgatcacttgaacccaggagctcaggttcagcctgggcaacatggtgaaaccccatctctacaaaaaaatacaaaagttggcatggtggcacatacccgtagtcccagctactcaggagactggggtgggagccttgcttgagtccaggaggttgaggctgtagtgggctgtgatcacaccactgcactccagcctgggcaacagtgagaccctgtcttaaaaagaaaaaaaaaacagctgggcatggtgtgtacccctgaagtcccagctcctcaggaggctgaggcaggaggatcatttgagcctcggagttcaaggaggctgcagtgagctaggaggacaccactgcactccagcctgcatgacagcaagaccctgtctctaaagaaaaacaaggtggagtggagagaacttggttaatttgtacacgctcactttgcttgtttcttggattttgctaaacaggctcctcaaggactttgtccatcctatttctcatatccccagttgcggggcacataagaagggctaagtaaatcttggtatgcccagtgatcagcctggccgtggcaaggaaaaggaaaaaaggggggtgggggtgggctgagagtcctgaggaggaaggagagacaggctgtggtcagggcttggggaagacccttacatgacagcatatatgggctccaaaccatcacagggaagttagggagggagaatgctttgaaagagagaacgtgcatttgtgtggttcattaccaagtttgtttgtttgtttgtttgagacggagtctcgctctgtcgcccaggctggagtgcagtggcgcgatctccactcactacaagctctgtctcccgggttcacgccattctcttgcctcagcctcctgagtagctgggactacaggcgcccgtcaccacgcctggctaattttttgtatttttagtagagacggggtttcaccatgttagccaggatggtctccatgtcctgacctcatgatctgcccgccttggcctcccaaagtgctgggattacaggcgtgagccaccgtgcctggccctatgtttgtttgtttttttcttttttttttttgagatggagtcttgctctgttgcccaggctggaatgcaacaatgcaatcttggctcactgaaacctccgcttcccaggttcaagcgattctcctgcctcagcctcctgagtagctggggttacaggcacatgccaccacgcctggcaaatttgtgtgtgtgtgtgtgtgtgtgtgtttttagtagagacggggtttcaccatgttggccaggctggtcttgaactcctgaccttgtgatccgcccgcctcagcctcccacagtgctgggattacaggcgtgagccaccgtgcccagccccattaccaagttgtaagcattgctaggcacctgctgtccaaggcagattcagggacgcagtgtctgtggtctctgggatgggaataccacattccagtgccctctgaacactccttagaagagtgaaagattggaaatgacccaaggagccaacaggcagaccagggttagtcaaagttaccgcttcgtgaccacccccttgacgccctttaatttcattactgctctttgaagtaagtactgttatcaccccgtcttaacagctgaagaaactgaggcttagagaaatgaagtcacttgcccaggggcatacagctctcaattaacaggacggacccttcccccaactggtctctgattcaaaagtctgagctcaccactgtaacgccattctcctcagttgctagaatacttactcttttactgttgaagggacaccagtacattgggaacatttatttaaaatagcagttgaataggccaggcacggtggctcacgcctataatcccagcactttgggaggccgaggcgggcggatcacaaggtcaggagttcaagaccagcctggccagcatggtgaaacccagtctctactaaaaatacaaaaattagctgggcatggtggctcaacgcctataatcccagctacttgggaggctgaggcaggagaatcgcttgaacccgggaggcagaggttgcagtgagctgagattgcgccactgcactccagcctgggcgatagcgagactccgtcttaaaaaaaaaaaaaaaaaaaagcagttgaataaagaaggagacaaaaatagtgtttccaactgcgagtatatggagctgtaaacattaagattagacggacatttttgagggacgagcttcagcttgggtttttagtaagtgtacctggttattgagtacctgtgtgccaggatctgtgctaatgctgaggatacacaggacactccaacagctaagtccttgccttcagggcttacacctaagtgacatgctgagtgggaaacagaaaattgcaatgtagtgtaatcgtataatactggtataaaatgtttcagtggccgggcgcggtggctcacgcctgtaatccagcactttgggaggccaaggcgagcagatcacgaggtcaggagatcaagaccatcctggctaatgcggtgaaaccccgtctctactaaaaatacaaaaaagttagccaggcatggtggcaggcgcctgtaatcccagctattctggaggctgaggcaggagaattgcatgaacctgggaggcggagcttgcagtgagccgagattgcgccagtgcactccagcctgggcaacagagcgagactccgtctcaaaaaaaaaaaaaaacttyggaagcaaaaagctaatgtctgggatggtttcggcaaaggcctctccctggtgaagaaaggtgttccaggcagcaaatactgcaaaagcaaaggtccagaggcttgagagagtcaccaaggtggagtgggtctggggaagtggtgtgagatgaaggatggggtggtcagactcctgagccmcttgaaagccctacttggggactttaactttattctggaggcagtgaagatgccttaaaggttctaaaatagccgggtgccctggcacatgcctgtggtcccagctggtcaggaggcggaggtggggggttgcttgaagcccaggcatttgaagctgcagtgagttaggattgtgccaccgcactcagcctgggcaacacagcaagaccctgtcgatggattgatcaatcaataggtaggtagataggattcaacacagtgagacctgtcgatcgatcaatagatgagatagagtgtgtgagaccctgtctatagattgattgattgattgatccaattaggctttattactctgggttgattcaagaaaggagattgtccatgaagggggtggaacccagaaaccgcagctgtcctgctcccccgccacacacacaccccacctccaggagtcagagctgctggtctccaggagggcagggcctcaaggacaaggtggccttagaaactgccacagtagttgcttcggaaggctgggttatgggtcagagactcgtctttggtcaacttcagttacctagaggaggaatgcattttgtctccggagcgtattaccttttccaaacccctcagggaaactggcaagtgaagaacaggtgggaggtctctcagtcgactcctttttttttggagatagagtcttgctctgtcgcccaggctagagtgccgtggtatgatctcagctcactgcaacctccgcctgccagsttcaagcaattatcttgcctcagcctcccgagtagctgggattacaggcacctgccaccatgcctggctaatgtttgtacttttagtagagagtcaggatggtctygatctcctgacctcatgatccacccaccctggcctcccaaagtgcttggattacaggcgtgagcacygcgcgcggcctctcagtcgactcttgagaggaaatcataaaggccagtgtgcatggcgagctcgttttgcaccaagcactgtgctaaacattttatgtactttatctcattgactcatcctagcaacccttcatggtaactactgttattccctccactggcaggcgaggaagttgaggcctgagagaggttagtttagtttggtggttaagagcacatgctctgtggtcatgctggctggccctgaatcstggctccaccacttagtaccttgtgactttgggaaaggtgcttcccctctaagctaagtctcagtttctccacctgtaaagagagcatgatacacccaggcacagtggtccatgccttctaatcccaacactttgggaagctgagatgggaagatcctttgaggccagcagttcaaaactaggctgggaaacatactgtctttacaaaaaaatgtttaaaaattagccaggcatagtgccacgcacttaccgtcccagccactcaggaggctgaggtgggatcgcctgagcccagtagtttgaggctacagtaagctgtgatgtcaccactgcactccagcctgcatgacagagcaagaccctgtctctttaaaaaaataaaattaaatttaaaaaaaggtgtggtaacagtactgatcacaggcatcctctggtaagcatttcctaaatgcttcccttccctttcctgaggcatacttctagtatgcagggcagccaaatacaagctcaggtgtgtccagcctcagaatctcaaacctcagctgctttgatccactgctgcttttgctcaagaaagaagcaaagctttgaaatggaatgtttctgagtcacaatttgatccataaaaacatgagctagacatacagagggtcctggctaagtctgacaagkgctggcatactttggattctgttaggcaccttcctgcctgctgccttgctccctccggctctggccccgggggtctgtggctgccagtagttgctggagttaggggctccagcaagctcatgtgggctcatttctgctcttagccaaccctttcttctttccccattcttcctctttatgccccctgcccctgcagtgagaaaaaacgcaagcctgcatggaccgatcgcatcctgtggaggctgaagcggcagccctgtgctggccccgacactsccataccgcyggcgtcacacttctccttgtctctgaggggctacagcagccacatgacgtacggyatcagygaycacaagcctgtctccggcacgttcgacttggaggtgaacttctgggctgcctgatacttgccagaggaatagctatgctggccacatccccaagccctccatccctggattcgaatgtcagccagtcccccaggggagacctgtggaggccatgattgcctttcctgccaggtcggatatcccagctcctcttaggagccgttgatggctctgtctgtcaaaaccgtgttcaaaccctttgtgaaaaggtttccatttcctttgggtattctcccttggggctaatgagttccattaggcttattacccaatgtgagaagtaggacttcttttatttgtcctaaatctatctggatcaagttgcaacgggygctccctccatccctgcgtccttgtatcttgctatctgaatgaccaaggtggtgttggcctccttcaggctgctgcccctcagccttcacgttttcatacaggtttactggcgtgtgtgtgtgtgtgttagggtctcgttctgccgcccaggctggagtgcagtggcggtatcatagctcactgaagcctccacctcctgggctcaagtgattgatccttccacctcagcctccctagtagcgggactacaggtgcacgccaccacgcctggctgttatgtattttttgtagacacagggtttcactatgttgcccaggctagtctcgaactcctgggctcaagtgatcctcccaaactgttgggattatgggtgtgagccaccgtgcctggcccccgctggtatctgcgttgtgttcttgcacgttcacagctgttctcaccagagcatccccccatgtggggctttgggtcagataaggcgggaggcctgagagcagctgcctggccgcctccttaagcctctcagccgtgcctctgctctccgccattcctaccccccagcgctgggccccatgggattccgacagggccagccacccgccgactggtgttcggccctctttcctgatggccagccaaggtccgttggagcagcccagtggagttccatgcccaccccctctgggtgccccaccttccccactatgttggaagggcacagtgaggaacacttggcctcagaggagggaatgatgctgcgagattcagcccccttcccacccccgtgtctagctgaagccattggtgtctgctccgctgatcgtcctgatgcccgaggacctgtggaccgtggaaaatgacatgatggtcagctactcttcaacctcggacttccccagcagcccrtgggactggattggactgtacaaggtgatgtggtggcaaggcaggaagtccatcagcgacagyccctggttcatccttcccgagggctcctgggagctgggcagatgctgacgaactcaccctcatccaccccagcggttcttctgtagctaaaggctggcagtgaagggcggcggggaggcacacagtacggtagccaggcccagcagggagaccatctcttccttaggacttgccttaggtcccatgtcctccctgaccactgatgrcctgactccccctcacaggtggggctgcgggacgttaatgactacgtgtcctatgcctgggtcggggacagcaaggtctcctgcagcgacaayctgaaccaggtacgtcaccagcaccaggtacatcamcagcaggcaggcctgcctcagcactcctgtcttgtggaaggaacagagtgctgaataacttgtcactcagagctgggtggagcccagagccctggagctgaccccagtcctgtccatccccctccaggtttacatcgacatcagcaatatccctaccactgaagatgagtttctcctctgttactacagmaacagtctgcgttctgtggtggggataagcagacccttccaggtaagcagtgctggtgagggaaggggaagggtgagggcttgagctcatcactggctccctgaggcccaggcctgggagccagccggtacatgaggggccgctgcagtgcaggaacgggggtgatggaaagcacggaggaagacccgctctccatttccaccacctgctttatccctgcagatcccgcctggctccttgagggaggacccactgggtgaagcacagccacagatctgagccaggatgggagtgaatcccaggcggaggccagagctggcagccagctctgcctttccactgccgggagtgctgggggcccagcctggccccctgaagagacagccaagtgtcgtccacatactcctcccagagtgagctctaaccaggctcatttgctctctccactactcatctctggaattagcygcttaaatacaggtttttgttgctgagatgtgagtgaaaccagctagtgtgtcaacagtgaagacctggggacagttctgcgtctcatttctggattcctaccccctcttctagtcttgcccaagtagtcctgccaggcacatgccccatttggcacaggcctgcattcttgtcgtgccgtcctgggcctcaggctgtctgggaggggagatgctcacatttgtacaggctacatagactggtgcaagcagtgctggattccaggagtcttggcatctcatagcttgtccccgtgaggagtgagcagagggtctgggatttctgctttcagcaaaagcagtctgactcagtgggcagaatggaggggcccctctagccaggctcttacgccatggttatgagcaggttgatgagggtccttcggccagcacaaccttcctccctactcacggcatggagtctgactgcatggaagttccagatcctgacagagagaactgggaaggatccaggttcgcttccgttggtagcttgagtcccatgcctccaccctgccatctgaggaaggggtgacaagtggtcaaggagctgtggccacagacttttccagggtggtccttggcaggtkaggtgcgtctgtgccacccttgtcaggagycattgacgacgggccccccctggacccccygggacctcagagtgggggcaggcagaagggagaaccagctcaagacattttggaggatctggccctggggttcttcagagaacaccctctaggggctttggggacatggcctgtccccacatccagcacttgcctccgccatggtcactcggcagcccttttcccaggagaagacacctctgggagcctgctcagtgcttgtcctgccatcctgtgtcctgggactgagggttactccagttgctctgtgttgcatactctcccccgcaagcctgtgtatgaagaattgtcccctggcttccagcaggccatggctggctgttttgtgactgttacattgtgcaggggtaattattagcgtggcttttacacttgcgtgtgactgatgattggggggtgggggtacggtgatgggcctgggactagctgtagattccaggaacagggaccctgtagatcccaactagacttctgtgtctgagatttgcagaagtggccaggactggggctaggatgaggttctagaatggtgagcctctggggccctaaccaggtggagcatgccatctatgccggtggccgcttaatgtactctgttaagtcaaatgagctcttgttcatccctcctgacccgctgctctgcataccctggtgttgagccttctgcctgcgttaaccagtccagaatgccaccatcttctctttctgccccacttctcctcagccccttcttgctgagttttcccccatggtaacctatccctgcccccaacacatatacctagggacctccaaagccctcacttgcccacctgttccttctcacatgcacagccatcacgagggttactgcatggcacccttcattgggcagatgggaaagccaaggctcagagaagtggtacagtctcttcaaagttccaggcacctgtggtttcccacaggaccagaaacaggaatggggtctgaacccacccgcagagcggtctcagtagtctgtaaaatacagatgatgtccctattctcaagattactgtgggagaacaattgcagaaagtgtatcgcactagacccgcctccccgttctgattaatgcggccccggggcttgaccccaggggtccccccacatgctcacctcccccgtggtgaactgaggtcgccacacacccagcctcctgtgtgggaggggtgagcccagcagtgattgagaggcggaaaggggaatggggggtgctctccgtcctctgggccccagtcaggatatggccgttctgggtccaccccgacccactgggtggaaacaggaaataagtgagacctggtgtgcactgggtctacgcctggctccacggctgataagggccattgtgtggccgccggggatgagcctgctctggatagatgtgcttcccggaggaaggaaggaaggcttgctagcttttccggggcgggggaagctgtggggagagagaagggtgccsgggggaaggcccctgcctatggggctgtcggtgccagcacacacccacgggactcagcccttcctatgccagcctctccctctggaaaggtctgtttcccctatccacttccctgttcttacttcctataaggaatggctggagactggagggctcagtctcaggccaggaaagtgtcagctgtgatttagcaacaataaaaatagaaaagcaggaacatcaggggtgggggtcacctgggggtactgttgaaacgcaagggatgaacagggctagaggttgcccacacccagggaacccaggaactaacctcacaagctctgaggctcagaggagggtaagccaagagcttcctcacagcgggacagccccctgtccgggccctgcatgaccaggccccagcagccctggtctctcaaactcatggtgggggctcacctgctgtggggggcagccccgttgaggggatgtgcaggaaagccagtgcctactaacgggtcctcttggcctaggggagggcatgccgtctggtttggggagtgggccccgtgctctctaggtggtaccagagagtgggcaggaggaggggcccagccatagagctgccgtggggatggggggaaggggaaaggcgtcctagcctttgacctggagcccagggtcccccatgggtggctgcatcggctcctctggttacctgggacaacaggcatttcctccatccccagcccctcctcttcctgctccaaccatccgggccaagaggcctcccagtcagacctggacggctccagccgtgtcctgaggagctggaccagccacatcccctggggctgcagttgaagcagaaccaagtggccatcccggcgttagaccgtaggttcctggtcccggagtggtcggagcccgccagtgggcaggcagctcttgctcacaggccgcggtgcccaggccgctggctctccgcagggcggaatggcgctgcaagtggagctggtacccaccggggagatcatccgcgtggttcatccccacaggccctgcaagcttgtaagctgggatgctctgggctgggaggagggtgggagcgtctccccaaggccgggcagcccctctcaggcgagccctcgggcaagagctgagcagcggggaggggttccgatccttggcggggccagaacagactgaacaagacggggtgagtggaagagtaaggatgcaagggccactagcagcaggatttttggaagtggaggtctgggcttgactcttccccggcttcccgaacctcagtgggcagaaccgtgaatactgggcacaaaaggcaagtgccggctgctgtgaggtcgaaggaccagggcatggaagctccaggctcagtcaacgccccgctcctctccagtccgcagggctgggaccgcccaagactcagaacagaaggacggtgtgggaggtgggtgaagggtcacgggtgggtagaaacgggggagcgcggccctggcccggcccgcaggaaggggctggagatgcaaagggcccggaggagggagaaagtcgggcgcccccacgcccccagcagcgcggcggggagccgggtcttcggccggaggggcgcgcgcgtgttcgctgtggccccgggaacgggccgaggcgggggccgcacgcaccgaggcttcgcggacgcggccggggctgaggcggggcggggcggggccggagggtgcgcggccctgcccgggatgacgacaggctgcggcccggcccccggcgggccctgggcggggagagtgcgcccgggccgcggatccccaagcccgccacgccgcccagcccggccccgcccgcgccggaagagccacgccggtgggtactcggggcgcggggacggcggccgcggggggcgggtgtggggagcgggcggccgggccgggagcccccgtgcacgaggcaggggtcacggccggggatcgctggggccgaagaacggccgcgtggacccgtgcgggggggggggggtcccacgacccggaggcgccggcgcagcctggtggagacttagatttacctgcggggagcgggaggcggggaagagcggcctgggctgcaggacccaggaccctgcgcgcccttcgggccccgcccgcagccctgctccgctctgggttccggagaagccgcctaaacccgccccttcccgttctccgcccctggggcccagcgcgccccgagtgtgacgggcggggggctccggggtggccggagaaggaggatggccacgcggccctcagtcctcacgctccggcctcccgcgcacacgcctggctttgagattcattcattcatccaggggtccgggaaggggtgactgagccccaccgtgtgcctcgctgcgtgtagggagtgggagccctctcctgggagggactgacaaggaaacagctgattcctgcggggtgcgataaggaggcgctgcgtgtttgggagaatcaggaaggggttctggaggaggtgacacctgagccgagtctcagtgaggtgggcagggagagtgccccgggctggggaagccgcaggtgcaggcactgaagcttggactggctggcgacggtgcgaaggcccccctcctggggggaggggtggggggagaggggactggagcgggccatctggcacatcggaatgcaggagcagtggggtaaactggggacagcaggggggtctcgggagttcataggcagggtcctggtaagcagcagtgagtgtgaatcatgggcctggcatatggagggtgtcctaaaccttcactctatgaacatgaggtgttgatttgatttgtgttgccccagaggaaatggattggtaggaggaaggcaaggaggccagttaggctgctgtcttggcccaggtaaggagcagtgatggaggtgaggtttttgtttgtttttgttgttgttttgttttgttttgagatggagtctcgctctgttgcccaggatggaatgcagtggtgcgacctctgctcactgcaacctccacctgccgggttcaagctattctcctgcctcagcctcctgagtagctgggattacaggtgtgtgccaccgcgcccagctaatttttttttttttttagtagagacggggtttcaccgtgttagccaggatggtctcaatctcctgaccttgtgatccacctgcctaggcctaccaaagtgctgggattacaggcctgagccaccgcgcccggcctggaggtgaggttttagcaggtcgtgactacttggtgtgaggagtggaggcaggagagcaggcctgttaatgccaggctgtgatgaccagctcaaacagtgccacccttctctctacaaggacattaaacagggagtacaggttaggggtcaaaggccctctttttttttttttttttttgagacagtgtctctgtcactcagtctggagtgcagtggcatgatctcagctctctgcaacctcttcctccaggattcaagcagttctcctgtctcagcctcccaagtagctgggattacaagcgtgtgccaccacaccctgctaattttttgtatttttagttgaaacagggtttcaccatgtgggccaggctggtctggaactcctgacctcaagtgatcttgcctgccttggcctcccaaagtgctgggattacaggcatgagccaccgctcctgggccgtttacttttttttttcccccatacaaatttatgttaacatgttatgggtttattgctttgtttctttgtttgtttgacactgggtcttctggggtacccaggctggagtgcagtagcaccatcacagctcactgcagcctcaacctcttgggctcaagcaatcctcccaccttagccttccaagtagctgggaccacaggcacacaccatgcctggctaactttttaaaaaaattttagtggaggcaggggtctcaccactatgtggcccaggctggtcttgaactcctggcctcaagcgatcctcccacctcggcctctcaaagttctggggttacaggcgtgagccactcactgcaccttgcctctgttcacgtttgctggaccccccaggcagaggtgtctggcagccaaagatccatggttgtgtagctagaatggacagtccttgaccaaggccctgtgagcaatcagggtagagaccctaagtcgccactatctcctccccatttcccttcacaacaattccctgaggtctggaacggtccttggtgggcagccaggcccagatctaagatttgtttaataaacagaagttgaagccctgctctgtgccacccgtgagacaagctgtggctgcctttctgctgccttgggctcagtggacatcggtttatagcagcagtcccgggtgcctcagatgacacctcctcccagcccccaacacccctaccccacggcaagatctgtgtgcccttaggctgggggaacatttgagctttccgctgtccgcagaagtcaggcttgtaggcacctggcctataggagctgaagggcactagatagcccaggtctgctgggccaccccatcccctgtggttccagtaaatgcctccccaggtgggagaagacccagaggcagccttggggaagaagtctcctatgtcactcaggggccatggcctgcagggaacctctaggcccagagccaaaggccctggcccactcctaaagcccacatgtgacataatagaatcacacgacaccgacaggggcctgaacggtgtcactgaaggtcacagccctggtagccctgataaccgcacaaagaggctcagggcagccctgcagtaaggtgttccagtgcccgggttccagtcccactcctcctgagaccttg

SEQ ID NO: 93825 - DNA, 36578 bp, Homo sapiens
caggcaatctgcctgcctcgtcctcccaaagtcctgggattacaggcgtgagccaccatgcctggccagagagagctctttcctatgcattcttttgtatttgtgggaatctgcctagtatctttatttccaaatgacatcttggctgggtataatattcttggatcatacttttgttctttcagaattccgtagccagtgctccattggcttctgtctctggaatgttgctgttgagaaatgtaaggatagcctgagtttttttccttgtaggcattctactttttctgcctggttatctgaagttcaataagttaattacaatatttttcaggacagaatattctgtatcaaagtgctttctgtcttgacctttcaagctgtagattagtacttcattttggggcaaacttttgtttttatatttttgaatacttctgttccatttaatgagttctcaatttcagggacaccaataacttctgtcttccatatctatagatttctatctgattgttttaatatctttgtgttttcatctaccattattttgattatttaaaaccattttccatatcaatagttccatttctaggagtgtaaaagtctttaaaaaagaaaagaaaaaactaattccactcctagccatgtctatttggttccttgttttcaggtatttattagtctttggattctcaaatgtgcaacttccctattcatctccttcmgttgttttattatcttggttttgagttcttattctattgagctcattttcttgtcttttttttagagacaaggtcttgctctgttgcccaggctggagtacagtggcacaatcatagctcactgtaaccttgaactcctgggctcaagaaattctcctgcctcagggtcccaagtagctaggattacaggtgcccagcaccatgcctggttaaatttttttattcttgtagagacaaggtgttgctatgttgcccagactggtcttaaactcctggcctcaagcaatccattcaccttgacctcacaaagcactaggattacgtaagtgttagccaccacacctgacctgaggtcattttcttaataaattgttctacagctcaaagcacttggggtgaagttttttgtttttctatttgtctccagaattgctttccactttatttgaaacttatttgtttttcctactgaactgcagttagaagagtgttattttatgcagtatgcagtttttctatgatttttatgcttgtctgaagaggggagagggctgctcatgtgcagcctttgttagaatacctaagttctgcaatcacttctgaggttttgttaagtgtctattccaaagttcaccccactaatggctggtgtagtccatttccatggaaaagatagcttcactttttggaacttctctcagttcagcatgttttcctgagtcttcactgccatcttaaagatttggtctattccatacttcccatttcaagtttttctccccagtagccattttcaattttccagagatgggaggggaaagagaaggaaagcgtttacttttcttctctcttgtaatgtatgtggatatgtttgtgttaattgtcaggattttgtggatctaattgtatgagttttgatggaatgaaggcagaactggaagccttgacatgctccagcccagaatcttctatttatttccttgaccaccacttactgacatttaagatactgacgtttttttgccgtggatacaattttaactttttaaactttcctagatattggttgaaacagagtctgtgagatagctttactccattttcttaatctagaagtctaataatttttaatgtgtgtatattttccatttttattataaaaattgtatatccttgctgtaaaatttcaaaccaaacacaagtatataaagtaaaaagtgaaagttccttgtaatactgccctcaagaatattacttttaacggtctccagatctttttaaatatttattttctttcttttttctttctttcttttttttttttttaagatggggtctcgctctgtcgcccaggctggagtgcagtggctcgatcttggctcactgcaagctccgcctcccgggctcacgccattctcctgcctcagcctcccgagtagctgggactacaggtgcctgccaccacgcccggctaattttttgtattttttagtagagacggggtttcaccgtgttagccaggatggtctcgatctcctgacctcgtgatccacccgcctcagcctcccaaagtgctgggattacaggcgtgagccaccgcacccagcctcttttttcttggcaatgctttgacctttcagtgataatgtacaaatatataaatacacagatgtcttctttaaaaaaagaacagctttattgaaatatattccacatgccataaaagtcacccattttatgtgtacaaaccaatgatttttagtaaatttatagagttgtacaaccatcatatatgtatgtacataaatacatagttattttcttatgccctgtttaacttactctcccagttctaaaatgtacttacctacttacctatgcccacagcatgcccacatggctagaggctgcttttcagaactcttgggtagttctgttcctgtcaattgagctacttgcttactaaatgcctttgggcttattttatttatttattaatatatcggtgatatttgctatcataatttagttaaatttttgaaaacatgaaatatgagcataaagagaaaagagatgtttctgtgaaaactaagttgaatgcattggaaaagcttgttaaaggcaagttgttaaaaaaaattgttaaagtaactctgggtcggaaatctgagagtggaaagtcttccatctagaataatttcacatccaaacactgtggctcacacctgtaatcccagcactttgagaggctgaggcgggaggatcccttgagcccaggagttccaggctgcagtaagctatgattgtgtcactgcagtccaacttggggaatagagcaagaccctgtcgcaaaaaaaaaaaaaaaaaaaaaagtcatcatagcactattcataatagcaaagacatggaattaacctaagtatccatcaacagtagactggataaagaaaatgtggtaggtatacaccatagcatactacacagccaaaaaaggaatgagataatgtcctttgcagcaacatagatggaactgcttaggtcattatcctaagcaaactaatgcaggaaaacaaaaccaaataccacatgttctcacttataagtgggaggtaaacattaagtacagatggacacaaagaagggaacaacagacactggggcctacatgagggtggaaatgaaaagttacctattgggtactatgttcattacggcagtgacaaaataaaacgtacacccaacctccttgacatacaacttacctatatagcaaacttgcatatgtgaccctgaatcaaaaataaaaaacaaaaagaatgttggtctggcacaatggctcacagctgtgatcctagaactttgggaggctgaggggggcggattgcctgagctcaggagttcgagaccagcctgggcaacatggcgaaaccctgtctctacaaaaaacacaaaaaattagcggggcatgttggtggtgtgtctgtaatcccagctactcgggaggcagaggcacgagaatcgcttgaacccgggaggtggaggttacagtgagccaagatcacgccactgcactccagtctgggggacagaacaagaccctgtctcaaaaaaaaaaaaaaattgcattcagattgcttcacaagtgtctttcagttattgctccagtttaaagaaacctttaaagaaattataaatagttcattaaaggcaggaaacttcattgagcgggctatattcacagaaaaatcctgaaactacttcaatttgtaagtcttaagttaaaataaaatgcttatacaataagcttatttttcttaaaacaaaactgtatactgtactgtataatgctttatgattctgcatttttttttctttgagacagagtttcactcttgttgcccaggctggagtgcagtagctcaatcttggctcactgcaccctctgcctcctgggttcaagtgattctcctgtctcagcctcctgagtagctgggattacaggcacccaccaccatgcccggctaattttttgtatttttagtagagatggggtttcatcatgttggccaggctggtctcaaactcccaacctcaggtgatccacctgcctcagcctcccaaagtgcgcccagtggattctgcattttaatcgacttttcaactaacaacttacctctagtcccaatggcatggaatagaagagattacagaccgtgggtttgtaatcgacttttcttttacaacatattaagggcatttttcatgtcactttatgtaaatttacctcatttttcttttttgagagagacagggtctcactgttgcccagggcaacagcgagatcatagctcagtgcaatggcgagatcatagctcaatgcagccttgaactcctgggctcaagtgatcctcccaccttagcctccccagtagctaggattacaggcacataccaccacccctggctaattaaaaaaaaattttttttttgtagagatggggtcttgctatgctgcctgggctgtactctctttttatttattttttattcttattttttgagacagagttttgctcttgttgcccaggctggagtacaatggtatgatctcagcttaccgcaacctctgcctcccgggttcaagagattctcctgcctcagcctcctgagtagctgggattacaagtatgcgccaccacacccggctaattttgtaattttagtagagacgggatttctccatgttggtcaggctggtctcgaactcgctaccttagatgatctgcccacctcagcctcccaaagtgctgggattacaggagtgagccaccgcgcccggccctatactcattttttataaaactggcctcatattattccattgtatagtggatacactctaatttctttataaattatttaaactattttttgatgttttgttgaaaaaaaacttgagcagggaactgatattatgaaggtggattgagggatgaatgtggcaatagagcataaaatgaattaaagaggagagaatggaaaaggaaatggttgatgagagacccttgaaataatccagctgagattaggccagttagtggccatgggtttccccctcactcttatgcatccaacatatgctttcgtccgtcttgaagtcccgacatttctagaaaacacagttgtctttctcctctctaccttagctcatctcagtccttctgaatttcatctttgcttgttgaaatcctacctctccttcaatatccagaacaaaccccacaccctgccatgattggtcctggctggaaaccgtccctccttctttcttccttcctctgtgcatgtttcttgcaaaggcagtacagggcagtggtgaagagcaacgactttggaaccaccaatttgctatctctgtgaccttgggcaccttactcagtgccaattcgcagtgcctcagtgtcctcacctgtcagggggagaagtgcatacagcattgttatgaagagtgaattagttaaaggttgtaagaatagtgcctgatagcatctgatcagcactgaatatatgttagcaattattttgattcaccgcagagggcggtctacgagagcgcagagccccactcggccagcggggtctggcgggggacctgtcgcgctgaaagctccagggtagggccgacgcccatcaggctgggcatccgttcgggatgcgcaggttgcggtctgcaaccggcggcgccacgcccaggcgggcggagcgcggttcccggagtctcgcgcccgcggtcatgtgacacagcgaagatrgcgtcgcccggctgcctgtggctctwggctgtggctctcctgccatggacctgcgcttctcgggcrctgcagcatctggacccgccggcgccgctgccgttggtgatctggcawgggatgggtgagtgagtgagaaatttaaaagggtttggcgattctctctcttcctagcctgggttcgcatctgcaaaatgcgggtgtagagggcgaggacgtggtcccacagcacgcggctgcctcgacattttaggatttgaaggatctgcattggaaagagagaaggggaaggagccgtccccttcactggaaagagagaaggggaaggaaagagagagccgcgcacggcgttgaagttttacatgctgtccttgattaatccttacagtagtggcgtcaggatvgcagcatctctcacttggtcaggctaggtgagctgcggctggctatatgactggcgcatctacccttttatttattccttcacacrttgaacagagatttgttaggcacctacagttcatttacaaattgagtaacccttatctgaaatgcttgggactgggaagcatttcggatttttttttttttaatatttgcatatatacaagagatctggggggtgggacccaagtgtaaacaggaaatttatttatttttcatatacaccttatacacatagctggaaggtaattttatgcaatattttaaataattttgtgcaacccatcacatgaggtcaggtgtggaattttccacttgtggcatcatgtctgcgctgaaaaactttcagattttgggtttcccattttcagattaggatgctcaacctatattcatttaacacagttattgagcacctactaggtgctgaggatacagkagggaactaaacagactaaattctttgttcttttggaacctactctccagtaggagaagcagattataaagaaattaacaagtaaaacataacatatcaaatggtgatatgtgcaacrgagaaaaatatagtagggtgtaggataaaaactggaggtgggggcttgcacttttaataaagcaaagttgggaaagaattcattgaaaaagtgacatctgagtacaaaactgaggtagatgaggacagttgccatttggctgtctggtagaaggaacagtaaatgggaaagccctgatgtggaagtatgtctggtgtgttcaagggacagcattcagatcagcgtggctggaaatgagtaagcaaggggaagaagttaggagtttagtttggaagggaggggcaggtacagaagttattgggcctagtaagactaatgcagggactttggctagagtgtcatggggaactttttgagcagatgagtgacatgatctgacacatttttaaagaatcactttagttgctgtattaagaatagatcgtagggcgtcatggatagtcacagggagacaggttaggaaactattgcaataatttaaacaagagatgatgacttggaactgtagagtaacagtagaggtgttgagaagtggtcaaagtttggatagattttgaaggtggattgctaacagatcagacttggaataagagagaaagaaaggagccaaagatgactccacaggttttggcctgaacaattggaagggtgaagttttcattttaccaagatggggaagcctgtaggacaagctgacttagggtgggggaaagatcaagagtctgcttttgggcttactaaacttgagatcctcatgagacacccaggagatgttgtagaggcatttggagtgtggagtctaggacagagatacgggttggagatttaagtagggagtcttcggcatacagctagtagttaaaggctaggtgagaccacctaggaaatgagcgtacacagaggactaagccctgaggcactccattccatttggaggtggaggaaatgaggagaaactagcaaaggaggctgtaaccaaatagccggtgaagtggaggggtcaggaaagcgcagtgtccttgaagccaagtgaagaaaatgtttcaggaagaagggcatgatcaactgcatcaaatgttrataggtcatgatcaactgtatcaaatgttaatgggtcaaggaagataaaggctgacaactgattattggatttagcaatataaagatgattaatcttgacaaaagcagttttgggagagtcgtgatagtgagatctttattgggatgggttacagaaaaatattcaragtaattagagtcagcaaatacaaacacttgcaaggttctccaacaggccctggggctactacagtggggtcaaaagaggacacagggtaggagctttgtgttttcccagagctcacagtcagttacaggggaggcagaggcagttaagtaacctacaattacagctcagtgtggagaacgttgttttcagagaaataaaaggaatagacaattctctaggcagtagccttttcttgttctaaaattggtgcttaagctttctcrcaggttgmaaatggaataagtaagttcaaaatgggaaatgatctcagtccacttctactcagtagccagtttgcttccygttcctagttctagttccctgaaatagaagaaacaagtctggggctaggacaagatgaagaggctcctgaagtgcaaatttaacggggcactcactctcaaattcagggtcaacacttacataaacctgagaatgagtgcctccttaaattttgtgccctagagcgggggtcccaaactccctgggtctgtgacctgttaggaactaggccacacagcaggaggtgagtgagcctgcagccttaccaccatgagctctacctcctgtcagatcagcagtggcattagattctcaaagagctcaaatgctgttgtgaactgcgcatgtgagggatctggattgggtgctccttatgagaatctagcaaatgcctgatgatctgaggtggaacagttttgaaaaattgtcttccacaaacctggtccctggtgccaaaaaggttgaagaccgctgtcctagatgcttaatttgcctcaccctagtcctggccctgaagagaaaactttgcatctgttcaccccaaatatcccctgtgataggggaagggaatgtgtacctctgcttatttttcatttgtaaatttggtgtcttaattatcctatatgggctttttggtttttttgagacagggtctcgttatgttgcccaaactggtctcgaactcttggcctcaagcaatcctcctgcctcgtcttaccaaagcgctgggatgataggtatgagcccatgcttggcctatatggatttttttttttttttttttttgagatggagccttgttctgttgcccaggctggagtgcagtggcatgatcttggctcactgaaacctccacctttcaggttcaagcgattctcctgcctcagccccccaagtagctgggactacagacatgtgccaccacacccggstaatttttgtatatttagtagagatggggtttcaccatgttgcccaggctggtctcgagctcctgaccttgtgatccacccacctcggcctcccaaactgctgggattacagacgtgagccacgacacccagctcctgtatggacttttgaagcttgttattccttgataaacaggagctaagcaaaaaatgttctttcttctattttttaaaattgaggtaaaaattcatgtaaagttaaccatttaaaatggtacaattcagtggcatttagtgtatttgcaatgttgtgcaactaacacttctctctttttcaacaccccagaaaaacacacatagccattaagcaatcactctgccccctcctactacttcttgataatctccagcttagttttctgtatctcagtggatttgcctgttctttatttatcctatgaaaggaatcatgcattatgtggctttttgagtctggcttctttcacttagtataatgtttctgaggttcattcaagttgtaacatgtgtcagcactttgttccttttttataactcagtaatattccattgtgtgaatataccacattttattcattcattcattgatggactgctggattgtttctcccttttgactattacaaacactgctgctgttaacatctatatgcaagtttctgcatggacgtgtgtttttatttctttggggtgtataactaggagttgaattgctgagtcatttagtaatcgtatgtttaactttttgagaaaccaccaaactgtttttcacagtggctgcttattacattcccaccagcaatgtccaaggggtcccatttttctacatcgttgacaatacttgttattttctattaaaaaattattattaaagacatccyagtctgtgtgaaatggtatctcatcgtggttttggtttgcatttcacatgcttttcacatgccagtggttagccatttgtatatcttctttggaaaaatatctgtttaatttcttttcccatttttaaattaggttatctttttgttgagttgtaagtgagttatagattccttgtttattctggatattaagcccttatcagataactgttttgcaaatattttcttccattctatacattgttttcacatccttgataatgctctttgaggcctcagagtttttaaacaataaacaatatttggactcatgagtttccatcattgtgttttgttggctagragacagctgttgcaatcccttaagcatgggtgctattaaaaaaatggtggagaagaaaatacctggaatttacgtcttatctttagagattgggaagmccctgatggaggtaaggcgcttcacagctgttcctttgaagggttgctgactgatttcatagcatatactgttaaaatgctttgccttgtgttttcagcagcagatcatacagtgatactttcacccttgagtggctcatgtgaggataccaacctaaatgagtttacctcttagagaagatgtcagtggttgttttcagtcccatcctctcacttctctctggcttcttttttaggrcgtggagaacagcttcttcttgaatgtcaattcccaagtaacaacagtgtrtcaggcacttgctaaggatcctwaattgcagcaasgctacaatgctatgggattctcccagggagrccaatttctgtacgttcctttttgttatattgtaccacttatatggaattgatttttgtttcttttattyagataaatccactcctccaattcaagattgtcacctatcttggaagggaaatttcctaaaatgttcctgtgtaagaagctttatggaacttaatttcttttcttttttttttttttttgagacagaatttctctcttgttgcccaggctggagtgcagtggcgcgatctcagctcactgcaacctccacgtcccaggttcaagtgattctcctgcctcagcctcccgagtagctgggactataggtgctcaccaccacacctagctaattttttgtatttttagtagagatggggttttaccatgttgtctaggctggtctcgaactcctgacctcaggtagtccacccacctcagcctcccaaagtgctgagattacaggtgtgagccaccatgcctggctggagcttaatttattttctatgaaagttgaaagaaatatttgcatttgcccatatcaggaaaatcctgaaactctgcgggtttggggagtcacagaggatgactagcttaatctgtgatgctgattgtggatgatacatttccatctgacagtcggagctaaaactcccttttattccgtaggwgggcagtggctcagagatgcccttcacctcccatgaycaatctgatctcggttgggggacaacatcaaggtaactttgcctctttgctttcttttttctgtattctaacccacatgaccacctgatttaaaaaaaaatctaggaactgtatttgcacaagacatcagccattcttgcaaaatcctgtttctctagcttttaacaaactagccagcattgctggagacataggaagagacttaggattccagaggcctggatcactaggttggcatctacttctctccaatttcattgacacgattgcatggaagtaagatggttatagccacgtggcaggtggtggttgaggagttaggaaaattgagtgaccttttctgttctctgatttggtggtatcctcttgaatttaggcttaggcaaagaatagtgtgtaagctcttgtgtctataaatttaaactctttgagaaacagcaggttttctattttgacggaattccatactattggggaaggatgtgtcattagaatggaatttcatctctgttgtgatgggtatagctattagctggtataatgtgggagcagaatgattctccgtgtaatcaggaaacctggactcacccaattaactattactcctaggcaagtaatttggtatcttaggttccactcacagatggaagaaaccaaaatatggccctgcctgtcctatgggaatttttcagaggataaagtgaaataataggtaggaaaatactttttaaaagtataaggattatacaaacgcaarttggtaaaaacagctttattattcattcatttaacaaatatttattgaaaacctattatatgccaggaacaagacagacaaggttcttgcattcatgaaatatatatatatacacacacacatgtgcacatrtatgcacatacatacatagacatatatatatacacatatgcacctatatacacacatacatagacatatatagacatatatatacacacatatgcacttatatacacatatatacacacacayayatatatatatacacgataaaatggaggatagctgggcacatggtggtgtacacctgtagtccctgctacttgggaggctgaggctggaggatcatttgaagccaggagttcaagacactgtggtgtgctgtaattgtgcctgtgaatagccattgcactttagtctaggcaacatagcaagacccaatctcttggaaaaaaacaacaggatactgtttgaaggacacactagtggttgtagtgcttaaaggagtgggctctggggccaaactgcctgtgtctgaatcctggcttatmccttattgtctaaccttggacaaggtatttaacctcatttttacagttttctatctgtgatatagggcaaataatgaaatctactccacagggtggttgtgaggattaaattaattattgccaatattttgcttagaactatttgtgttactcaaaacaatgttattgatgaggatgctaaggatgaagtataactgggggaggggaaggaaatgggggtgggtactatttgagataaggtggtcagatgtgacttgtgtaggaccaagacctgagagctgaaaatgcgtccagccatgtgatgcaacacatcctccagggatgagcaggtaaaaagatccttaggcaggaaagagtgtagcagcaccaggaggaagctggtgatagtattagttctctgcrctttattttcatgaggaataagtgaatgaaatcagagtttggtcctgttcattttgtttctcacagtgccttgtgcatagtgggtattcgatacatcattattgaaggagtggatatttgtcatctaccactgtaggtgtttttggactccctygatgmccaggagagagctctcacatctgtgacttcatcygaaaaacactgaatgctggggcgtactccaaagttgttcaggaacggtatgtatggttagctgaaaagattacagacctgtcaccgtgtgaaaatatcatgctgactttcatgctcacagtgattccagcagtagttccttgtgatattcaaatgagatctttttttttgagatggagtttcgctcttgttgcccaggctggagggcagtggcgtgattttgtctcactgcaacctctgcctcccaggttcaagcgagtctcctgcctccgcctccgagtagctgggattacaggcatgcgccactacgcctggctaattttgtattttcagaagagactgggtttctccatgttgtttaggctggtctccaacttcccgagctcaggtgacccacccaccttggcctcccaaagtgctgggattacaggcgtgagccaccacacccggccttcaaatgagatctttttgtactatctgctcaatttcattgtaaacctaaacttgctccaaaaagtctattaactaaaaaacaaagaaagaaaaacaagggcatttttctatgtaagaagaatgtaattataacagaataaatttccatccttaaaaaacaaacagaaagcctttagaaagtactaagctcaaggaattattgttggtatttagaggacagattctttatgtcattagctactccctatatcactgtccctgactactcaaatgtatttgggtatttagcatggccagcctggcataatggctcacacttgtaatcccagctctttgagaggccaaggcaggaggattgcttgaagccagaagttcacaaccagtctgaacaacatagtgagacccctgtctctgttaaaatctattttttaaaaaaaaaagatgcagaattacttttgtagtatgtgcttgttcagttggttccaaacttaattgtatatcagaaccacagggaaattcattaaaaatggattcctgggctttatccttagaagttgtgggccgggcatggtggctcacgcctgtaatcccagcactttgggaggtggaggcaggtggatcatgaggtcaagagttcaagaccagcctaaccaacatggtgaaatcccgtctctattaaaaatgcaaaaattaactgggcgtggtggcgcacgcctgtaatctcagctagtcaggaggctgaggcaggagaatcacttaaaaaacccgggaggcggagcttgcagtgagccgagattgcgccactgcactctagcctaggcaacagagggagactccgtctcaaaaaaaaaaaaaaaaaagttttgatggtaggtctgacgtgctcttgatgatagctggagtttgggatcaactaatatcctgtgggttttccaagtgtctcattcttgtcaaataacaactttttattacagtatattcttgaagccattttccaagatacagccttgtgactgactcatgttgtaaccacctacagctaatagctgtcttttcttttcccactcgttggctacacaaatagccacaaagctgttttgggtcagcagtaccacctgatggttattatagaaaactaagatactctgtacctctagctccttttttttaccctcaggctacaccaagctttcccctttgcctggtttgattggctgtggctaattacaacttaattatttatattctacatattctctgttctcatggatttgcatggtatttaaacttcattcttcttcctttactctttattctcactcttgcccagttgcctccaaaamgcctatacttttctttctttgtgtgaaccaaaacaacccttggcgatcagaattctgttagtgatgctaagtgagcagtccgtcggggggtgacaagtgacacctaaatactgattaaggcggggcgcagtggctcatgcctgttatcccagcactttgggaggccttggtaggcagatcacttgaggcctggagttcaagaccagcctggccaacatggcaaaaccccatctctactaaaaatacaaaaattaggcaggcgtggtggtgcacacctgtagtctcagccactccggaggctgaggctagagaattgcttgyacccagaaggcggaggttgcrgtgagctgagatcgcaccactgcaccccaacctagatgacagagtgagactctgtctcaaaaaataaaaataaaaaatactgattaaaagctatagattgatgtgtttatcttcacttcctccttaaactttaattaagtggtagcagaagaataaaaagtgataaacccacaagggcagagagaacagggagagaggaggtaagagatcataaaaaatggcaacatgtttttgaaagcaagcaagcagatgaatgagtgtgagaactgttttagcagagcagatggtgaaggcttaaagtaataaagagaaatcattttgtctttgtgatactgtcccaggttgcccctggtattagggaggattaattctggttgcaagaagaaacccatatcaagccaaagtaaattttaaaagaaagtaatactctgttggtgcctaaagcctcatagggcctagaatcaagaattgggagccatgaggagccagggtattctctctccagtgccattgttgcttctctctctgtgtcgctgcttctttctctccatgcagaccagcttcccctgccacccacatgatggaaggtggcctcgcacggcttccaaatgtttaattttctgttaggagattgtctcagtctgaggctagactctctttgtcccgattcagattcttcaggaagggaccatgccccagctcaggtcaggtctccmcctctgctctcattagctgtggccagagaagtgggaccgtgcttactaaccataccccacctccctgtaaaccagtaggccgggcaggaagagtgcaagagaggcagagaccccaaaagatgtcttccacattcttcagataacttaaccttagcaaagcaaacgtgatatcctaatacgcacagtaactggtggggaagcccccggcttggcatggtgagggcaacgaggaatggtataatagttctctctctccttcctggatgtaaaactaccctctagttcccttttgcctttgcagatgctgtcagcccttcctagccttctccttcctccggtttgctccctgccatcccctgccccacgctctaccctcctacctctacactccctgccacaatgaatgcttcagtgttgccctggccttggcctccgtcttcccccgtaccagctcagaggaagctagagctttacatatcctgtttaattttcatagcaacttgccttccccaggtctgctctgggccccgctcccagtttgcaccccaccctcagtggatctcagagtgcttttcctcaattgtccagttttcccatgtctttgccctcagccgatgaacttgcaacttggttttctggaaatattaaggcatctactcaggctctctcagagactttcagccattcaaaaaagttagagagtaatgtaacgaactacaggcatacctcagagaaactgaggatttggttctagaccaccacaataaagcaaatattgttaatacagcaagtcacacaaagttgttggtttcccagcgcatataaaagctatgtttacactatactgaagtctattaagtgtgcagtagcatcatgcctaaaaaaagtacatgccttaattagaaaatactttattgctaaaaaatgctaatcatttgagtcttcagcaagtcatctttttgctggtggagggtcttgcctcggtgttgatggctgctgactgatcagggtggtggttgctgaaggttgggatgtagggtccagccccacagggtcggtgggtttttctccctgtgtgcggagatgagagattgtagaaataaagacacaagacaaagagataaaagacagctgggcccgggggaccactaccaccaagacgtggagactggtagcggcccygaatgccaggctgcgctgatatttattggatacaagacaaggggggcagggtaaggagtgtgagccatctcccatgataggtaaagtcacatgggtcacgtgtccactggacagggggcccttccctgtttggcagccgaggtggggagagagagagagaaagacagcttaggccattatttctgcatatcagagacttttagtactttcactaattttgctactgctatctaaaaggcagagccaggtgtacaggatggaacatgaaagcaggctaggaacatgaccactgaagcacagcatcacagggagatggttaggcctccggataactgcaggcgggcctgactgatgtcacgccctccacaagaggtggaggagtagaggcttctctaaactcccccggggaaagggagactccctttcccagtctgctaagtagtgggtgtttttccttggcactgacgctaccactagaccacggtccgcttggcaacggacatcttcccagacgctggcattaccgctagaccaaggagccctctagtggccctgtccgggcatgacagagggctcacactattgtcttctggtcacttctsagcatgtcccttcagctcctatctctgtatggcctggcttttcctaggttatgattgtagggcaaggattattataatattggaataaagaataattgctacaaactaatgatgaatggtattcatatataatcatgtttatgatctaggtctaggataactcttgttgttttatatattttattataccggaacagctcatgccctcggtctcttgcctcggcacctgggtggcctgctgcccacattggggtggctgtgctaatttcttaaagtgagacaatgatgaactttgtatcagttgactcttcctttcatgaaagatttctttgtagcatgcgatgctatttggtagcattttggccacaatagaacatctttcagaactggagtcaatcctcaaaccctgccgctgcttttatgtaagcttatgtaatatttattctaaatcctttgttgtcgtttcatcagtgttcacagcatcttcaccaggagtagattccatctcaagaagccactgttttgctcatccgtaagaagcaattccttatctgttttttkagattgcaacaattcagtcacatcgtcaggttccacttctaattctagttctcctgctatttccacatctgcagttacttccttcattgaagtcttgaatccctcagccattcatgagggttggaatcaacttcttttaaattcctgataatactgatattttgacctcttcccrtgaatcatgaatttttgtttgtttgtttttgagacagagtctcactctgtcacccaagttggagtgcagtggtgccattacrgcttactgcaacatagcctcaacctcccaggctcaagcaatcctcccacctcagcgtcctgagcagctgggactacaggtgtgagccactacaccccactaattttttamtttttttgtagagataggatctcatttatgttgcccaggctagtctcacactcctgggctccactgattttccctcctcaccctcccaaagtgcatggtacccagcccgttaatgttcttaatggcatctagaatgataaatcctttccatcaggttttccgtttactttgcccagatgcatcaaagggatcactgtctatgcagctacaaccttgtaaatgtatttcttaaataataagacttgaaaattgaaattactacttgatccatgggctgtagaatggatgtgctgtggcaggcatgaagacaacattaatctctttgtacatctccatcagagcgcttgggtgaccaggtgctttttaatgagctgtaatatttgtttgttttttgagtttgtttttaaactttttttaattaaaaaaaatagtttttgagacagggttgtgytctcttgcccagactagagtgcagtggtgtgatcacagctcactgcagccttcacctcctggactcaagccatcctcccacttcagcctcctgagtagctaggactacaggcatgcaccgccatgctcggctacttttaaaaagaattttcttttctagaggtggggtcttgctatgttgcccaagctagtcttgaactcctggcctcaaayggtcctcctaccttggcctcccaaagtgctggcattgtaggtatgagccaccatgcccagctgcgtggtaatgttttgaaaggaatctttttttctgagcaataggtctcaacagtgggcttaaaatagtcagcaaaccacactgtaaacagatctgctgtcatccaggctttgtgttccatttgtagagcacaggcagagtaatttagygtagttcttaagggccctaggatttaaaaaatggtaacccagcattggcttcagcttcaagtcatcagctccatgaggcactcacaagagagtcagcctgtcctttgaagttttgaagccaggcattgacttctcctctatagctgtgaaagtcctagatggcatcttcttccaatttaagactgtttcacctacactgaaaatttgttgtttatggtcgccaccttcattaagtatcttagctagatctcctggataacttactgcagcttctacatcagcacttgctgccccatcttgcactcctgtgttatggagatggtttctttccttgaaccttacaaaccaacctctgctagcttcacrctttttttctgcagcttcctcacctctctcagccttcattgaattgaagagagttaggacgttgctctgrattaggctttggcttaagggaatgttgtggctggtttggtcttctatctagaccactcagattttctccatagcagcaataagactgttttgcttccttattatttgtgtgttcactgaaatarcacttctaattttcctcaggaactttttttttttttgcattctataaatgttcagagttctaaacctttaaaaggtttcaaatacaygtataaacacattctagaatgtcactctgactgttgcttcctttaacttcagtctcatctgctcctgggagggagagctccatctctgacgtarctggctctgttgggctttagcgccagcctgctccacygagtggsgttttcaggaccactgcctctgggcagctcttccactctggctacggagcgtatgttgtagaaattttgatttctctccctgccaacctgggatagagtttgttcgaatttccccatgtgaggccktggggtaaccgtgcccattttgaggaggtgggggctggaagggaagaggaagtggagagagattggaaagaaagtataaagagtcccctttgctccagttcccagcaagttcctcatctccatctgagactacctcagcctggaccttattgtctatatcactatcaggcttttggtcaaagccattcaacaagtctctagaaagttccaagctttcccacattttcctgtcttcttctgaggcctccaaactgtgccagcctctgcctgttacccagttccaaagtcacttccacattttgggtaacttttcagcagcaccccactctactggtacttatttactgtattagtctgttttcatgctaccgataaagacatacccgagactgggcaaatagaggtttataatggacttacagttccatgtggctggggaagcctcacaatcatggcggaaggcgaaaggcacatctcacatgacggtagacagaagaagagagcttgggcagggaaactcccctcttaattttattttttatttatttatttatttatttattttttgagatggattctcgctctgtctcccaggctggagtgcaatggcgtgatcttggctcactgcaacctcagcttcccaggttcaagcgattctccctccctctgcctcccaagtagctgggattacaggcacatgccaccgtgcctggctaatttttgtatttttagtagagacggggtttcctcatgttggccaggttggtttcgaactcctgacctcaggcgatctgcccgccttggcctcccaaagtgctgggattataagcatgagccacagaatctggcccaactcccctctttgaaaccatcagatctcatgagacttattcactgtcacgagaacagcacaggaaagacccacccctgtaattcagtcacctcccatgacatatgggaattgtgggagttacaattcaagatgagatttgggtgaggacacagccaaaccatatcagcatgataagtatgataaaccccagtgtcacaggagaagcaaatattgatgagtcctttgcctgaatcttttataatttctgtactatgctgaacagtctgtctcaacaaggtgtcttgttgacagactgtttcctaggtgcaagtcttgtcttctgtattaaagggtaaggcctgggacttgagggctttggccttttgtccttgttttttgagacagagtctcactctgtcgcacaggctgaagtgcagtgctgcgatctcagctcactgcaacctctgccgccggggttctagcagttctcctgcctcagcctcccaagtagctaggattacaggcgcctgccgccgcgcctggctaatttttgtagttttagtagagacggggtttcaccatcttggctaggctggtcttgaactcctgacctcgtgatccacctgcctcagcctcccaaagtgctgggattacaggtgtgagccactgtgcctggctggccttttgtccttttaaagtctcttggtggcctttgcactgagcatgccctgggcgtactgactgacctgtagcttgatcacctcattctttttttttcctacagcctcgtgcaagccgaatactggcatgaccccataaaggaggatgtgtatcgcaaccacagcatcttcttggcagatataaatcaggagcgggtaagcacccaaaccgggctcccatagatgtgcgttctttttcctgtttaggtcttcataaacaaatcagcagtgactgtttacccaaactgtcctgggcagacmctaggaaagagaagttctgttttttttgggaggcagggcctttgagattcagttccctttagggaggttgaaattcatttgcctttcttcccttaagttctttccctctcctagtgttgaaacacacaggataagctcggcaggttgctgactgggcgaggtggaaattcacagctgctgtcttaatgagggaagctttcctgatggatcagtctgggggtggatttttctctagagatttacctaaaagagagatacagtaggcactgagtatgtcccagacacaaacatggtttggtaggttctggtaaactagatggctcagtttatatttgactcatctggagagtcttttggttttttgttttgaaacagtttgaagggaaaaacaaaccaaacaaaaaacaacacagaatagtatatagcagaacgacccagaatttgcagtttcttattttgtcttggctttctctgactagaagcctctcacctatgtgatggacacctatggagtgtggtgtaaactcatagttgtacctgtatgccatgctcagtggcatgtcagtcagataggatggtaagaaaagcctatagaaggccgggcgtggtggctcacgcctgtaatcccagcactttgggaggccgaggtgggcagatcacttgaggtcaggagttcgagaccagcctggccagcatagtgaaaccctgtctctactaaaaatacaaaattagctggatgtggtggcgatcacctgtaatcccagctactctggaggctgaggcaggagaatcgcttgaacctgggaggcagaggttacagtgagctgagatggtgccactgcactctggcctcggtgacagagcgagactccatctcaaaaaaaaaaaaaaaaaaaaaaaggaaaagaaaaggctgtgtaagcaatcccgtgactgggtatatacccaaaggaaaacaaattgtcctgccaaaaagacacttgcactcgtgtttattgcagcactgttcaccatagcaaagacatgaaatcaacctaggtgcccatcagcggtagactggatagagaaaatgtggtacatatacaccatggaatattacacagtcataaaaaagaatgaaatcctgttctttgcagcaacatggatgcagctggaggccgttatcctaagcaaatgaacacagaaacagaagaccaaatatcacatgttctcacttataagtgggagctaaacattgggtacacgtgaatataaagatgggaacaatagacactggagactccaaaagctgggagggagaggctagggctgaaaaacttcctgttgggcactgtgttcactatctgggtgaaaggatcaacagaaccccaaacctcagcatcacacaatatacccttataacaaaactacacatgtacccccctgaatctaaaataaaatattttgttttttagaaaaaaagaaaaaaaaaagctgtacaggtatatcctggtcaggaagctggaaaacagcccatacccatggggaagaaacacagtggcacagggtcagggagaccagaaaacaggaaggctttactccctctgctggtgtctgatggtaatgaccttaggtgttgctggcctttctttcagggtatcaatgagtcctacaagaaaaacctgatggccctgaagaagtytgtgatggtgaaattcctcaatgattccattgtggaccctgtagattcggaggtgagacactacttaggccacatgccaggagagtaaatggcattaaaatagggctgctggccgggcacggtggctcatgcctgtaatcccagcactctgggaggccaaggcgggtggatcacctgaggtcaggagttcaagaccagcctggccaacttggtgaaaccccatcgctactcaaaatacaaaaagaaattagccgggtatggtgacagccatctgtaatcccagctgcttgggaagctgaggcaggagaattacttgaacccaggaggcagagcttgcagtgagccaagatcgtgccactgcrccccagcctgggtgacagagcgagactctgtctcaaaaagaacataaaatgaaattgaaatgaaatgaaaaaatacagctgcctgctggggaaaaaaccttcagtcccttccaccaacttttgtataaaacagttcttcacctgaggtccataaatgggacactgaagattgtaatcaatcccccaaccccaaaattctatgcaaaattatgtaattacattctctggggaaggatctataattttaatccattttccagagatcagagacccaaaaaatgttcagaatcactagcccaaaatatataaattcctaagcttggcctccaaggtctgccttgatctggcttcaccccattttccagcctaatctgccttgtctgcacgcttcatacactcttgatcaagccatattgtactacttgtgctttttctctcgtatgccttggttcatatatttctgtctctagaatgcccttccttggcttctccacctracaatttctattcgtctgtcaaggcaaggatgccatccccattccaagcagaatgtgatcgcttttttagaatcatcagcctctgttaaaacactcatcacgttatgtcacaccaccagggattggccgattgtggcccacaggcccagtccatcctgctacccgttttggtgctacccacgagtaacaccaaacactaacataaaagaatgtttttaacattttttaatggttgggggaaagaattggacatataaagattatgtaaaatttatttagacatatcaagtatttggacatataaagattatgtaaaatttaaatttcagtgtccttattggaacagttttagttactttttacatactgtctgtggctgcatttgttacagtggcagcaatgagtrgttacaaccatatggcccttaaagcctaaaatattttgtatctggcctttacaaaaacgtttgctgacctctgtactcaasagtgaattgtttccgtgccttgcaagactgggagctytttggaaacagattatgtattcatccttgaatgtctagagctcagcacaggaatttttcacatttattgcttaataattttaggaagcagaaattctggggaagtggaaagcggcctctcagaaagattaactcatccctcgggctccacccttaagaagagatgactcagacgcaccctatccatttttccttcttcctacagctttatgatgttcactttgttggcagttttagcttctaaccagtctcaaattattttggcagtatgtgctgtgtgtcatatctgagcttctttcctttgcttcttctgcagtggtttggatttyacagaagtggccaagccaaggaaaccattcccttacaggagacctccctgtacacacaggtaactggcagggagtctatcttgggaggttggtgttttttcagctcccagttcctgaagctgctatgttctttggtgctggagccctttcctttacacctcagagcactaggtactcctgaaacacctgactcatgtccaatatgggtgaagcttgttaggctcttgattatgtgctctagcttattaggcactgggttacaaaaatccactacatcctgaaaccttatggtttccaaacaacaagagaaacctcatgtctgattcccttcttttgataaaaaggttttaaaactagctgccttggctgaggtacagtctgctacaaatccaggaagcctccatgcatgatgaggggcattcctttttttttctttgagacggggtctcgctctgtcacccaggctggagtgcagtggagcaatcttggctcactgcaacccctgcctcccagattcaagcaattctcctgcctcagcccccttagtagctgggattacaggtgtgtgccatcacacctggctaatttttgtatttttaggagagatggagtttcaccatgttggccaggctggtcttgaactcctgacctcaggtgatccacccacctcagcctcccaaagtgctgggattacaggcgtgagccagtgcgcctggccaagggacattacttttaaacattaatagatgtgaaatcctgtttctaaattacgcactgacaagggaggctcctgcaggaggttgagtgggactagagttttgaattttgtttagcagtaggtcctgtatcttaagcagaagttgcagtaatttgccacctccagttctggggccttctacactttaaggatttttttttttttttttttttttttttttttttgagacagtcttgctttgtcacccaggctggagtgcaatggtgtgatctcagctcactgcagcctccacctcctgggttcaagcgattatcctgcctcagcctcactagtagctgggattacaggcacacgccaccatgcctaatactttgttttgttagtagagacggggtttcaccatgttggccaggctggtcttcaactcctgacctcaggtgatccacctgcctcagccttcaagagtgctgggattacaggtgtgagccaccacgcccagccctaaggattttatattggagacagactctccaaaatgctaagtactacatctgaaccaatcaccgtctactagaattcctccatgttatttcagaggtcatttgtctcctcttggcttggcttttcttttgcactgggtgcctcaacttgggtggtgaggtaaaaagggaagctagaatctgatttgagaaaaaaaaaaaaaaaaggcttcaraaattacagctaagaacttccttactgtgaaaactcaaaatgatgttggccacggcagaagcaccattctggcactgtcgtaactgcttatcttcccaaccagaggttgttctccagcatctaggctatgggtaatgacattttcaactccagaatatgaaagtgtccagggtttgttacctaacggttggatatggtttttctgttttgttcttttgagacagttttgctcattgcccaggctggagtgcaatggcatgatctcagctcactgcaacctccgcctcccgggttcaagcgaattctcctgtctcagcctcccaagtagctaggattacaggtgcccgccaccatgcccagctaatttttgtatttttagtagagacaaagtgtcatcatattggtcaggctggtcttgaactcctgaccacaggtgatccgcctgccttggccatccaaagtgctgggattataggcgtgagccaccgcgcctgtcctgggttggatgttttttaagttacctagctaatgttctgtctttggctcagtcccacttacctatggcattctgaggcagtgtcgtctatggcttgcccacctataggtagtcctctgactctgagcttttcaaaaatcagaatctagaacactgtatagagcaatctcaattgcatatctatttttaatacttagaaaaaactggccgggtgtggtggctcacgcctgtaatcccagcactttgggaggccgaggcacgtggatcacctgaggtcaggagatcaagaccatcctagctaacacagtgaaaccccatctctactaaaaatacaagaaattacccaggcatggtggcatgcgcctgtaattccagctactcatgaggcagaggcaggagaatcgcttgagccagagaagtggaggttgcagtgagccgagatcgcaccactgcactccagcctaagcaaccgagcaagactccgtcttgaaagaaagaaagagaaagagagacagagagagagagaggaagaagaagaagaagggggggggacaggaggagggggaggagagaagaaagaaaagaaaggaagaaagagaaagaaagaaaaagaaaaaagagaaagaaaaagaagtaggagatattctttttggcatttttgaaaatacacctcaattttaatactcaggacaaactgcattttgaaaatatatctcaagttaacgtacttaccattttactccaaaacttcattaagctttttaattaattatggcctttccttctgcaggaccgcctggggctaaaggaaatggacaatgcaggacagctagtgtttctggctacagaaggggaccatcttyagttgtctgaagaatgrttttatgcccacatcataccattccttggatgaaacccgtatagttcacaatagagctcagggagcccctaactcttccaaaccacatgggagacagtttccttcatgcccaagcctgagctcagatccagcttgcaactaatccttctatcatctaacatgccctacttggaaagatctaagatctgaatcttatcctttgccatcttctgttaccatatggtgttgaatgcaagtttaattaccatggagattgttttacaaacttttgatgtggtcaagttcagttttagaaaagggagtctgttccagatcagkgccagaactgtgcccaggcccaaaggagacaactaactaaagtagtgagatagattctaagggcaaacatttttccaagtcttgccatatttcaagcaaagaggtgcccaggcctgaggtactcacataaatgctttgttttgctggtgatttaaccagtgcttggaaaaatcttgcttggctatttctgcatcatttcttaaggctgccttcctctctsagtacgttgccctctgtgctatcatcttatcatcaattattagacaaatcccactggcctacagtcttgcttctgcagcacccactttgtctcctcaggtagtgatgaattagttgctgtcacaaaaggagggaagtagcacccaaattaarttgcttaagagaggaaatgtacatcttgtataacttagggagcgaagaaaatgtaggcgcgaaagtgaaaagtgaggcagctagttcttcctattccattctcgaccaacctgccctttcttaatatgactagtggtcttgatgctagagtcaacttactctgttgctggctttagcagagaataggaggaaccatatgaaaaagatcaggctttctgacttccatccccaaaacacatttaccagcatactccaaactgtttctgatgtgttccatgagaaaaggattgtttgctcaaaaagcttggaaaatactacacactccctttctccttctggagatcaacccacattagagtgtctaaggactcctgagaattcctgttacagtaaacaaaactaacgtaatctaccatttcctacactatttgagcatggaaatcatagtccccactctgtgaaaacttaacgctttttggaagacatttctgtagcatgtcagtttggagaaatgatgagctacgccttgatgaaagaaccgtgttggtgctgctaagtttagccattatggtttttcctttctctctcttaagccttattcttcaactaaaagatgaggattaagagcaagaagttgggggggatgtgaaaataattttatgaggttgtctaaaataaagagtagtttcttatccttggtgttttcagtattttttgcatttctgtacagccaatatcacaggtaaacaactaagcaagtttggtattaactttattctattttctgtataactttaagtacataaaggtttatttccacaggcctcaggaaatgggtagaaatcacaggacaatctctcttcccaccaaaaaaaagttgcatattttggtaagtgtttgtcctagagggaaaaacaactgaaatttacattagcagtgctgtgcaagattcttacataattcaagacctaaaaccagcctgcagtggaggtttcagtcctctgttcaggtgcttagacagaagccataagctgatgagcatgacagggaaaaggaggcagtgaagacaggtgacaggcacctggcagggaagaaggattcaggaatgccagactccttgaaatcatgtgggtttgttttttttttttttttccttttaaagtcatctctataggaaggtgctgggcagggatcccagagaaagaaagggtccaagactccattaactgccctggatgaagggcactgctacagcagctagtaccagagactctcctatctcacggttgaggcagacccaggatagaatagagaataaaaggaatgcttataggaaacaattttgtatggaatgctagatggccaagcctcagcctttggtccagtgcaacccttgcctcgcttgtcaacagtgaaaaattagtttggttagaagaaccatctggaaacacaccagcttctgctaccttcatgctcattgttaaaaaaagattaaccagtgtgaacattctgatctgttaattccagggactgttttctttccaatggactgtttgttggtagaataacccccaaaagctcaaagctaaaatgcatcatcagtcctagtcggcagttccttaagaatggactggcggcgtggttgagctgatatggaaaagctgcaccttcctgcagaagatcaactgacctgctatcccaccccaaatttcagcctgaggtatatttcagtgaaggcaggtagctgtgcttctcagagcagagaagcagttttaagagcaaaaaggtagaggaaatctagaaaagaaccgtcttgatacagatttatcccatggtgtgaagggagggcaaagaacccagtggcacttcgcttatccagcaatttctgtcactgtggtgaccaacttctgcccgttccatagggtcttgaactgctcaggaactgggaattcattctgcaaataaagaagagacagcaggtttaaatctgagctaaagaacagctggggctaaatctcacacatttctcccaatgcttgcttccacttaaccccaggagcacggtacaatgtagcaagagacaaacccacagagccatgctatgttctagtgttcagcgatcttggacagactattaagtctatggggtgtaaataacagtacatatggctttatagcaccagcctgacaaggtgccatggctcatccccattattttttgctaccttgagctccacttaggcagaaagcacctacctttggggctccactacatgggactacctcatttctgtgtacttttggtgtgcattattgggtttttacctgctcagtgcagaatgttcataaaatagctttcttcaatgccagaaatcttcagtcccttctgtttttaacatcatactaaagagatcaagaaacttacaaagtcaccgccttctgtaggaatgaggacattcatctcggaagatttggcactgactatttcacaatccagggaattcttgctcaggtaagcatggcagccatctgttttgttgatggatatggttggcactttacccattacctgcagagtaaacaaagagaactgagtcccagtggttgggaaggacaacagtaagtcgcaggaaaaggtttcctgtttcacgtgactcagcaactacatgaaaagctcacagatgcgcaagacactggatactcgggtgggttgggatgggtcctgaaaagaacttgcttgaagagccaacccttcttctgccacgtccaaagcagctcagcttacagactttgtagaatcagattcccaccaaagcaacatctgtgggtctaccatgtctctttgaattaattcctcagggacaaaaagaaggagccaaaatatcgagttacctgaactttgacatccttactgttgattatctccacaatgcccaccacgtcatcgaataccaggccaagtttcttacagttatctaggagaagaaagggagtgtgtcaacagtgtaactttaaaggaaagtaatatacatttaggaatctttaaggatagggtaggtaaaatggtattagccttctcgggctctgggacggggcttgcgtgggacagcgacaaagactcacctactgtaatggagttaattttgcccttgatttgcaatgtcgtgttgacacacttgtatatgtaagccacctgtttcagctctgtgtcctcaatcaccaggttggaaacattttcctgattttcctgttagagagagatcccaggattctcatcacaaagcacacaccgaacaaaaaataaccaggctatcccaaactttttgttcttgcaattgaagccagaactctgccctcatctagctaagctccatttaacctcctgttcctactccttttccccgggaggcggaggttgcggtaagccgaaatcgcgccactgcactccagcctgggcgacaaagtgaaactccatctcaaaaaaataaaataataaaaatacctgcccctgtctaggtatttttaactcaccactctccacttcttgccctccagttcaagtacagctggctccttctttgtggctcgtttgggggatgggctggtttggggtttaggtgcagagaatggtttggggccactgygtactggaccactctgagccttcagggcagggttcttgtgagtcttcatgtcatcagatacatgtttcagggctgtaagaacaacagctaccttgttcctgtccttcataccagacctttgagctgctatcgtcatgttaaacatccttaacagaaaattcaaagccaaaaccagagcctttgagatgttctcttgcaagcagttttggaaaagtacttttatcatttctcttctccccaagattaaattatatggttccattaacaacaacatggaatgtgtgtatattgtgggtgaggataaggatatgtaaatccttatcctctatgtctagaaagacatatcaaatgtatgtgcacaaatatgtaatttttaaagcaataaagaaaaatgagtggtagtaaagaaaatttggtaaaaggaaaagaaaaaaataccctcactccccacagctaaccctacttcccccacctcctcagtcagtgttggcatttgcaactctacaatattgttttctacatatatttggttttgttggttataatcatacagattgttaacaaatttagttcaactattgacacttaaaaactttctcatgttaacctgtagtttaatatctttctaggccaggcgctgtggctcatgcctgtaatcccacactctgggaggccaaggcaggcggatcacctgaagttaggagttcaaaaccagcctggctaccatggtgtatttttagtctctactaaaagtacaaaaaaattagccgggtgtggtggcaggtgctgtagtcccagctatttaggaggctgaggcaggagaactgcttgaacctgggaggcagagattgcagtgagccaagatcacgccactgcactccagcctgagcaacaaagtgagactcccatctcaaaaaaaataaaataaaataaaaaataaaagtaaaaatatatttcttttatgttttaagggaaaaataattcatcatctcccacagcaggctgacacacgcctcgctttgaacatggccagatctatgttaactgtataacaaatactgaatggcctttttatctccaccattccttgtggttgtaatttacatactagattttttttttcttaaacattacatggttcactgtagaaaaacatgtaatggtggcacaacatttcatcaagaggccgggcgtggtggctcacacctgtaatcccagcactttgggaggccgaggtgggcagatcacctgaggtcaggagtttgagaccaggctgaccaacatggagaaaccccatctctactaaaaatacaaaaaaaaaaaattagccaggcatggtgacgcatggctgtaatcccaggtactcgggaggctgaggcaggagaattgcttgaacctgggaggtggaggttgcggtgagccgagatcgcgccattgcactccaggctgggaaacgagcaaaactccgtctcaaaaaaaataaaaaaataaaaaacatttcatcaagaggacatgtggtagttagccatttctcttacagttggatttaggttgttacaccatttttagctactatgatcatagattcctagaagtggctggacaactcagacttccaccagctgtgttaagggtatctactttataccaacattaggtcactctcatgcaaattttccatgtaaccagtatgcatcttctgaggaagttaactccctaacacaatgccttcccagaggccatgtggtgccacggaaaaagctctggggaaaaccgccagctctgtgccttggcacaagagggtcctctatatatgctacctaatattaagtcactttcccatggggcagatggcttcctccaactgtgatcatcattttcaatttccatttaagccagctttgccgtcccttaaaggaacaggacacaccaaacgagtctccaccacacaagccagggttgtagtttacagacggttctggttggtggsgtctggcccacacaacttgttgtacctactgttcgtgtccaagtgctcactcaccatgtgtaatgctctccccctgattaatctgygcgaacagtgctgagcgggaagcagactcatctgagcctgaactggtagagactgggggaggaggggggcctggtggagggggaggaggacctgatccggcagagggtccagatggcagtccgctcagttcttttgccacaggcccctggaacaataagtgcaggtaacatcatcatcctctctgctcccctctgtaccattcccagtagtgccctacatgggccagtgcacatggggtccccaccacagcctttgaggcaatgattaatgtgtcctacccatacccaacttggctttatgccttctcaccctttcccaaggatccagctctcagttctatttcttgaccatcacattttgcctttgaactcacctgattccagctctaaaaactatttccacaaatctacttgacatcttccttagtgtgttaccagtacctctgattcaacagattcaaaactgatttcatcatttcctgccgctcctctccctgtacaatcatccccttgtccctatttcagtgaaagatgttactatccaagactgactattcaatcttctttgaggattccaacttcttcgaccttatcaaatctctattatcttggtgctatctcctgcaaatgtttttctactatcccccaaacaccatgaccactttcataatctgagcatgagtccttatccctaacctatacactgagactcttttaaagacaaattgaatcattatcactcccttgctcaaatacctcatcccaaagtctcagcctaccttcctttccagccttttctcctaaaattctgatcatttccccttattgaagccagagatgaccaatctctacatttactctgcatgtattttgtttaagctgtgccttttgtagtatcccacttctcactgccctatactactttcaagtctcacagaagagtatataccttcaaagtacaatctcttctagt

SEQ ID NO: 93826 - DNA, 61972 bp, Homo sapiens
ttatagacaatacgtacatccatgtacacatccatatgcccatatacacacataaacacaacacactcacatgcacacacatacacccacacaaacataaacacatacttacacaaatatagacacccacatatccatcaacacatacatacatatacacacccatacacctgtacacactcatactcaccacacacatccacacacatatccacacacatcacacatatatacacacatccgtaaacacatacacacatacacacccatacacacatacacacaacacacaacacacacatacatatacacacacatacacccatgcacatatgcacattacacacaacacacacagacacacacacccagatagatacacatacacacaacacatacacatacataccaatatacacatgcacaccaacacacacccacacacccatacatgcacacacaacagagacacacacatacacgcacaaaacatatacacacacatgcacacacatacacacacagcccatacacacgcacaatagagactccagaattatcagccttacattgtcaccattagaggctccttcctttgaatctcttaaaagaccaacctaaaattggggaataaaaatgtgcattatcttcttggatctcactttatgatcttaagtgtgttcccttgaatctgaatcttggctccccatccttaaaattagagcagtgaacaaaaaacatatattttaaagggtgttctgcggagccctagtcccaggaactgttaggagttctaaggccttgcagccagataagattgggaaggcctgggtgtcttactggaatttctcaggacatttaatgtgctgctctgtgaacaaatccttcggaagcaccgtgttatccacccttccttaattactctgaccatggaatccccctagtgtgtaaggtgccttaggaaataggcttccaaaccactcagccccgccctcgcaaggtcctctgcagccataacactcatcacccaaagacgtagctgctgtcatcatccccctcagaggctcagaatgttagcttcagcctcactaacagcagaagggaacgcctggggacaggactgttctaggtgaaggaggggttggggatgtgcagatggtagcaggaggctttgtgaaggagaggccaaggggttcaccagggccaaacttggcagccttgctcacaggagtctacagatgctgctaactcagcctcaatctcagacagacgatctcatccccactgtgaacaagacgtgtgctcctctagacaagcatggctctggggctggcatctgattccgatacttactggacctacatcttgcgtaagtccttgttacctagaaatttcactttccacttcctggttgaaattcaagagcaatgaaattttaatccttggccctttgtattagaggttgaagaggggaagggggtgggcaatgggtgaagatatgctaaactagctacattattttcgggtcccttatacaaaaagcaggaaaaaacgtacaaaatatcactaatgaaacattgtatgctatgtgtattttgtcacaatataaaagcagaaaaattgtagttaaaggcactaaaatataaagatttatcctttaaaaataatgttatttgtaatacattaaggtaatcatgatattcaacaatataaatttaaaattaagaaaatatttttgtgtcataatttatacaatacaacaaataacaatttatcagtataataccttaattgatgataaatttctcgggcttatatttttgcaaattcatttatcaggtcatcagaaattttacttttagcaacttaatttccaattgacatatttgaaagcaatgtcagtcacttggcaaatgtaaggtcacaaataatttttgataattttaattttagaaaccgatttttttttgctgatttagttcttattggagtcgttaaaaattgtgagtgacagtattgggatacatttctgaaaagtttttagtaaaactaaagatgataatttttgtggaacaaattttctaagaggttttatgtcttcacatcaatcggttttgcataattctgaatttaattttaaaggcaagttcatacaatgtcattttaatgtgtcctctgaaattccctgaaattggtgaagatcgtacaaaaaaagaaaggacttcctgctttgtacataattttaaatgtctgtttatgtattctatcaccatatgtttacattgataaattataaaagataattttagaattagctcccttgttaggagatactttatatgaaacatcatatgcaaatagtgttctttcatgttgactatgatgttctttaagttcagtttccaatcctgtggttatcttctttgcaatgttgcagcagttttcagaagtttaaaagctttaataattgaaatctctgatatgctttatagcaatgtacacgcatatgcttttattctgtaataatttactgacaaaatttaccacctgactgctcgaagttctttcagacttaggagatgtttttccagcagctcaagaaatgctttcttgggaggacttcccatgctccagggactttacacgcctcatttctcttaattctcacaagcagccaaagagatgggtgataccacaccattctgtaaatgagcaaacagggtggcagagggttcagatttgcattcaggtctgtccagcagcagagctggaggcattgccacttcagctccatgagctcctgtagagccagaggcccggatcagaggcttctcactcacagtccaccctcacttgggccctggttcatcagtgtttatatggaatttgaatggactgagttcccaaagcccgaaacatagtaagagcagtgagtcagatgtgtgaggtatgtgtgtggggaagacaaagacactctaggaggctttcataggtgatagtggaagacaaggcaaaaaataatcatttcccccaatcagacacaatgatgcctctctgcggcaggctggcattgaatggctctgcacaacgcagcaggctctggtcctatactttcattattattcctatcttaagtccctgttagagcacagcaaatgctccgccaataaatggcagacacttgtgtgaggagaagcctctgaatgcatttgggggaaatacagagggtgaaaattatggaacaattccaaggttcaaggtaaaagaacaggcttcagaaggaattttgcagatgaggtcagagtgtaagtaagttgaggagccttatggtgggattctctcagcttcccaggggatcccagcaattctcaagcatccagtacaaagtctgagaactatggatccaatggacagtgcgctggcctctttttttttttttttttttttttttttgagatggagtttcactctgtcacccaggctggagtgtagtggtgcaatctcggctcactgcagcctccgcctcttgggttcaagtgattcttctgcctcagcctcctgagtagctgcgattacaggtgcgtgccaccatgcctggctaatttttgtattttttagtagagatgggatttcatcatgttggccaggctggtctcgaactcctgacctcaggtgatctgcctgcctcagcctcccagactgctgggattacaggtgtgagccactgagccccccaacccagcctctttcttagaagaaaaattgtcagttgatgactgagcaaaatgcttcactcatatatagtatataggagcttaggatttctcacagtgagtttgacatttagaaaaccctactgtttgtctatcttgaagactacgattatcttctcaatctgtttcctattatgaaatgcagttcaatttggaccatgaggaagactgagaaggaagattattctttttaatagctgcataatatttcacttcgggatgtaatcaaaatctatttaatcaattctgttttggtggcatttaaaaagttttcctgaatttttggctcttaaaaacaatactggctggcacggtggctcacgcctgtaatctcagcacttttgggaggccgaggtgggtggatcacaaggtcaagagctcgagactagcctggccaacatgatggtgaaaccctgtctctattaaaaatacaaaagttggccgggcacagtggcttatacctgtaatcccaacactttgggaggctgaggcgggaggaacacgaggtcaggagatcgagaccatcctggccaacatggtgaaacgctgtctctactaaaaatacaaaaattagctgggtgtggtggcacacaccagtagtcccaggtactagggaggctgaggcagaagaatggcttaaactcgggaggcagaggttgcagtgacctgagatcacgccactgcactccagcctggtgacagaacgagactccgtctcaaaaaaaaaaaaaaaaattaggcatggtggcgggtgcctgtaattccagctactcagcatgctgaggcaggagaattgcttgaacccaggaggcggaggttgcagtgagccaagatcgcactactgcactccagcctggatgacagagcaagattccatctcaaaaaaacaaaacaaaaaaacaaacaaaaaaaaaaactaaagcaatactgccattgacatccttgtaaatctcattgcacgctttcagaggccatctgcccacaggaattattctaattcaaccctcacaagaaccccatgtgttaggtgttatcatccttttggccgatgtggaaactgaagttcatgaagaccttttttatggctaaggttccatagccggtaagtgatgggacactgattctgtgacttacccactgctctgtgcagggaaactgtgaaaacagaagtgtcataggcgtgcaacctcactgacagacagtgaaactcactgtggtgaggggtgtgggggaggcctcaggaaggccaggaaaggctttttgaagaaggggattgaggcttggctttgaggtcaggcttcaaaaggcatcaagcaaaacacccccttccccagtgtgaaaggcctggagggaaggaaggatgaggagctgtggagtaggggaggcagcatcatcaaaactgcctatctgagcatgcagtccctgtggcttggagaccccgcctcctctggacagagggagaggttgtggtcagaagccttgaatgccaggagggctcttccttcctctgtccaccttctccccacacacacagtgttctggtgactgtcttggaaggatcgtcacccttcagctttgcacagagtcacagacggttgctgatgacctgggagctgtggacaacctgagcatggtgccctccatgactgaagctgctcctatgagggcttaggagacatacaggtgaggagaaagcagctcagagactctgggcccctggtccaatgcttctttatcttgttgaatgtaagagaaaagctgaagactcaggaaagttggcagtcaattgtcattttactgcaagagcagccacatggggagcggaatttcagttgtgttagagatgagagagttgaagaatgcgtggcatgggcccgggaggcacatgtcacaaaaacaaagaagtcctggtggctgattactctttctttaaattcttagggttttttattttaaaaaatgaattttatatgaattgaaaataaagtctgcttttcttacagtaaaatgccaatatttaaaggtagaaagagaatagattgaaatataataagctttcatctcatcaccagaagcttaaggaagcccaaggaacagcataaagtgtggaatagttctgcagaaaaaaagagaggacgcctgtgccctgcgatggcctctaggatttgttgagtcagtcgcccaatacgtattcagtgagcgtccatcatgtgccaggattgggccatgcagggcaaggctgtgaacagacacacctgcgccttcttcctcaccctcgtgaagctcatggcctgcacaggggcagaggtgcaagagggaggccagtgggaccaagggagtcaagtggacttgagagcaaatgaagggaagaaagtccttcctccaggagtaaaccctgagccagagtgactgtgaaatctttgggagacttccatgtgccaagtgctttaatatgtgagataatttatagcaacaagagatcagtattcatatctacagcttatgaactaaaaaaaaaattgcttagagagaggaagcaattttcccaagtcacatgtccagtaaatcacagaaccagggttctttgccactcgtacatttcccatcctgttccttggcgtctcgggtgcgctagtccccatttacatgaaacatccccaaactaagcctctatcttggagaaagctggggacatatgatccctctgctgcccaaatctgggaactgggaggcaggagccttttgtattttggaaatccagctgttttctttttgcacctagaagctgggggacagagggaattgcttattttctggaaaaacctggcaagttgttacatatttggraggcatttcacactcctccttttctcstcatcctccctacatgtcccgaagctgtttgaattccttcctcacttggtgcttaaatgcttaggcctgatgagaggaggagcctgactctgggaagtgcagtggaactcagcgggaaattactggaaggctgcacatgtctaagagcacttcagtttttcaaattggacttcaaatttagaagacggcaggtcccttcaacaagtgaatctcttctgtaaacttaagtcatgccctccactgggagcccagcatcccgttgcttccaagttgaggtgcttatgaaagtagctgtgtatcagtgggggctaagcatcaggtacccgtggacacaaagatgggaaccagacaccagggactgctagagaaagaaagggtggggacaagggatggaaaaccacctgttagataccatgctcactacatgggtcacaggatcatttgtgtcccaagccccagcatcacacatatacccatgtaacaaacctgcacatgcaccccatgaagataaaatgagggtcaaaattatgtttttcaagagtggctggaatggctatgacaaccaacactgaatgaggggtgtctggaggacagaggccaccgcagtttcctgagagcccagagctgcagtggaggctctcattcaatcattcactcattcaacagaaataaactgagtgcttgctgcacacaacaagcccagggcaagcatgggggcatgtgacagtggcctgcctgtcccccggagtgcwcacacagggcaagtctctttcctcagtgtagctactttgatagaaacagcaagcacyagaataattggggggtgaaagggcttcctgccagcctcactcagtccgtttgtgtctctccgaggagcccttgccttgctgggtcagtgctcagactccagcagggtgcacctgttcagagagtgctctggggcagcatggagggacagacgggatgtgggaggaggggagtgagcttccaaggaatgagggggctgaagggagagcaggaggacatgtgagtgggcagaagccttgagtctgaatctccaggaggctccacagtgtcttcgggatctgctgatcttcaataagaaaccagctctccatgagaactgactggagggatttcagtgtcatacaccagattcccagcacagctcttacatctgtgaatggatggctgtaatgacccacacatgataagaatcatacatggaacttttgttactcatccatatctgagagctggagactcaatgcaatttaacaaacccgatctcyccttcctctcagggttcattgccagcgttactggggagagatttatcaggattgcaatgtaaactcaggggtgagctttctcttcagccatctatttccaaagtacggttaattctgctttatgtctttctggacgatatgcaaatgtgttgactgatctcatctctttgctgtgatattcaaacatacttggggaaattaaaacagtaatgccattcattattgaccacttaataatttataatcaaggtgcaacctgccgtgtaaatcagcaaagtcaggtttgtttgaagtgtaaacaggaaataatctatgagtttatttgctaattgtacttgtaattgaccctagaagaccttgctgaattcaacccaggagatatattattttctcactcatttgattagtttcagcatgctaatgaggcccagacacccactttaagatagttgtttggcttacttgcgtttggtccatgtaaatatctgtccacatcagtgatcttttactgattacccaaggttgtacatgagtcrtgatctatcagtggctggtctttctgctttgttcaactagacagaagcccagtgagggaagagactattcctattgtgttcatagtttcattcaatgacaagcacatctgtttaagaaatgtctgtagaatgaatgccatcaatcccagggatattggttgctccagcagcggtccctatgtgacatggcaggctctgttttataattatgcaaaaaaacaccagtgagcagtgggaaaaggcaggaccccttcttgtgctctgagctcacaccagcaccccctaaaacacacagtcacatatatgcatgtgtgcacatccacatgtgcacacatgtacacggcctgcccctccttgaacaaccaagggtttcactaagaacaaaagagacatattcttgtggccagatttacattccccttttgtcaaactcattgctcaaatctctttcattaaactcaaatgtgtgatgtgtaaatgccatgatgtggcaatttcataaagaattttattaacaattattctgacataacagggattttagagccgggaagcgcacacttcaccctcacaggcgccgtcttgccagaaattctgtgatgctggctgacaacttattctctctgaacttaatttttttcatctgtcaaacagagccaatagcaaacaaactaagattatattgttagtaaaattacttaacacaaggtagaataatgaagtattatttttatctattaaactagcaggcttttttaaaagatagaaccggccaggcatggtggctcatgcctgtaattccagcactttgggaggccaaggcgggcggatcacgaggtcaggagctcgagaccagcctgatcaacactgtgaaaccccgtatctactaaaaatacaaaaattagccaggcatggtggtgcacacctgtaatcccacctactcaggaggctgaggcaggagaatcgcttgaacccagaggcagaggctgcagtgaaccaaacagagagagtaggaagagcacagttggacacctatcattacctcaactttgtatatatgtgtgcatatgcctaccaggatgagaaaatgtctaaaaggatatagagcaatattttaacagtgactatttggggagaggtaaaatcatacatttttaagattttcttccttgggtttttccatatttgtgaacattcttatctcttttgaaaccagaaacrtttattttaaacttactctatagatgtgcaggtactgaaccattgtgacatattcttgtcttgttccttctggtgacttcttccatctctgaggactgggggctttgcttttcttcctctcagggtccactgacctagaactgagctgcctgaagcatgccatccagaggccctaagttcgaggcccgagcaaccagcctgccttgtgacagcgaaggcaggcaacatattgatcgccgtggttgctccctgtgcatttaaataatagaacatggactggggctgtggagagaggaaaatcctggccaccactctatcatttccccagctatggattttgtcattactgtatttgccttgtgttacagtgggcgaagattgtatttgtgattgatggcagcagatgggcaatttattctgctgtttactttttatgttggtggatgtgggagtaaacgcagccagaacacttggctaagcatttgctaatatcctctattgactgagacacacagggagtttatctgaggtccatgggcacagccttcacatggaagaggggcccaggatgctcaggaactgtgcactcagggactgaggaaaggtgccaggtacttgacaccagttaacctgtgtaagcaccacgatcagccaagaagcagatgtgattatcttcactttataggtaagaggggcggggagatggtctccaaggtcacacagctggtgggtattacagctagattttgagggcaggtcttgtgatgctaaaaccaattcttagtgtctgggttctggattttttagaattagattttaaagcaaggactgattacggaaattctgaaaaatgtctgtgcatgcacacatacacacacacacacacaccaccaccaagggtgtggaagaagcaggacagaaaacagaaagaaggaagccaascaagagtgtgatttcaggagaagccccagacataggcagaccccacagggagcactggagcatgagtcgacctcagagtctgtcctgagcctagcggggagctgtgtggtgcagcctcacaccagccagtcactggctgtgagccatcctgcatttcccatgggcagggccactttagcatcttagggccgacccccaaagaaggaccagcaaagaacagagctgtgggactggcatgcagagctagtgacagggatctaaggggattttggcaggacagggtcccagggcaggagtctggaggtttgagctagccttcaactgaaaaggacctccgagtcagtttcctcaagccagtatctggcaagggaacagcaggaaaagtttggggaggagaaaaggagctctgctggtctgtgcctcacctgtcagagacatgccctgaacacccccagcattctgctgtggcccaccatgaatctcaccccgttttttgtttcgttttgttttgtttttagaaaaacacccttaagtgtgttccttttattaattccaaggactccaggaccaaagctctgatattggtcataactaccaagactttctttaatttgactgggatggtctctgtttcctctggggcaaaaagaaagttaatttttttaaaataaatgttcaattttataaaaattttagattacagcagaagctttgcaaagatggtacagagagtccccatctacccctcagcagctttccataatgttgacatcttaaattcccagggcacatctgccaaaactgagaaattaacattagcacgtcactctcccctawactacagactttatttagatytcaccagttttttcrccagtgtcttgtttccattccaggattctatcaaggatccatgctgccatcagtgactttgctcctctgattccttccaccctgaaaatgcttttcctccatttctacacactgtaactctcaatcaagggtgagttctgaaatcagtccacacgcttgtttatttgttccttcaggcatttattcagygtcacttatttggagactcctcggtgccaggaattaacccagttctgagactacactgatgagcaggaacattacatgtgtgttcttggggtgctcccaaagagtgggggaggtagacactcattaaatgaacacatgcataggtttgacaccacaggctgacacaagtgctggagagaaagacaraaacaccatgaatacatttctctatggccgggcagggycagacaaggaagactycagggtgtctgcctatgcagcaggtggctggtacccttctgagagagagaacaggggagaagcaccgggtttatagggkcaggctcwtgartttggtttgagatacccaagccaagacctcaggcaggcaggcggaaagatctttcaggacctcaggatagtggccttctctggttgtcccagctggatacagattttttctcttttaactttgactcccatgacattctktctattttataacacttaccttaatcaataagaaaagcaatttaccttgttgtagagccattyttcttcctaacttatcttctgtcatgtcataggctctaagcttcatagaagcattctttatctgtctttcgcactccacctgtctcagtatttcatacccagtgggggcttaataagtgtttatcacactgaattggaaggcaggccagttgataacatcacagatatctgactatatctgtggaatgggcttgattttctaaagagaaagtcagactgatgcttctcaaactacccttcccaggtacttctgatggacatcacagggcaggctctggggactgcaggccacctccccygtgaaagggggtgtcagtggcaggaggttgtcccacaaaagggagagtttcatggccacttacatttatgaagctctgagttaaacttgttttatttactgtaagaatttcaaagaggaaaaagactatgaaatattttcaaatgtattaaaaactcacccttccagtgccctccccgctgatttgtagastatctaatagaactagtgcactagagaatggctctgaaatgctacaaatgycacctggtttcctcatagctcattcatagtggccaaaattcctgcataatgaastgagacatcatatacacagaataggtakttctgtgggtccccagaaatgaccagggacaacattatgccayaacattttcttcactgggaacrtcacctgcagcccccagagcctgtcctgtccttgcccttacataggkgccccgagtggcagcacatatgcttgcggctcytgcatcctgcacaacacaggcaccrggctgggttggcagctatcattccacagagccagccccgtccctgatgtcacggagctctgggtctcctgtgccagccaayaccgagcagcccaaggtaggaygtaggcagcacaagatgggtacaggggctcagagaaggagtcaagactgaagctaagagagggtgagagtgatggaagctttggctcttctgcagctccatttaagcagctgcttagggcctggggatgggacccacagcacgagggcgggtccaggagcagagttggaaaaagtgcagcccaagattgcccatcatcccaatgttcaggaacatacacccaagacatggcgggagccccctgctccttgtcaaggaggagtgacattcccagaaagccttccccctatgcgggatgtggtcagtggcatcgtcttcgtcagtgacacagggtaggggatggaggggagggaggttcccaactgcagctactgcctttcactctgcagcatcgaacagcccctgggtgtggcagagccccctgacagccataactgaagccgaccccaagaatgaccctatggtctaagaagaatgtgtgttcagagccccgagctaacgaatctgagttccactcagaaatccactcctggccaggcgcagtggctcacgcctataatcccagcactttgggaggctgaggtgggcagatcacttgaggtcaggagttcaagaccagccaggccaacatggcaaaaccctgcctctactaaaaatacaaaaattagctggtcatggtgatgtgtgtctatcccagctactagggaggctgaggcaggagaattgcttgaacccaggaggcagaggttgcagtgagtcgagattgtgccactgcactccagcctaggtgacagagcgagactctttctcaaaaaaaaaaaagaaagaaagaaatccactccttatccatgaaggacatctgaacccctggcccatcccttggaacccagtctgtacggggagtcgaggccctttgttttgggttaagtgtagggtgctacgtgaaatgctatatgaatggcatgcttgttacaaactgtagtggttctcctgtccagcctgcggctactggactaccctctatgcaagtcgcctcaataaaccctgtgtcttggttgctgtcttaggtctcttctttagcccctcagacacagtgccatccccactggaacccatggggtacagcgcaacacctgggcactgagcaaggacccctcctactcacacatggtcaagtgctcacatagaaaccccgagggggatatcagggctctcgaatagaaaactaatgtgcatgcaaggtatgttttttggctgaaacaacagaaatcccttttctattttctcactgttctggaggctggcggcctgagggccagggtgcccatgggtgcatggctgggtgctggcgaggccctcacccttgctcaagttctcccagagtgtctgaaagagaatttggggaggaagaaagttgtgctagatccctaacatctttctcctgagagtgaaaacacatccctgctgagcctgggcttacagcttttaggtgaaaatgttaggaaattcattttggtttgagctttttctaagaaatcaaaccaaaatactactggtcacctcactctacaggaccataaggaaaacaaatggtacagtttggaaggtagaaaatgggtgtgctcagtcatctttgtctgcctagagacagcctaagagatgtctttactctctgatgcctttcatagtaagggttcctatggactaaactgtgttcccccaaattcatctgtggaagtccttacccacaatgtgatggcatttacagatggggcctttgggaggtgattaggtttagacaaagggttctttgaggcacagaaagatggccttgaggaaggttgacattagagcttcktgtcatgcaaatgtggggtcagtcctccctcccccttccagattctcctagttgtgctttggatcccaggtggctccgcccaggacacacagacccagagagagtccacctgctccggcagataggccacaccagagaggagatctgaccttaacaccaactggagttggagttggaaatgccttctgtggttgacgtggagacggctgcccaggggcccttcgggggggacttgcccagctactggagtatggttagcggacagcctctggcttctgggcctgtctggtgcacactttctaaatatcacctagcagggacttagcagggcctggttaaaaaggcctgacctctttagtctgaagctggacttaggactccaggycctccacctgctgctcccccctggccaggactccctgggcccagctccccttgactactcggtcacctcctcttcccaatcctgctttctcccagtcctgttagctgttgatctccgtacaactcgtgcccctcacccctctatctcagcacctgcttctggagagcccaacaggagacactttccaaaaacaaagctctgaaaaggtctgaggtggcttcagtgacaggactagaaaagagataagaaagacagaggagctaggtgagcccctcctgtagaagaactgaatttagggtactgttgtttccccaagacaccgccccaccctgttgaccaagtctagctctgttgactggtccacgcgaagttaacaactcagtgtcttcaaggggcaaacgggtagaataaatatgtgtagagtgcaaggtgaaagacattagggactggtggggtctgtggcaaattgggcattttatgccctgcccaaagacattgaaagagatagaaatagagataaagatagaaaaatacacacacacacagacaaacacacatacacacaaacacacacacacacacacacatttctattttggccaaagaaaaaagaaaagtctatgtccaaattccctctgagctgctggtttgtggccctggactaaaggaaatgtctttagctttttgcctcagtttctgggtctgttaataagacccatttcatatgttcatttcgacagctgaaaaagttaatccctttaaataatttagtatagttcccagcacaaagaagcattcagtcactccagtgactgctctaatcattaccttgattttctataaaagaaataaagaatcctaccagtctcaccactgccatcgcagaacaaagccaatgctattggccaggctcagctgccaggacctggctttgagagtcaagcaccaccactggaaaatatatattcataggcatcctgaaccaattgatatttcaaactcccttctttcccaccccatgaaagcctcacttatattttagtttaattgtggggaccgataatactctaggatggaagccaagttaaaacattgccctaatgagcaggcatggagcccktttycggataatttatatattaggaagtattttcaaagtaatatctccagctctaaatcttttatggtcagtcttgaacagttttttggggtccaggtctccacagatgccaacagggcacattagagtatgggaagcaattttccaagagtagygagttctgctgtggctgccagatgacccgactgggcagcaggcactctgctgggtggcagggaaggccaagagctggcaggatgactgctgcctctgcaaagcaactgcacagtgagttgagggackaaatacacgaaagccattgccatcgccatgctgaagtggtaaatgacagtcaaaagtagacatttcagcatttctataccttttccattagaattttttggcaattaaaaattttaaagcttatggattctagtctatgataatagaaataatttcacacaataagatgtctggtttttttctaacgctggctgcactattttattagctgctcaccttgagttacttagtcaggactgggagggctggacctcagcttgcctcctccctgtctggtgctcttttcaccccagcactgctcttcccttcaacctcaccctcttccctgaaagtgcagtctgcatatctcctgcaaccacacaagcaaaggaaagcaggacaaatgcctggggactacttattgtgggtgcagctgctttgctttgtgatgatgctcctatcaggggatgtgtggacaagtcccagcctaggagcttgcccagcctctgccaccatggtcttcatgttctgtgagacctcagatccccactggtatgaggagggtttctcttagcattctagatggtcctgtcctcagggtcaccaggcaggctcccagagaaaaggcactgccctgcccatcctgaacccaaacgatctctccccaaatccaaacatgtaaamcaccactcacattttcttggataatttctgggacatggatcatgtcctttctttctctgcatagctacttgaacttyagctaaactatatatatcagctttaaaagtttgaaccttattgtgcataaatatttttaaaatccaaacttgtgtctgttctgcagactgcctgatcctttgtgagggtcaatgagtgtgacatggagaatggggcccccactctaaaagcagcccctcagccccaccctaggtagcttatccaagacttccagtggcaccggctttactgaccttttgtgagtggagcgaaagccatgtgcagatagtaggggaggtcccgagccttctcctgtaattatcctccacttccctctcccttttctcctctcatcctcctctcagcagtcactctgcaggtctccaggtttcrcttccttcagttcactctgtaacgtatggagcatctaacctgcaccccaccatggcctgggtgccgtgggctcaggccacgaggaatgagcaccacttcctgtcctccacctgctgccaggctgaccagggctaatgagctcagcagcagtgactccatgctggacggtgctagtgctttgtcctagatgtgacgagtgctacagggacacagagaagaggggacaggagggactggggtggtgttaagcaaagatgacagaggagggcattccagagagaggcgccagcgtgagcaaaggcacagagacagaaacctccagcccagtgtgggcgaagggtgctcagtggagataaagttagaaaggtggtggaggagactgctgtgaatcaaacgtcagaagactgtgtgatcagcagaattctcgggtggccaccaagatccccttctcatgtatacaccttctccatgttattcagtcaaacaagaatctatgtgttggtgtcacagattttacagatgtaattaagttcccaaaaatcagttgatcttaagatacaagaattatcctcagtggacctgttctaaccaggcaacacttaaaaaaaaaaccaggattctccctggagatggagatgtaaagcttgggtggaatttgatgtgagggagattgtttgttcctggattggaagatgaaggggacaaggtaggaaagaatagagatggcctctaggagcagagagcgcccctggctgacagctcacaagaaaaaataatcacaaggaactgaatttggccaacaatctgaaggagtttggaagtgaattccttcccagagtctccagaaaggagcacccagctggcaccttgattttagccttgtgagaccccgaagcagaggacccaaccatgcggtgcccaaactcttaccctaagataagagtgagccagtaaatgggtctcgctctaagtctctaagtttgtggtaacttgttttgcagctatagaaaactaacaaacaaaaagtatatgcccagacagaaagtctcccccaagaggatcctacaactgagctacgaaaggcaagtaggaataaatataggtgaaggtgggctggggtaaaaagacagtgccaagggaaggggctgcacgcatagaggcctcgtgacrcccacaagcatggcctgtttgagaagctgagcagtgttcctgggcctcaaagagcaagggagaggctgtcgcccggtgaggtcagaggagcatggtcaggctgtgcaaggtctggtagtgccatgttaagtggaaaaacaggatcccttttcatgtttaaatatccctgagacagaagtgccatggttatcacaggggtgggtggatgtaacagacacgtagaatgtaaaatatccggggattggtggtggattaaggaagggaacagggtgagaaaatagtagagctttccagataagttatatagatggaagacaatgttacgcagctggatcgagggccagatttgggggtagttcacacccaggacgtggtagtcagcagggccttcaggagctctaagcagagatgctaagtgggggcagagggttgctcaggcatgaccggagttcaagggtgagtctgtgctagagccctgaatttacagatctcagtgccggacagtaatggattatttgggagactgtggatttgcccaaggtgagaggtgaaggtaggccatagagggggaaggctggggaccaaactgtgtagcagggtttctggggtcggccccagcatttgcgtttctgacaagctcccgggtgaccctgctgctgctgatctgagaccacactttgacagtcacctccttatgctagtggttcatggtcatgtatggagagggaaccagtaaaaaaaaaaacaaaaaacagagacagtggccagagagcagtagacaaattaagggcatgtggcagagatttgtgcacttgcctttgagtctctgctttgggtaaacaatctgatctcctctaaccttctctccaagttccttgctttttagtccattactcagtttgctccctgtctgttctcatcctgggcagttacggaagttaaagctgggcccactgcttgtgcctctactggagatgggctgtctggagccaagccctgggtcctgatcccgcatttccaccttccttgagtgatagctggatgccgggccacagggactgagaggacagtaagaacatatccctggccccaaggagctcttggctaattagggagatgtaagaaaaaaataactaccctttaaacaaaataaaattttgttgcaggcataagagaggtaaactcatctcaaacatattcggacacgcactagggcataaattcaaaatcgtacttgtcctcagtgagctcacattcattccaatgagaaagacaatcatacaagtgacaatgttgacaactgccttgatcatatcacacttcagtgtgtggaaggaatgaaggaaagtgtgggagaggggccagtatctccatgtggaaattaaggggtggagaagggctgaacrggggtgatatctgaagaaaggtttgtttttatgttgagaactctgaaaatatgaaagcaaaaaactaaaacaataggtgcccttattttcactatcccaaatgatcagttttttgttgttgttgttgtttttgagacggagtctcactctgtcgcccaggatggagtgcagtggcatgatcttggctcactgcaacctccacctcccgagttaagcaattcttctgcctcagtgtcccgagtagctgggactacaggcatgtgccaccacgcccggctaatttttatgttttttagtagagagggggtttcaccatattgggcaggctggtcttgaactcctgacctcgtgatctgcccacctcggcctcccaaagtgctgggattacaggcatgagccaccgtgcctgccccaaatgatcagtttttaataggttgtcatatttacatccagtctttttaaaataaatagattaaaaataaagctaaagccctttggcaacaagcctaaattttttcctttcttctcttcagagaaaataattgccatgtatttaatgtgtatctttcagtctatttgtaaatttttgtattatatgtatgtttttatttacaagtgctgatttgtgtatgctttcacatgtgcagaagctgtgtgcgtgctgtgactatcactgtgaaatttgcttttcactcaaaattatatttctcagatttcttcaaatattcaaatatacatgtgtgtatatatatgtgtatatatgtgtgtgtgtgtgtgtgtgtgtgtgtatatatatatatataaaggttaaatatatttatataaagagaagtttccttaaacagctgtagaataaatatttatggtctctgtctcgacttttccactctgcaagggtagtgcaaaagcagctgcagataatataccaatgaaagtcatgctgtgtttcaataaaactttcttttttaagagacagaatcattctgtcaccaaggctggagtgaaatggtgtgatcatagctcactgcagcctcgaacttctgagctcaagtgatcctctggcctctgcctcccgagtagctgggactacaggtgcacaccaacatgcccagctaattcttttctttctttctttcttttttttttttttgtagaaatggatcttgttcttttgcccaggccagtctcaaactcctgggctcaaatgatcctcctgccttggcctcccaaaaagctgggattacagggatgaggcgctgtgcctggcttcagtaaaattttatttacaaaaacaacaagcagttagcctagatttgaccggggggctgtagtttggagatccctatgctacagacggccagttaggagtagactgtggagcaagaatggaagtgagttttgaaggccgagaaggagttcaccaagccaacaagactgtgtgtgaatgaacatgtgttgagtgtgtgtgtgtgtgtgtgttggagagtgagaggcatttcctgcacagggacctcatataccaagaggacagatgggagaggtatgtcctgggctgcactggacaccacgtgctcaggagggagcagtggaagcacaggtgtcaaccatgaggctggagaatggggctctggccatatctgggccagggaacttagactgtattcctcagttgaaggtgttttaagctggggagggacaaggtcagatgtgtgttttagacagattggaagagtacagagtgactgcagaatggaaaatacattgaagaggagaaagaccggaggcatggaagccaattttaaggctgttgcgatgttctgggagagaaatgacaagcatctgaagtagggcaatggcggtaggaagggagagaggaatagatttgagaaatctttagaggctaaatcagtgagatctggatggctgattagttatgagggaggaggagagaccaggcaaaggcagttttctattttcactttccccttagagtcctgtaaagatggtgccactcctgaccaataaagagaatacagaagacattataaattatggaggagaaaatgattaatatgaaatgctgggaaaacaccggtaaagaagtgaagtgaaaattacatagaggaaatggtggttgggctaggaggaaaagtgggaagagacgttctatggaaggaatctcctggtgaaagcatttggggtggaaacacagggcgtccctggggcctacaagctgcttgggtgtgtgtaatgtgcacagggagatatgggggtggggaggagattagaaagaaggactggagccagggagagaagggccttcagggtctccccggggtgttgggctcattccttaggaacaaaagggagttcttaggatgtgcaatttgcatttgaacatgcttgatgctttggaaggaattgctctgcagaatggagtgaagatagaggtgggaaggggcccaagtgacctgtgtttgggagagatcactatcgcagcagtcacactgagcaggggaagaatgaaaacaaagaaacacagtaagagaaagggaaagagagacagacggaaggtaaggagaaggaaggaggcacatctgtgragaaaaggcctgggtaggaaacactcctctcagggtctggcagctgatcacacacctaggagggaggcgagctctgattttctgcttctgaatgctgatgactaatggggaagacgtgctctgccttcaggcactgagagctcacgagttgatgaaagtgtgagccrcggtttctccctcygaacctacctgtcctcctctctcagatctcaaggaacccctcccaccgaatatggaatctctgcgaatcttccctgcatcatgagcataactgctccaagtccggcatcccagatgtcttcctcttgctagacgtgtcctccccctgcagctgtatgtgacacacccagaggggattcctcagcatcacccagaggttgaagcctctgtcaggaaccattctgtgctacctttcattcccacccccatgccccctctccactcttctccctgcccctgctccaggaggaaggatgttgtgtctatgacattcacaaacccctgttttccaacatctagttgggttcaaccaacaaagagctatggcaraaaatttgcaggaaccaaaagagtgaggctcccttcctggggagtctccctggactggctctgctctttgagaaaaatgtttgtgagtttaatgtgaaaccctgaatggttttagaaagataagtgtgctagttgaaggctggtcaggaaaaggatggtcaaytctaattagaataagaaagggacaattcaataaacggactattatagtgaaagcgaactaaatgtggcctgagaaggactccctacttctgtatttgagtccctgtggactaaccacaacctaacttagtaggtagaygagattgaaaacctaatttaggagtatgtacctgtaacaatagctgagtctcagccaatccaagcagccatacttcaaccactcatacacygctgagtgttcaaactgtgttcaaataaagcaaacacctgtaaccaacccaaatgtctctgtacctcacttctattttctctacatcactttcctttgctgcccattaatcttccaccaygtggttgctctggagtgtcagagcctactctggctcaggaggctgcctgattcaygagttgttcattgctcaattaaactcttttaaatttaatttagctgaagtttttcttttatcactttttaacaaggagtgttcagcaagcccataagtagggcagtaacatggttctagtgaccgtatcaggcccaaagggatttggggagaaagttatttctagcatcagaaggacagaatcatggagagcaggcctctttaagaggagctttgacctttgttggagggaaacaaccaggctgagatggcctcacagaaaagcagtggcaaaataaatactgaattcatcctcctttctcattctggtctccttgcatctctcaaactcccagttagttaaatccaatcyacagcctaaggacaagggcgacctctgatgtgcctcacgtactctagcaacagagagaaatatggaggtgagtgtgggggtaggaggctgattggaaggtgtctggcttgggggtgctggggtgcactttggggaagcacatcatgacagggctgagtgtgtgataaatcagagcccgtgtgatgttgtgataggtgakgagtaaagaggctgctggaatcatccattttgaggacctgaactaaagcatgagcaccaggtggagaagtggtcaagagctggrtgtatttcagagaggagtgacagcctgacaacyaaggggatgtaaggaacatttcayaacttggatcaaccccaggacacccttgctgagctgtggagaggagtgagagcttgacaatcaagatgtaaggaacatttcacaacttggatcaactccaggacacccttgctgagctatagagccacagggctctcggccactccagggactctagtgcagcatttagcagtaccaagcaaagcatacctttgggaaacaagcgcaattcctgcctccagaaatgtcttcctaatcctgttggtaaatctcatacactgtgatttattaagatcttgttttaatttcataatatgattttacagaacatttactagataaatataccagaacccagacacaagctgctgtgccagttatagatgtgccattaatttggctaatagctctgaggaggcagcccagagccaagtaaagagagtctggattcctcagacctctattccaagatgcttgaataaaagaagtggttccactcaactgggctcaactcagcccaatgggaaaacattctggggccatgaggatggaaggaacagcattacgcctccttcacaggtaggtgctcatggcaatggccctcacagctgcaaagcacacacacaggttcagctgggctagaagacagaacattctgaaatttttaggggacagagatgggtcccagagaaggctgtcctgagaaattcagctaaagttgtaggttattgattctgcatcaaggaagatagaatctgtttaccagctggtcaaggcttcaatgtactcaattttcaacttctcctactgcttttttcaccttggtcataggattatgaccaagaagaaagataataaggaccagaaaattctagcccccaataggtagacctaggctacatgaaggagggatgacaaggtgctctgcaatacaggacaggcagaggctgarctcagcctggggagcaaaggaagctggaaggagtcagtgatgcctgggtggggcttggaaggcctcatggttsgtcaggcacaggacatggctagtttctttgaatgaacatttttatgactgtcagtcacaagggcacggaagatgaaaacattaagtcccactgtcacctcagtcattgtgatgagaatgtgttagatatcaagggaacctggctggccaaagagtgaactggtgaagcccaaactcatttccaggagggaaagctagctgcaggaacccaggaatggagatgtatttctgccctactgagtcttgagtctccatcctcacccagaggggagcttgccctggggctgcaggggcttaatgaccaggagacttcaccacccacacccacaagggggccacagttcaggaagagaatctggtggcaactccaggtgtgtatgtactgttgaaactgtatgaaactgttgtatcagtttcagggagtcccacgcagtgcctcactgaccatcactttccagctggcccagcctcagcctccctgtgaggactgtcactgacgcaaggtgtcaccatcacactcaaaggaggggagtcactggaacaggttgttggttttaaaacctgttccccagaaagacaaatactgcatgatctcatttatatgtaaaatctaaagaagtccaactcataggaacagagtagaaaataggttgacagggactgggggtgagggaaattgggggatttgggtggaagggtacatactttcagctatgagatgaatacattctggaggtcttatgtatagctagcttggtgactataatgtataatagtgtattgcatcctggaaatttgctaagagggtagatcttgtgatctcaccacacacacacacacacacacacacatacacacacacacacacacacggtaactatgtggtgatggttatgttaattagcttgatggcagtaatcatttcacagtatatacatatatcaaaacatccctctgtacacattaaatatatataatttatatttatgaattatgcytcagtaaagcttgaaaaaattaaaatgagtaaaatgtgtgcctgctgcatcactcacacaaaatctaccatctgaagtcaaactctgatatgaggggcttcattcaccatgccctcacctgcactggcaaatactgccagcatggagggcagagagccttgagatacccagaggggagccaccattacccacaccctccatgcctgagttcacagtcaggactgccagcacagagggcagagggcctggagatacctgaggggagccaccactacccatgccctccatacccaagttcatagtcagggtggtgcagtgcatgggaatggacaactggttaggagtcasgacaacttgctccagcccaggtctgcaactmagttgccagtgtcttccactctccatcaatgcacacaacctagacagttagtttctccctcctttccactcactaagcctttcacctctgatataaaggtcatctcattattttaatttaattttgagtgaaaaactaaaaactcattgagtgcctgccatgtttcagcactsgaccatatggtgggaatacttcaacaaatataacaggtgtagyctttattctcatagtgtttgcaatcattccattctcctcctaagcaaggttttcttgtcttggtgtggattgttccyctctttttgcacagtggctagcaggaagctctgaatctaacaagtgtcaggcaaccagattaggctatgcagtggtcaagaagctgaagagagaacaagtgacatcaggaagtaggagatcccctgtttcttaagagaagagtgctcaagtagctctgagctttaatttctttgttctccatcaggatcctgctatgagaattgcaataaatatctctgaaatgcattatatacagcacgtttgttctctgtaattgaaggatctcatttttgcatgcctaaatcaatagtggcactgacaatatttaaatgtggtgtggaatactgggtcagaagaccacagtaagatatcatttgyccttgcagcttaacattccaagatggacagtgctggctaagggatgggagacatggactcatctggctctcatctccacaccattgagatctagacaccrgtttccagtttcttttgaggctcaataaaaagaggaatgctttgtgtagtatatcccctgtgcttgcatggtcagaccagctagttggtacagaytgggtcacaatgacagtaatagcatggacttcctagctcaggtagccacatgctcacatggcccagctccttgaaaagttcccstcatagtccttggagttttgacaggttgtctattttgaatacaccaacattctcttgcctgcttcttccttctctcactaacggttactgcagtttcagtaggcactgtggtctccttcccaactgcatcactaggaggctgggtccctgatgcagcccagtcttgggggtggtgtgtgaagaaayggatggattcatcttctttgyggtcctctctagccccatcttaatcctgcttgcgtgcctgtatctcacatgatcctcatggcattgacctctgtttacttgtgtctctttgtcctcttgctagaatccaaagaatttcccaggagttggacttcattctgtattcagaattatttctcacttgcgttagcaaaccctttgcagctgagtcaaactagttgtttctgatggcttcatttaggatctcttccttcccagaaaactcttttctatttttattttttgaaaacacccaggctggartacagtggcacaatcatagcttaatacagccttgagctcctttgctcaggtgattctctcacattagcctcccaagcagctgggacttgaggcacaagccaccaattataggtaattttatttttaattttatttttagtagagacaagaccttgctatgttgcccaggytggtctggaatacctggcctcaagccattcttctgtctctgcctctcaaagtaatgggattacaggcatgagccaccacacccagccccagaaagctctcaaatattcatattgaatttcatacragttagcatatattttcaygtgtttaygctcagagatggctgagtcctgaaggtagacatagaggagggtgagcttaagaactttactaaagcacttacatttcacttgcacacacatagtgacaatactgtgctacacattttctccaattttgcagaaactttttctcttccacagatcccaactggaatttttctgagtatatgttgagtcttataaaaagagcattttaaaagtatgctcactattgtatttttttctaagtgaatgtgagcctctccagggcgccatgttctaagtttgctaggggcatagaatgaaatgtcgccatgctctccagagttgtgtagaatggcatccttgtcccttttagagaggcaccaaaatgcttaagtttccaaattactctatctcctctcttgaaatctggcctacctatatatatttcagactgtctccccatcagaatagcactgtaagaatttttaaggacagaaatgcgtgcttctttggcttcaaaacacctattcatgctgagtactagcagctttgtccccagtaaggtgtgtttgagctatgctcataaaagacgtgagttataagcataattcaattacagcaaagagactgcaaaaaggggaacagaaataatagagaaaaaaaccagataagccaagcccactaattcggggcggcctgactgtcccatccatctgtgaaacacttgatggcccatttgtctgggagggtgtgttgattaagaatttccccagatggcagcatggaggatgctatattacagctctctccttatatctgcagaagatgtgacaggaggagaaaattagtgctgaattcatgaaggaatcctgtcccataaggcccagctttttatctgaatccatcttgggggaatatcagttaaattgaaagtagatttaggaatacatatccactgaatgaaattataatatgagcagagacrctgacttaaaagaaaatccctgggacttggttcttatcttagagactgggacatggattttccatgtgtcagaaatagatcttccccacaatcagatttaaagatgaaataattgcaatattcttacatatgatgaaagggtatgagtgtatgagtactgctatggtttgagtgccttctccaaaactcatgttggaattcagttgtctttgtgayactattaagaggtgggactaaatggggcctttgggcagcaattaggataacataaggtcattaggctgagaccccatgatgagactggtggctttataagaagaggaataaagtcatgagcagatgcacccatgcctgcctaccatgwgaacacctcatgctatagtatggtgcagcacagaggcccttgccaggtgctggtgccatgcttttgaacttggtgacaacaagactatgagctaaataaacatctatttttaaaaataaactacccaatctgtgctattcagttatagcaacagaaaatggactgagacagaaaattggtactgagatgtgggattgtcactataaaaattcctgaatatttggaggtagtttggtattggrtaatgggtagaaaatggaagaatgtgaagcaacaggctcagaaaagcgtgttgcatagtggcagaagcagaggattaggggtaattcttgtgaagattcataagagacaagaaaatgagggaaagtcaggaacttattagagagcacttaagtagtcatgaccagaatgctagtagaaatgtgtacaggaaaggccattctaacaaggtctcagatagaaataaaggtcatccttgttataaagcaggaaagaacttggctgcattatgtccatgtcctaggacattatggaaggtggaacctaagagtggtgagctgggccaaaaaaaaaaaaaaaatctaagccacaaagtgttcyggatactgcatggctgttcttgaatgcttacagtgagatatgggagcaaagagatgatttcaagcagaataataattaaaatggaagccaagtataaaaatttggaaaattcacagtttggcaatgtgaagaacagaaaaacaagttagggagaacacagcaagggtgtggctgagtgactggtcactagagatgagcaggaatagaagggaccaggtgctaatcattgagaaaaaggggaaacagtcctgaaggcatttctgagatcatygatatggcccctcacrggcccagagctctaggagggcaaaatggttttgcgggtctggccaggggayccctccatgtctcactgccctgtgccacctcagagctctgctcactgcattctggtgcagcactttttagccccagctgtggctcaggcagccccagttgcagttcagaccaccattgcagaaggcctaagccataagccttagcagtgtccatgtggagctaatactgcaggagtgcagaatgcaagagctacggagacacagtttcctccatctagattccaaaacctgtcatagaaagcattcaggcccaggcagaaacctgctgcaggggcagagctgccatgctgagttcctaccagggaaatgccaaatggagccatcggagtgggaccaccaccaggacctaagaagtatagagctaccagcatgtaaatccaccctgggaaagcggaagcatgggctgaacccagcaaagtcacaggggcagggctgcctgaggcagtgggggcccatccccactccaaccaggaagtggtatgagatttaatgttgttcaccctgttgggttttggacttacttggagcctgttactcatttcttcttattactcccttttggaatggaaatttctatcccatgcctgtcccactaatgtattttgagcataatttgtttgacttcccaggctcgcagctgaaggaaattcatctcagaataaattgtgctttcagtctcactcattcatgatttaggtgagactttggacttttgagttggtgctggaatgagttaagactttggggctattggtatgaaatgaatgtattctgcatgtgagaaagacatggattttggggccagaggcaaaatgctatggtttgaatgtgtcctcccaaagttcatgtgctggaaacttaatccccaaatgcgtatgttaatggtatttgcaggtgggggcttttggaggtaattagaattaaggtcatgtgtgtggggccctcatgatggcatagtggctttataagaagaggagagaggggctgggcatggtgacacatgcctgtaatctgagcattgtgggaggccaaagtgggcagatcacctgaggtcaggagtttgagatcagcctggccaacatggcaaaaccccatctctactaaaaatacaaaacttagctggatgtggtggcacacacctgtaatcccaagtactcaggaggctgaggtaggagaatcacttgagcttgggatgtggaggttgaagtgagcaaagattgtgccactgcagtccagcctgggagacagagagactccatctcaaaaaaaaaaaaaaaaaaaaaaaaagagagagagagagctgaactagcctgcctgctcttgccctctgaaaatgtgatgccttccaccatgtatgatgctgtaagaaggccctcaccagatgtggaccctcgaccttggacttcccagcttctagaactacaaatatatatatttatattaatatatattaaatatatatatttaaatactactcagtgtgtaacattctgttagagcaacagaaacagactaagtatgtaggtctgaaaaacaatctgacaagtgtctagccttcccaggtgtctctaggttagctcttgtttcatacacacaaatgtagttatccatgcatgcaaatgattgtgttggagatgaagtcattcatttgatcctattaatttacatgtatgtgtataaacttgtacaaatgacttttattattatatgyatgtatatgtaaaaataattcccccattattgccagtcttttgttttattattatcatttttaacctctttatttttccagatgaacttaaggattatttcataatgtgtccccawttcttattagtattataaaaggaatcatattaaatctataaatgatggtgggactactgacatttttttcattcaacttcyaatttagggaaacagtatagtattccatcacatttacccacccagatttattttttacccttttgcattctgctatatgtccaggaagctagtttttattaatayactcaygagttcccttgccctccaactctyaattaggtgcagcccatgtacaggtctgacaaggactgggaggtgggagggaagtgagatttatatcccagctttcctgataatggcctttttttttttgagatgtagtcttgctctgttgcccaggctgaagtgcaatggcgcaatcttggttcactgcaaccaccgtctcctgggttcaagcaattctcctgactcagcttycggagtagctgggattacaggtgcaagccactgcacccggctaatttttgtatttttagtagagatggggtttcgccatgttggccagggtggtcttgaacccctgagataacaggttgttttgttagccacttttctcagtgccccccttgttttgtaaattgttttttttttgttttttgtttgtttgtttttcccatgctcctcaggcctagagctggtaacagcttcctggtgttgcaagtcccagagtgcatcactgtttcttacacttgtgtttgtgccccttactttcccatactttaattagtcttttcattaaattcttaattatccgattagcgtagacacctgttttcctctgggaccctgactaatatagtacacctctttcttcccactttcacctatactcagcatagtaacatcttgtcatattattttccatcttcaacatgaacatttttgttagcttatttctaaatattctatatgcatgttactgttaatacattgggattcttcttcctttatatttcctgaatagttattactattgcaaaagaaatctttagagatgtttctgtttattttactttgtattctgaaaaatagctggcatttctgttttgttactgccggtcaagtaatatatatcttgtgattctcattaataatgctactgaatattagtttgagatagtcataattttttcttatatttgttttattgatgtagtttttcactgtatttgtccaagaaattasctctaactgctgaaataaaaaggcttttgaggctggacgcggtggctcacgcctgtaatcccagcactttgggaggccgaggagggtggatcacaaggtcaggaattcaagaccagcctggccaagatggtgaaaccctgcctctactaaaaatacaaaagttagttaggcgtgatggcgggtgcctgtaatcccagctgctcgggaggctgaggcagagaattgcttgaatctgggaggcagaggttgcagtgagccragatcgcaccactgcactccagcctgggcaacagagcgagactccgtctcaaaaaaaaaaaaagaaaaaaaagaaaagcttctgtaatttcagtggtttaacacaataaaggtttatttcccactcaaaaacagtccaaggtcagtcccgcagctcctcaccatcatgtagctacatcacctggaacacaacttctcaaaggttatcaggcagtgaagaagttagagaagttagagaatcctatgtgtagattattttaagggccaaatctggaagggatttttaaaaattacttctacttaatcgcattgcctggactaaggggaagtggaaggtatagaaaacacacggagtgttgggtrtgagcttacagtgttttctataaaagtgcccctctaacagtgatctcataaagtgcactgagaatagttgccaaagttttgttaagagctttttgggcagctattgactttatataatgtttattagattactgatgttcctggactgtgcacctgtggacaagttattaaaattatctgtatctcttatatctctgttcatttcattgttcattagagataacatcaactccacttaggaatcttttacattaaaatttttttcttttaaaaaaaaaaaattttgagagacaggatcttgctatagtgcccaggctggtctcaaacggctggtctcaaactcctggcctcaagtgatcctcttgcctccgcttcccaaagttctgggattacaggtgtaagccactgtgtctggccaatcttttaaattttaaatggattaatacaagtgaggtacatatacaagtgtccagcatatgtaagaaaaaaatttagcataataagtagtatttattgtattactattataaaatggttctgatttggagaataacatgccactcttttaatatactgatgttctatttgttaatattttaaaatatttcatctatattcatataattattaaatgttaaaaatatgccaagagttttcccttgagaaaagtcctagctatgtaactaattccctataatacatagaattatatgcatagtgcttacatttttgtcactttctaaataaactagcaacacagtttttatttcctactcgaataaaaaattgcctagaagagcttttaccttggccagggagatttgggcattgcctctgctctcaagtattttccaaaacttactctggagtgataaacaaatgtgatcactttttaagtgttttatgacaagaataactgggttaatgtgtgtaatctctaggtatttttctagcaatttaaatcctctaataggtatacattttcttgctttaaaggaaaatttataataatgggcatgatcttcactaaaattgtggttattggttatgttatttatttatttatttaagacagaatcttgctctgtcacctaggatggagtgctgtggcatgatctcggcttactgcaacctctgcctcccgggttcaagcaattctcctgcctcagcctcccgagtagctgggactacaggttgtgtgccaccacacctggctaatttctgtatttttagtagaaatggggtttcactatactggccaggctcctctcgaactcctgatcttaggtgatccaccctccctggcctcccagagggctgggattacaggcgtgagccaccagaagtgtggtttttattgctagaaagagaaaacacactctaagcctagactgcattatttccacggtattttccagttcagtctctccagcgtccttctttacatccatggttctaaccttcctgtttccaaatcccccaaacctgtttttttcttattttctactttatttctgggaattggagttatgggtggaaacagaggggaagggtaatgaaatagttatgaccctacttattggatgtgggggcaggaatgtgtcttcatgtcttccgtaggttataattattttatatctgtgacagaagattctgagaataattagatcaaaatctcttatcatctgtgccctaacttgtcataatgccttatctgaatgctccatctgagctttaattagtggacatttgtcctgatttctggtcttaattctaaatttaatggccaggcatggtagctcatgcctgtaatcccagcactttgggaggccaaggcggacagatcacgaggtcaagagagcgagaccatcctggccaacatggtgaaaccccgtctctactaaaaaaatgaaaaattagccgggtgtggtggcaggcgcctgtaatcccagctactcgggaggctgagacaggagaatcgcttgaaaccaaaggcagaggttgcaatgaaccaagatcacgccactgcatttcaacccaggtaacaacagcgaaactccgtctcaaaaaaaaaaaaaggtgggagtagtggtattaatttcagacagagcagacttcagtgcaaggaaattaccaaagataaggacaattacacaatgataaaggggtcaattctctgaatagacatgaggattcttcatgtgtgtgcacctaaagaacagagtatcaaaatgcaagaggtaaaaactcagtgtttcaaggagactagattaatccatttttttagttgaagtctttaacactcacatcagatatagacagatatagaaaaaagaaaaccatcaagtgcatagtgaaacagcatcatctatccactaaacatcatgaacattcatagactactttatccaacacattctgatcaagctcacgtggaagagttaccaatatagacaacattctgagccataaaacacacattaacaaatataaaaaaatgaaaatcatacaatgtatacttgcagacaacaatggaattacagtagaaattaataacaaaaagatagcaagaagacttcraaatacttagataataaacaacacccttataactaataggtcaaagaagaaatctcaagaaaaatttaaaaatatttctaatgaaacaaaaagcacaacttatcaaatgtgtgggatgcagcaaagcagtgcttagaggaaaatttatagcattgattgcatacaytaaaaataagatatayaaccaataatctaagctcccaccttaataaactagaaagggaatattaaattaaatatgaagaaaaaaattaaaacataatamawattttaatagaaataaatgaaattgaaaacagaaatactataaagaaaattaccatcagctagggctgttttttttttttttgcttttttcttctaataacttattttwtttattttttagtttttagttttttaccacttttttwattattattattattatactttaagttctagtgtgcctgtgcacaacatgcaggtttgttacatatgtatacatgtgccatgttggtgtgctgcacccattaactcrtcatttacattgggtatatctcctaatgctatccctccctcctccccccaccccatgacargccccagtgtgtgatgttccccaccctgtgtccaagtgttctcattgttcaactgccacctatgagtgagaacatgaggtgcttggatttctgtccttgcgatagtttgctcagaatgatggtttccagcttcatccatgtccctacaaaggacatgaactcatcctttttttatggctgcacagtattccatggtgtatatgtgccacattttcttaatccagtctatcattgatggacatttgggttggttccaagcctttgctattgtgaatagtgccgcaataaacacacgtgtgcatgtgtctttatagcagcatgatatataatcctttgggtacatacccagtaatgggatggctgggtcaaatggtatttctagttctagatcctggaggaatcaccacactgtcttccacaatggttgaactagtttacagtcccaccaacagtgtaaaagtgttcctatttctccacatcctctccagcacctgttgtttcctgactttttaatgattgccattctaactggtgtgagatggtatctcattgtggttttgattcgcatttctctgatggccagtgatgatgagcattttttcatgtgttttttggctgcataaatgtcttcttttgagaagtgtctgttcatgtccttcgcccactttttgatggggttgtttgtttttttcttgtaaatttgtttgaattcattgtagattctggatattagccctttgtcagatgagtaggttgtgaaaattttctcccattgtgtatgttgcctgttcactctgatggtagattcttttgctgggcagaagctctttagtttaattagatcccatttgtcaattttggcttttgttgccattgcttttggtgttttagacatgaagtccttgcccatgcctatgtcctgaatggtaatgcctaggttttcttctggggtttttatggttttaggtctaacgtttaagtctttaatccatcttgaattaatttttgtataaggtgtaaggaagggatccagtttcagctttctacatatggctagccagttttcccagcaccatttattaaatagggaatcctttccccattgcttgtttttctcaggtttgtcaaagatcagatagttgtagatatgcggcgttatttctgagggctctgttctgttccattgatctatatctctgttttggtaccagtaccatgctgttttggttactgtacccttgtagtatagtttgaagtcaggcagcgtgatgcctccagctttgttcttttggcttaggattgacttggcgatgcgggctcttttttggttccatatgaactttaaagtagttttttccaattctgtgaagaaaggcattggtagcttgatggggatggcattgaatctataaattaccttgggcagtatggccattttcacgatattgattcttcctacccatgagcatggaatgttcttccatttgtttgtatcctcttttatttcattgagcagtggtttgtagttctccttgaagaggtccttcacgtcccttttaagttggattgctaagtattttattctctttgaagcaattgtgaatgggagttcactcatgatttggctctctgtttgtctgttattggtgtataagaatgcttgtgatttttgtacattgattttgtatcctgagactttgctggagttgcttatcagcttaaggagattttgggctgagacaatggggttttctagatatacaatcatgtcgtctgcaaacagggacaatttgacttcctcttttcctaattgaataccctttatttccttctcctgcctaattgccctggccagaacttccaacactgtgttgaataggagtggtgagagagggcatccctgtcttgtgccagttttcaaagggaatgcttccagtttttgcccattcagtatgatattggctgtgggtttgtcatagatagctcttattattttgagatatgtcccatcgatacctaatttattgagagtttttagcatgaagcgttgttgaattttgtcaaaggccttttctgcatctattgagctaatcatgtggtttttgtctttggctctgtttatatgctggattacatttattgatttgcgtatattgaaccagccttgcatcccagggatgaagcccacttgatcatggtggataagctttttgatgtgctgctggattcggtttgccagtattttattgaggatttttgcatcaatgttcatcaaggatattggtctaaaattctcttttttggttgtgtctgtgcccggctttggtatcaggatgatgctggcctcataaaatgagttaggcaggattccctctttttctattgattggaatagtttcagaaggaatggtaccagttcctccttgtacctccggtagaaagaaacagctatttttcaaaagaaaacatacaagtggccaacagacatatgaaaaaatacttaacatcactaatcatctgaaaaatgcaaattaaaatcactatgagataccatctacaccagttaaaatagctattattaaaaagccaatagatgctaatgacaatgtggagaaaagggaatccttatacatcactcactggattataaattagtacaaactttgctgaaaacagtatggagatttctcaataaactaaataaactaaaaataaaactacaatcagattaaaagataaatcattatatctaaaagatacctacacttgtacatttatcacagcactattctcaatagcaaagatgtgaaattaatctaagtgttgatcaaaagatgattgaataaagaaaatgtgtacatgttgtgtgtgtttacatgtgtatgcccaggactacagctagcctagtagacgaaagatctctacaaggagaaatgcaaaactgctgaaaaattatcagagtgggtatacatgtatatatgtatatatacacacacacacctatatacatatgtgtatatatacatatatgcatatgtgtatatacacacatacatgtatattggtgtgagtgtaaatatatgtatgtatatatgtgtgaatgtgtacatatatgtatatacatacatatacatatacacatacatatgtacatacatatacatatacacatacatatgtatatacatacatatacatatacactatatatgtatatacatacatatacactatatatgtatatacatacatatacactatatatgtatatacatacatatacactatatatgtatatacatacatatacactatatatgtatatacatacatatacatatacactatatatgtatatacatacatatacatatacacatatatatgtatatacatacatatacatatacacatatatatgtatatacatacatatacatatacacatatatatgtatatacatacatatacatatacacatatatatgtatatacatacatatacatatacacatatatatgtatatacatacatatacatatacacatatatatgtatatacatacatatacatatacacatatatatgtatatacatacatatacatatacacatatatatgtatatacatacatatacatatacacatatatatgtatatacatacatatacatatacacatatatatgtatatacatacatatacatatacacatatatatgtatatacatacatatacatatacacatatatatgtatatacatacatatacatatacacatatatatgtatatacatacatatacatatacacatatatatgtatatacatacatatacatatacacatatatatgtatatacatacatatacatatatacatatatatacacttccagaaaaatgcccaggaatacagctagcctagtagatgaaagatctctacaaggagaaatacaaaacactgctgaaaaataatcagattgggtgtgtgtgtatgtatatacacacacctatatacatgtatatgtgtatrtacacacatgtatataggtgtgtatatgtacataggtatatatgtgtgaatgtatacatatatgcatgtatatatacatatatgtatgtgtatgtatggtcacagcrcacatatatgtatatacatacacacacacacatatatwcacacacacgcacaccatacaatagtactcagtcataaataagaatgaattcatgtcttctgcagcaacatgaatggcactggaggctatatatcccaagtaaaataactcagaaacagaaaataaaatatgcatgttcttacttataagtggaagctaagtgaagggcacacatagacacatagagtggaataacagacactggagactacggaaggcaggaagatgagaggtgggcaaaagctgagaagttacctaacagatacaatgtccagtattcaggtgatgggtacactaaagcccagactccatcactatccaatatatgcatgtaagaaatctgcrcttctacccactaaatctttaaaaataaaaaagaaagcatgcttatatttgtcttttttacatttaaacttttagatacaaagggcaaatgtgcaagtgtgttacgtgggaatattgagtaatgctgtggtttggagtgtggatctcatcacccaggtagtgagcatagtacccaataggtagttttttaacccacccccacttcctccaccctctagtagtccacagtgtcaattgtccccatattgatgtctgtgtgtgctatagggttagctcccacttataagtgacaacatgtagtatttggttttctgtttctgtgttaatttgtttaagattatgatctccagctccatctatgttgctttaaaggatatgatctcagtttttatgtctacatagtattccatagagaatatgtatcatattttccttatccaacttaaaattaatgggcacctgagttgactccatgtcttcgcaattgcaaatagcatagcgatggacatacaagtacatgtgcctttttggtggaataatttattttcttttgaatataaacccaatcatgagatttccaggtcaaatggtagctatgttataagttacttgagaaatctccagactgctttccagagtagctggattaatttacattcacagcaacagtgtataagcatttccttttctctaaagccttgccagtatatgttgttttttgacattttataaatagccattttgactggtatgagacggtatctaattgtggtttggattttcatttctctgattattagtaacgccgagcatgttttcatgttttttggacactcgtgtcttttcaaaagtataggctcatgtcctttgcccactttttaatggaattaatttttgcttgttgatttaagttccctataaattctggaaattaggcctttgttagatgcataatttgaggatatcttctcccattgtgtaggctgtctgttcgctctgtttatattttyttttgctgtgcagaagctctttagtttaattaggtcccacttgtctattttyggttttgttgcaattgcttttggggacttagtcaaacaattttctgccaaggtcaaataaagaagagtatttcctaggtttttttccaggacttttaaaacttgaggtcttacatttaaatctttaatccattctgagttaatttttgtacatggtgaatggtaggagtccaccatcaatcttttgcatatggctagtcagttatccagcatcatttattggatagggggccctttcttcattgcttgcttttgttggcctttttgaatattagatggtttctagctgtgtgtttttatttctgagttttctattctgttacattggtctatgcgtctgtttttgtagcagtatcaagctgctttggttatgatggctttatagtagagtttgaagttgagtagtgtgatgctttgttctttttgcttgggattgctttggttcttggggctcttttttggttctatctgaattttagaatagtactttttctaattctgtaaagaatgacattggtagtttgatagaaacagcatttgaatctgtaaattgccttgggcaatatggccagttttatattgattctttttatccatgagcatggaatgcttttccatttatttttgtcatctctgatttctttcagcagtgttctgtatttctccttatagcgatctttcatctacttggctagctatattcctgagcatttgtgtgtgtgkgtctggctattgtctaagtggggttgtgttcttgatttgactctcagcctggacatttttggtatatacaaattctttgtacattgattttygtatcctgaaactttactaaagttatttatcagttctaggagccttttggaagagtctttaggattttctaagtgcagaatgataatatcagtgaagatagacratttgacttattcttttcttatttgggtgtcttttgtttctttcycttgcctgactgccctggcaagaacttctagtactatgttgaataggagtggtgaaagtgggcatctttgtctttttccagttctcaaagtgagtggttcgagctcattcagtaaaatgttggctgtgtgtttgtcataaatggctcttattattttgaggtgtgttctttcaatgactactttgttgagggttttatcataaagggatgttggattttatcaaaagtttttatgcatctattgagatagccatatggtttttgctttttatttttttatgtggttaatcacatttatcaatttgcatatgttaagccagccatacatttcaggaataaagcttacttgatcatggtgtattaactttttgctattctgctggattagatttgttagtatttcattgaggatttttgtgtctatgttcataatctatattggtctgaagttttcttttttcattgggtctctgccagatattggtatcaggctgatgctggcttcacagaaaaagtccatcctccttgattttttttgaaatcatttcagtaggattgatgtcagttcttcttcctatatctggtagaattcagctgtgaatccacttgatccagggctattttggttggtatgttatttattactgatttaatttcaaaacttgatattagtatatttgggatttctatttcttcctgacttagtcttgggaagttgggcatttccagggattatccatttcttttagattttctagtttgtgtgttatgaacacaaaggggttcatcacagtctttgatgatgttctgcatctcttttggatcggttgtaatgttacctgtgtcatttctgatggtgtattgtgtttatttgaatcccctctcttttttttcttaatctagcttatagtctatcaatctcatttatcctttcaaacaaccagcttttggttttgttgagcctttgtatggattttctggtctcaaggtgttttcagattttcattatttcttttcttctgctagctttggagttgtttgttcttctttcctagttcctttaagtacaaagttagcttattaatttcaaatctttctgactttttgttgaaggcattgaaggstactttcctcttaacacagctttggctgtatatcagagattttggaaagttgtgtcccatttttactaatttcaaagaattttatttctgccttaatttcagtgtccacccaggagytacttgaagtaagctgtttaatttccatgtatttgtgtagattggagagatcttttggtttccatttctattcttattgcactgtgattagaggttatgcttggtataatttcaatttctttaaaatttattgaagcttgctttatgactgagcatgtgggagaacttagaatacactgcgtgtgcagatgagaataattctgtggttgttgagtggagtgttctgtggatgtctatgaagtccaatttgtcaactgtcaatcttaattccagagattctttgttagttttttacttatatgatctggctaacactgtcaatggggtgttgaagtctccactattattgcgtggtagtctaagtctgttcataggccaagaggaagttgttttgtgaatctgggtgctccaatgttgaatacatttattgttatcattgtgtaatgccattcactgtccttctcaatttttattgatttaaagtctattttatctgacacaagaatagaaatctggctcttttttgttttctgtttgcagggtagttcttactctaccattttactttgagcctgtaggtgttattgcatgtgaaatgggtcttttgaagacaacagatggttagatctcatctttttattcaggctgccactctatgtcttttaaatggggtgttcagcccatgtatattcaaatttagtcttgaggtgtatgattttgatgctgtgatgttgttgttagctggttgtggtgtagacttgattgtgtagttgttttatagtgcctgtagctgtgcacttaagtgtgcttttgtggtagtaggtattgttctttctaatctatgtttaacacttctgttaagaaccccttgtaaggctagtctagttgaaatatattccctcaacatttgcttgtctgaggaagatcttatttctctgtcatttatgaagcttagcttgtcaggatatgaaattcttggttggaatttttttttttttttaagtatactggaaatagatcctcaatctcttctggtttacaaggtttcttctgattggtctgatgctagcctgatcgggaattgcccctgccgcttccctctagctgcttttacatttttggctttttgagtttgtttttgtttttttttcattgaacttgatgaatctaatgactatgtgccttggagatggtcatcttttatagtatgtggtgragcttctctatatttctcgaatttgcatgtcaacctctctagcaagattagggaaaatgttcatgaactataacctcaaacacattttccaagttgcttattctctctcctctctcaggaatgccagtgagtcatagatttggtctctttacataatcctatagttcttgaaaactttgttcatttttctcaattcttctttatttttgtctgactgagttaatttgaagaactggtcttcaagctctgagattcttttctcagcatgatcaattccactgttaatacttccaactgtattataaaattcttgtagttaatttttcacctcaagaagttcagtttgggtctcttttaaaagggctattttgtcttttagctctttatcaatttactgaattgcttgtcttccttgaactgagtttcaactttttccttgatctcaaggagctctcttgttatccagattctgaattccatgtctgtcacttcagacaattgattggttaagaagcattgctggggagttagtgggcttgtctgaggtaaaaagacagttttttttttctttttaaactgccagagttcttgtgcttattctttctcatctaggagagccagtattactttaactgtggtctaagtttagtatagtcagtttacttcactcctggaaaatttcagagggataaggctgcatacagaatgtttgttgttgaattcctgattttggtttacagaaggtgataattagtaaagttatttttggtgttgtcgtttgggctattttgcattatttggcacttgagagccatgggcagtagacaggttcttactcagatgcatggctcctttgtgcatcattgcatttgcagctgtgttctttagtctgtgcaggaaagatcaatatccacaattgcaaagatatagaaccaacctaagtgttcacttatcaatgagtagataaagaaaatgtggtatgtgtatatatatatatatatatatacacacacacacacacatacacacatacatgtatatgcaagtatatatgtatatgacggtatatatgtatatacgtgcatatacatatatgtatatgactgtatatatatgtatatatgtatatacgtgcatatacatatatgtgtgtgtgtrtatatatatatatagagagagagagcatgaaatactactcagtcataaaaagaaacaaaataatgtcttttgcagcaacttagttggagctggaggccattattccaaatgaagtaactcaggaatgaaaaaccaaatatcatatattctcacatataagtgggagttaagctatgaggatgcaaaggcatagagtgatataatgaaatttggggacttggtggggaatgttgacagggaggtgatggataaaagactacatattggatagagtgtacactgctcaggtgacatgtgcactaaaatttcaaaaattaccactaaagaacttacctatgtaatcaaaaactacctgtaccctaaaactcattgaaataaacaaatgtggtacatattcatcaggaaatactacacagctgtaaaaaatgaaataatgtcatttgcagcaatatggatgaagctggaggctagtatcttaagcaaattgacacagaaaaaaaaatcaaacattgcatgttctcatttataagtgggagccaaatcttagatacagatggacataaagatgggaacaacacaccctgtagaatccaaaaggagggagggaggaatgaggacaagaackgaaktcctattkggkactacgttcactgtctggatgatcggatcaatagaagtcaaacccttagcatcatacagtttacccttgtagcaaacctgcacatgtacccactgaatctaaaataaaaatggaaatttatatatttatactatttataaatatatgcgtttatatgcatataaatatataaattttatataaatctatataaaatatttcttatacataaaagtgaatattaacatttatatgagaaatatattaatatattaatatatttgtatatttgtatattagaaatatattaatatattaatatatttstcatatttgtayattagaaatatattaatattactattacattgtattaataataatcatattaatattcctcataaaattttatatatgaaatattttttcaatatctcaaaataacttaaacaaaagaattccataaagtgaaatataaaatgatctttgtcacaatccatcactgtttccagtgatggattcacccctaagtgaatattattgaccattcaaagtttggtgtgaaggtttgtggacttttataatgtttatatttctttaactttacaatttttagtcaaatgacaatatctgctgggcccttttacaatttaatgcatataaatcttatttaaatggctgttttataacatgttatgaataaggcatgcattatttaattcaatgctgcaaagaatgtttaggtgttcttaaggtaatattgtttcaaaggacacaaaaatatctgaattatttttcaaaccaattatttttaaaccaattatttctctataaaattaatttaaaggagctgtaggtacaaaaaggtaaaaaaaaagagacagagaaaagtaactttattattagatgaggctttgactcaggtttgaataaactagagatctggtctgaatactttggaaatctcctttttcttgtgatagtrgactgaaggagtmctgagtcaaagcccctttatcttgtttctcctcccttccccaagcatgattcttgaatataatcgacctcatgtctgcacctccaacagtgccatagggaaaaaattgtaagacacagagtgtgagggtgagaacaagactaactctccaagcctctttggtggtgttaatgcatagagaaaaggaataaaaacaatgaaacaaagagaaaaaggaaaaaaggaagagagagaggaggaggaggagaggggaaaacctgactccggtgtaattggaatactttaaaatattaatctctagaaataattcctttattctgtcctgaaatctaaccaatcacattaactttcaaggtggcaaaaatcaaagacatgagaaaagaaaggagcayggagaatccccctctccttgaggctaggttaccattccaataatttttaaatccatccctttctctcccaacccataggctctcctacaagccaacatcattcctacagcaacatctcaaactttcttttctccatatttagtttttgagaacccattgcctagcagtggtctgaggggacttatccaaaatatcctttatgaaaatcttttgatagctttccatttcctatagcaaaaatttcagcatagacaaatcagtcaaatgatacagcacattaaaagaatgaaagataaaaaccacatggttatctcaatagacacagaaaaaaacatttgaaaaaatctaacactcctggcaaattagaaatagaagaaaatttcctcaatatagtagaggccatctatgagaaactcacagttaacataataatcagggaaaactaaaacttttcctctaaggtcaggaacaagacaagaatgcccgctgtcaccacttcttttcagcatggtactggaagtagtaacgagagcaattaggcaagagaaaaaaaaaaagaaagaaacaaaagacatccatatcagaggacaagcagtaaaattatccctgcaaatagcaagatcctatacatagaaaacaaattccccaaaaaaatgttagaactaatgaataaattcagtagttttaggtacaacatcaacacaaaaatcagttgcacttctttacatcataatgacctacctgaaaagcagtcaagaaaactatccaatttaaatagtatttaaaaaaaaacacttaggaagatatttaaccaagggtttgaaggatctagacactcaacactataaaatattgatgaaacatactgaagacaaaaataaaatatgtatcacattcatgattaatattgttaaaattgccatactacctacagcaacatacaaattcaatataattcctatcaaaattccaatgacctttttttgaataaataaaaataattctaaaatatgtgtggaaacacaaaaagctctaaacagccaaagcactcttgagagagaacaaagttggaagcaacactcttcctgtttttagattatattattaagctatatttatcaaaccagcatgatactgacataagaaaagacatagcaatcaatcgaacagaataaagagcccataaataaacccacacatttaaggtcaatttattttagacaaagttgcctaggagacacaatggaaaaaggatagtctcttcaataaacgatgtttggaaaactggatattcacatgcaagaataaaaaaagagaagaagaaataaaaggaaaaaaaaggaaggtaggaggaagaaaaagaaattagactgtttattttacgccatatacaaaaatcaatttgaaatggattaaaggtttaagtgtaggatctgaaactgtaaaactcctagaagaaaacagggaaaggctccttgacatttgtcttggcaaagattttttgtatataccacaaagcacgggcaaaataataaaaaatagacaaatggtatgatatcaaactaaaaagcttctgcacagcaaaggacgcaatcaacaagatgaaaaggtaacccacagaataggagaaatatttacaaaccataatctaatgagaggttagtattcaaaatatatatggtactcaacctaatagcaaacaaacaaacaaacaaaaaacacccaaataaaaacaggtatatcttccgaataggcatttttttcaagaaaattaaaaaatcagtaacaggtataaatacacaaagatgcttgacatcactatcagggaaattcaaatcaaaaccacaatgagataccatctcacttctgttacaatggctattactaaaaatagtcaccaacacctcacaagagagaacaactgttgcagagcatgtagagaaagggaagtccttgtacactgttggtgggaatgtaaactggtgcagacatatgaactracatacagaggttcctcaaaaagttaaaaatacaactcacttctgagtatgtgtctgaaggaaaggaaatcggtatcttaaagagataatctgcactttatgtttattacgccattatttaaactagccaagacacagaaacaacctatcagtccacagagggatgactggatacagaaaatgcggaatatatatttaatgaaatataytcagccagaggaaggcagaaaccgccacctgtgaccttgtgtctgacctggaggtcgtcatgctaagaaaaatgatcccgacagagaaaggtaaacccaggattgygtcacttaactgtggactccagggagcgcgccccacgctccgccgccggcgccgcccactcgcgagtcggggagggttccggaagcgccccatctgccccaccctccggctccwacgtgcgtgmgcccagcgcgtgtcgccccgcagctgttcggcgcccaccagtactggggaggcagaggctgggccgcagccccgcgcgtgggcgccatctctcagcagccgcatctaggccgagccgggcaccacgcgaggcagcgcggaggaggcccccacggcggctggccgaggacacggagccggcctctgcgtgccagagaagaggctgctcgcgcgcgcccggggccacccgctgccccacggctgcgcgaggaatgagcaggcgccgaccccgggctctcggagcaagggtctctgctcggctccttcccacgctgcggagcgcggggctcggccgggcgcggcggggtcggtggcaactcgctcgggagcaggcacctggtgaactgaccagccgcaggggccgccgcgcctcccttgcctgcgcgcccagcttctcgggggccgcggaggaggaggaaggtgcgtccggacaggcgagtgcggcggcgacagcgacagcggctggccgggctcaggtacgttggacgtgactgcccggaggcagcctcggagctctgcccgtcccgggagcctgcctggcagcgtcgggaagcgcgggcggctggtcccttcttgctccttcccccagcgcctctgccttggcctccgggaggccggaaaccttcctccctgttttgagatttcggtggagacccttattttttccaccactaaggttaagagattctggaatggaaggaccagagatggtgaaccttctgcaattctcagagttagccagactcccttttggggcagaagaccacccttgagcacctccccaaggggcagctcctttgcagtgtgacttctctgatctacccctaggaatgaagagtcttctgataacccgatagggccctgaaagtcaaagggcaaacgagatctcgcaggacataagcttgtgatcgtttaagggggtggggggggggtcactcacgtttctgaatggaattggaggagcgtcaaagaggtgcctgtgaagaagcgcagcagtccttcaagtggagcaaaattgagttttcccatttttgccaagattttgaagacagttcaatgtatcgtgcatttgctgtaagcttcaagagcataaacgatgactaccccagccctgctgccctctccagacgtgggatcccacctctgaacctggggccgccctccccacatcacagcactaccttgagactttctgagaagacacttatttttaatgccttcatcaccctgtgtttgggggcattcttttttcttctaggcttctcaaaacacaaacgctttgatctgggtttagacgatgtgttaattcctcatgtagtagctggcaaaggggctaaaaaccctgaagtcttcctgatctatgcacccaattaacatacacacagagaagaagaagaagaacctctgagaaataaagttcgagctaatcatgacaagtccctggaagagacaaaagaaaaattgagaaagtcaagcagcctgggtgctgtggctcacacctgtaatcccaacactttgggaggccaagtcaggaggatggctttcatctaggagtttgagaccagcctgggcaacatgatgagaccttgtctccacaaaaaatcaacaaccagccaggcctggtagtgcccttttgtaatcccagctattctggggtctaaggtgggaggattgcttgagcctgggaggtggaggctgcagtgagccctgatggcactgcaacactcagccagggtgacagagtgagaccacatctcaaaaaaaggaaagaaaagaaaagtcaagcaaggaaatccaagcagaaattcagatagagaaaaatagggtccragaaatgaagacagagaacaagccactgccaccagtccttattccaaactttgtaggcatgaatggtggagacctggaagacaacataaaaaagaaaagggaaaaaaattaaagcatgaaacatgcctaggataattataggacatacagttgggggcataatgaactcagacctattaaaaggaaaggatgtgccactaacatttgaaaattcacaaatgggtgctaccgttgtagatgctttggataccctttatatcttgggacttcatgctgaattcctagatgtgcaaagattgtttaaagacaaccttgaggtcagtgtgaattcagagatgtttgtgtttgacgtcaacattcagtttattgaaggcctacttgcagcatatcacctttcaggaaaggagatattcaagattaaagctgtgcaactggctaagaaattccttcctgcctttcacacatgtactgggattccctggacaatggtacatttgcagagtggagtagggtgcagctgaagctaggggcctgcatgtagcagcattctggctgaatctggtacactgcacatggagtwcatccacctcagctacttgacagaagacctggtttactacaacaaggtcatgtacatgcggaaactgcttcagaaaatggattgtccaaacggtctttatccaaattaaacccaagaacagggtgctggggtcggtatcacacatcatttggtgatcgggagacagtttttatgactacttactgagagcacgtttgatgtcagataaaacagaccatgaatggagaaagatgtgtggtgatgctcttgaggctgcaaaaaaacaagaactcccatggatgtcttaatctttagtaaagaatggatcagtgggcacttggaaaacaagatggggcatctggcctgctttgctggggtaatgtttgcactaggagaagatggttccagaacagataagtctgtcattatttagagctggggtggaaattgcatatacrtgtcatgagtcatatgacagactgcattaaagctaggtcctgagtcagtcaagtttgatggtgcagtggaggttgtggctgtcaggctgaaaagtattatatcctgtgtccagaagtaattgaaaccgttggtacctacggtgattctctcacaatccaaaatacaggcagtggggcagggaacagcactggccattgaaaagtattgctgagtcagtggtggattttctggagtcaaagatgtacatttctctactcctacacatggtgatgtagagcagggtgtctttcttgctgaaacacttaaaatatttgtatgtgctgttctccagtsgtgaccttttacctttagactactaggtgtttaatacagaggctcaccctctgcctgtgttacatttagccaacaccacactttcaggtaattctgctgttggataaaagcagttccgaggaccaggaccagtctcacctgttttgttttacgtggaccactatagaatgtagtctgaaaacctagacctctaagtcaacatgatagtggtcatataagaatgatgtgtgttacagcaaagatcgcaattacttttacaccaccaagtactctacaaaccatatatattttaaatatatgtatatatatatatatataactatataaaactctatataactctatgtatatagagagttatatagagagttttatatttagagagagttacatatatttatacacacacacacacacacacacacacacacacacayayatatatatggtttgtagagctctgaagtctggaggctagacttcctaagagaaagccaagaatatagagcacattgcaggagttaagaatggcctttggaacctattatatattcctacagtggagcaactgtcaaatattccacattgtctcatttttctccattttagtaatgtaatgaactaagataaagaaaaaatatagtataactgcatcagtgacaagaagactcaaaaaacaaacagaagtgccaatccatgtctgaattttcaagttccctattggatgaccagactggcaaccatttcaaatcctgtttaatcggtttaaataaaatctatttcatttaaatttcatggttaagtttagtttcttctaggggcatgatctcacaaaaaatactctttaagtctttgtcttcatatgaaatcattaaaactgctatttgtcataaccactacctataagcctgagtttgagacttaattcaggtggttcagtcagtggtggtagcatgacaaaaagtgcggaaaaatgccacagtttgttgccttgaaacctgttctaaaagaaattcttggttttgctggtaggagattatttttctgaactaataaatctaccgagcaagttttatccacttaaatctcataataacgttaggagagtcatccaactcacaactttatttatgtgacttggcaaaattcacgatactattatgtagctctgaatttgtcttgataagctaaattacttttacaactcattaaagcaaaaacaaaacacagtgcaactttcttaaatattctatctgggatgatatcctttattatcttatcaggtgagtgtgccattcacaaatattttatgtttttaaaattttttctattgatctttatagaaatcaaaataattagaatagcttcaaaatcgttttcagtgataaaagtgttgaagtaagtatctcagggattttctcttaccatcagtaggttttgcattgttatttctttttaaagaaattactaattctttatattttggcaaaaaaaattatcagtaactatggtgtaagataaatatctaatgctcacgcattttctgtcacataaactgaagggactttttattgtttaatttagacatcgtccattgacattaataaaattggaaacagtataactagtatgatatttactctgaatttaaagattttgtctcattaaacaaagtttaatgagacaaaaaagttcatacaagaaatccaacttggaattctgaaggcttatttccgtatttgataacatttcttttcaacttagcttttagatttaagttgggaaaagatttaatgaatgaatacaattaaatattttccaaggttgatcatctcagaccacaaattattaaacagttctcacagcccagccaatgatgcataaatgacaaccactacaaaagtttttagtaaacatagaaaataaggatgtagagccagttacaataaagtctttaagagagtcaaattttaggacatattttgagattgtaatttttttactacttaaacctttaaattgtttaaatgataaaggtagatgaccataactttagaagagaaaagggaaagtacttggttctcaaaaaagccttgctaaaaatagcacaagcccacttaggaatcactaaaaaaaaaaaaggcaagaaagtttaattggcaaagacccagagaagctgtgcagatggcaatgaagtctccaaactcttaatttgtttataagaatgcagagtaaagaggccttcttggtttcccaggaaattctcaagagatgaggagatacaacctgtatctccaacggctctctttgtattactcagatgactggagttaagagaaggtagagaagtattcaagcagagtcagttcataagcgaagaatttgagagggttttctacacctctccctacgctccctaccttctgtggaatgacaagactggacctacaacagtactttttttttttttttttttgagacagagtttcgctctgtcacccaggctggagtgcagtggcgcaatctcggatcactgcaacctccgcctcccgggttcaagcagttctcctgcttcagcctcctgagtacctgggattacaggtgtgtgccgccatgcctggctaatatttgtatttttagtatacacagtgtttcaccatgttggtcaggctggtcgtgaactcctgactttgtgatccgcctacctcggcctcccagaatgctgggattacgggcatgagccactgcgcccggccctccatttttttttttttttcccttctctgaataccaaagacaattcaggccagctgcaagtgacttgccagtgttatgttttatttttgttacagatktttaacccgtttcccatttaggaaaaaataaagtgcatcttgctgccagcacggtattcttggggcaaacagaaaataggtaaatttcctccaagatcaatttttatcttatattctgcttagtacccatactttcttctcttttttacagctttttgcattttgtagaccttattactctggtaaaatactgcatttatcagaccttccgcaaatagcccagaaatgctcctcaaaaagttgacacctcacattgtgactttggcacaaatatgcagaatagatggattggttcgtgcataacaggaaaaaaataggaatgttaaacacccctctaccttctacatttatttatctttattttaaaataaaactttttgggttaagccagtttttttttttaattcaacttgtattaagttgtcaaaaccaagagaatgagaccctacctgaaaagaagtctcagcgcagaaaaacaagtcccccatcaggtggttcttacctgccggtggactgtgtgttttacttctaacacgacttattcccagcttcaagcagatggttatatataaaagtccaacctgggtattgaaagaatgcattctttttgtggagtattgactctgattctctatgatgtcatcttgtgaacccagggctttacttagtagattttaaccaaggagtttgaaatcttgattatcatcctctcatctgctccactctctgtcaaagtctttgtcaaaactccaagtttgttgataaaagattgtgctttcagttctcattataatgcagtttctccttaagcccgtatttctttgagtacatgagtaaatgagagaatgagtgaacaaacatttatgaagtatgtaatatgtgccaagcactgtgcctggcaccttaaagcattagaaagttttatgtgattccagtggcactttctgtatgagagcagtgtatacaattttacatgtttttcaatatgaatcatgttacagcattttaaattttatatttcatataaagagaaaaggtttataatacattttaaataatgtgtactatgtagtactaactataattgtggttaaagtcttgaaaaatgtcacagaagtgcttgatttttgatgcaactttgactaaaatatttactttagaaataaaaacatttttagtttgctatatcacttcaattatattattaaaatcaatgtttaatagaagtgctgcttagtttaaattcaaaaagcttttgtcacatcattggtgggtaaaacttgaagttgtaaattgtctttggtaggggtcctactaacagtcccatgctgttaaatataaagaaaaatataataaaatatttctaggtttcaaaaagcagtttctagtaataggattttaagttcttatttttttttagatttccttacactcaaattggatagctcctctctctctctctctctctctctctctctctctccctctccctcttccctttctctttctctatacctatctgtataattttttagttatacacaaaaatttttaataccattttttatttaacaaacacagttggtaactagttttggctgcacaaattctaagcagaatgtttgagtaacctgatatggttgggatatttctctcctccagatctcatgttgaaatgtgatccccagtgtcagaggggtgaggcctggtggaaggtgtttgagtgatggtatggatccctcatgaatggctcggtgctgccttccctatggtaatgagcaagtccctgctctgttagttcacatgagagctggtggcttaaaggagcatggcatctctctggctccctctcttaccgtgtgacaaacctgttcccttttgccatctgccatgagtgggagcttcctgaggtcctggcctaaagcagatagtggcactatgcttgtatagcctgcagaactgtgaggtaaattaacctattttaaaaataggggctgagcctggtggctcatgcctgtaatcccagcactttgggaggcctaggcaggcagatcacttgaggtcaggagtttgagcctggccaatattgtgaaatcccgcctctactaaaaatacaaaaattaaccagacatggtggcgtgctcctgtagttccagcaaatgggagactgaggtgggagaatcgcttgaacctggaaggtggcagttacgtgagccaaaattgtgccactgtataccagtggtgatagtgagaccctgtcttggaaaaacaataaatcaataaaaataaaataaattacccagtccgaagtattcctttatagcaacacaatattgactaatacaaaccacatatgatatggaaatatatcaatccacttactctggctcaagaacattggtgaagatgattttgtgttacttcagctcattcagattatgatgaagatgctctttttaatttacaactagtcagaaagcttttctgcaaagggcagataataaatattttaggttatatgagctatacagtctttcttcttactcagttctgctgttgaagtgtgaaaacagatacagatattatgtaaatgaatgagtatagctgtgttccgataaagctttatttacataaacaggtaaaggactgcatttgacccacaggtcataatttttaccccaatcccaagattaagtagtgtaaaaccctttagccttctttctgcctcttttctctgtgctgtaatttacataattcattttaaagcaaaagaagtgactgtggaatataaaacaataaaattgagttcttagaaataaagtagaatggtagttgataaggtctaggggcgggtcaaattgggagatgtaggccaaagtatacaaacttaccattctaagataagtaagttctgagaatataatgtaaagcatggtgactacagttaataatactaaattatatactttgaaattttctaagagtagaccttaagcattctcatcaaaatgaaagaaaaaaattaagtccttgaagtagtgaatatgataattaacttgactgcagcagtcagttcacaatatatatttacttcaaatcatcatgttgtacattttaaatatacgcaattttatttgtcttatttctttgcctcaataaagctaaataaaaataattgtgataaatcacattaacagaataaagaatgaaaatcgtgatttttttcaagatggcttactagagacat

SEQ ID NO: 93827 - DNA, 18458 bp, Homo sapiens
gcaagaaaataaagtcagttacagatttcacaagtatcttgtacaccagtctgtaatttttaattagaattagctaaaagacattgtacctttcgcgtgtatgactgagcataacagtgcttaacagtgtctttattaagtgaatgcctgaaagtattcaacattaaattcaatttatttcacattaatgtttgcaaatacatcatcaattcttacatatttcaaatcaacttcaagtacagaaggcttcctctcaaataagtctcctgaggtgacataaagactgaaagaagcctatgacttgagtccaagtctcttaaccaacaatcaccatatcgtcactggtgaactcatacgtggggacttcaaggttgagaggagcaggacccaatctgatcctgccagatgcatcatagtgtgacccatggcaagggcagtaataaccaccaaaatctcctgcatttgcaatgggtacacaaccaagatgagtgcaaacacctatcaggataacccattcaggtttctttactcgatctagatcatgctgtgggtccctcaactgtgataattcaactgcagcttcctgctcaatttccttctgggttctatgacgcacaaacaggggtttgcctctccatttgaaagccatgttcttgccttctggaatatcggataacttgatttcgattttcgccagggccaacacatcagcagaagcactcatgctggaaacgaactgggtgacggcattcttggcagcatatgcgacacccacagtagttactccagttaccaaataggagaaacctttcctagcctcgctgctttctcttgaagacttcgtactatctaaaacttcaaggcggcggtattcagagaagtcaggcaccttgatgtctgtgtgggaataacaaacagaagcagggactgcaagacaaacagaaggttaaaaaacacaattagatgagtatcccgaagggagtatatatcaggaaatagccctttatggattcacaggtaaaaaatcaaattctaaaaatgtgaaatatggcactcactgggtctcagaaatagtcaaattggcggtgctagcatataaaatcttaaaaatgaaatgaagtgaaccaccacctatcatactggtatgaaatcacaagatactatttgtaaattgagctccccctagttggttgaacattgctgattcaggattcacaacacctcagtgcatcatgctaaaaacgttaaacagcaaaataaacagtaataactcaaagtttccgaaaattcaactgccaagacttactatataaatcatgctaaatacctcccatactctctggattagaaggacaccctaaaactcatctagtccacacagtaagttgacgtgtgatcaccttattaaggcaaatgtctgccccttatagtccaatctatgttctcggaaaaaactgttaattcataaaataataatgatataataaacattctgtgaactgtataactctgctgcagaaaaattagcgtttctattttatactctagtgtataaattagtattactttaacttaaaaccactaataggcagagaaggacatccttatcagagctctcaaaataaaatgaaaactgcaaaagaactaattatttcaatttagcaagggaaaaaaagggcaaaattttcatatctccccctcttcagtaaagggcaatagttactgtaaaagtaggggtattatcttcccttttcactgctgtagttctctcaactggggcacttctagtctaggccataaaagagctcaaatgaatgttaaacaaataattactatgtagtactttgggagcaaggagtttctttggtagtttaaaaaacaaaaacaagacacagttacatccctctctccaatactgaccaaaaaaaattttacctagtaccacttttaggtatgtttcaggaagcaaacctctttgcaaattgtatattcatcttaagaaatttgccacaaagtttcctttttaaaaaaggggacactaaaaattcctcttttagaaaatgtgtatccaaaataaagatcttttatgatgcatttttattgtaataaactgcaattctaccttgctctactaggatatcatcctaatatactgtacttccttgagtagtcaaacattacaatatggaatacctgaactgcttttcacatgattctcaaggtcaataactttatggaagccagaagtattcaaacaataatgaaacctaccaaaatcactctatgtgcttttctgactaaatcatttcctggagaagaccaggacacagataatggcaacttgagactcacatcccagaatctgtggagtcaaagtgacattacatcctatactactactctaacaaataaatgctaacctgccagtatatactggcatttggaattaagcataaattacttgctcctagcactacctgggattacagaaaagatgagcttcctccctaaaagataaaggaataaaaagttcatacttctacattaaaaacagtatccacaacccttaacagtatacaaggaaatgtacaagaaaactcaataaaatggctttgcccttctcattcagagatttggtggcaaaagtctcctcccactctatctagctggttacactttagtaggctacaccaccaagaatcctttcggaaattaaactgccctgttgcaaaaatcattctccaaatatttacatgagctgcattaggtctgactttcagtaagatgctagatttaattctaacctgaagcaaaatcaaatacttaaaggagaaaatttaaggaattttaacaaaacaagttttattttaaggttgagctccaatgcgccttggaaatctgcatgaaaatagtacaaccttcctctccaattcaagaatcttctccagatccaacccctccactcccataagccatcctgccatgaaccatctagacagactataatgtgaacttaaattacaggctgaaatgattacagaaaaggtttttgccttatggttctacattatttgcctgtttctaaaaatagtttctctaagtcaggtaaacctccaatttttttttttattatactttaagttttagggtacatgtgcacaatgtgcaggttagttacatatgtatacatgtgccatgctggtgtgctgcacccattgactcatcatttagcattaggtatatctcccaatgctatccctccccctccccccaccccacaacagtccccagagtgtgatgttccccttcctgtgtccatgtgttctcattgttcaattcccacctatgagtgagaacatgcagtgtttgttttttgtccttgcgacagtttacttagaatgatgatttccaatttcatccatgtccctacaaaggacatgaactcatcattttttatggctgcatagtattccacggtgtatatgtgccacattttcttaatccggtctatcattgttggacatttggattggttccaagtctttgctattgtgaatagtgccccaataaacatacatgtaaatgtgtctttatagcagcatgatttatagtcttttgggtatatacccagtaatgggatggctgggtcaaatggtatttctagttctagatccctgaggaatctccacactgacttccacaatggttgaactagtttacagtcccaccaacagtgtaaaagtgttcctatttctccacatcctctccagcacctgttgtttcctgactttttaatgactgccattctaactggtgtgagatggtatctcattgtggtttacaggcaacctaaaaattgggagaaaatttttgcaacctactcatctgacaaagggctaatatccagaatctacaatgaactcaaacaaatttacaagaaaaaaacaaacaaccccatcaaaaagtgggcgaaggacatgaacagacacttctcaaaagaagacatttatgcagccaaaaaacacatgaaaaaatgctcagcatcactggccatcagagaaatgtaagcctccaattttttgaagaaactttagcaacacgacgaattccaaagatgcttttcttttgctattgaaatgttctccttccttccttctcacctccaggtcccaaggatgggctagggtactctacacctgccatggacagtttcttcaaaacccactgatgctccttaacaaatattcattcacaaatactttgcactaactgtatacaaaatccgacgttgtgaaagatagaaaaataaagaagatattaccttctctatgcccttaagcccaagggtggaggagttaccaataaacacaatacagagtgtaaagtgtatgtgctacagagacagacaaatcagcaaataaaaactttattcacctgatccttaactgagattgaaaagatgggtaaggaaaacatatggacatgtagcaacttagtggaaggaccatgaagaaagtgcagagcccagggtgaatgaagacagagtaaaaagaaaagtggcgggcaatttggttagcgtgtaggggaagagtcacaaacagctatcagtggagccaggctggtaacagaatgaaacacgcagacctggtaaagactgtgacaaactggagaagaccacttgctccaactgcgggggcggccactacacagcacactatggaattttccccagtagaaactagatcccagtattaccggcttccagcattttaagagatgccattagtcttcccagtttttttgaaaactacacagcctgcagacacactgcccacaggctgccatttctctatctccgatacagggccaagtaaagatggaaggcgaggcaaagaagataaacggggatctaaggacagagggtgtggaatagcccctgcgaagagctcagtggctacgacaattcgtcttgtcaaatccctgctaccacatgtccacaccacggatcctggtgcgagtcattctacctcgtctgttttctcatctgtaaaatgtaaatgtcgtcaatctctgcccgtccttgacgactgattatgttgtgacactacactgtaactgaccttgtgtatgttttttttgttttttttttggtgggggggtgatgaaggggaaggacatgaagggatcggtagtggtgagaagaccaacttcccaaatattagtaagtttccatttcttaagcatgtaagtgcccaaactgtgctaacggctttacgtagaattcctccacctaagcctcacgacacccctacaaaattgataaagatatgaatccatttcacaggaagtacgtttagaaactcgcccaaggtcaaacgacctgcaagcaacaaaacccctcagaggtggctggaacagcgggactacagagctcgtgaactcggccgaggaggaaccaggcgaagccggcggacgcgagtccaggccggccaccagaaagacgccccgagcccgggggccaggcccagagttgcggaggccgcccagcccgacctgattcaggctccgctcgcgcgcccgcggccgctccctgctgggggccggaggagcgggcaccgagagacccccagccctgctcgcggccctcgccccggctcaccattgaggcccacggaggcgaccaaaggccggcgcacggcctggccgctcagcgactcccggctgaggaagggccgcttcaggtccaacacaggctgctccggggtggcgggcaccgtggcctgcaccaagggccgcagcgcgcccgccaccccgcgggacgtggccgacaggacgggcgcgaacgggcccgagcgggctgctaccgacaacatggcgacagccgctccaaccgccaagccggtcacagggacgaccttccaaccacggcgcaggcgcgaggaggcgcgggacgcgtgacgacagcgcgccgccggaaaggaaattctgcagtcctgcagggcggggcaaacytggagaggcgctgcgtcgggggacgrggctacaagccgtcrctgggggcggggcttgcggcccacctgtaggtcccggtgccacctcgtcagtgtcccgagagatccccagaagaacgagagggctgaacaggggaccccactgacgtccggtgggccgactttacgatcctttagggtaaaaatttcatctaggaagacctagagataacaataaacgattatagtttaacttaggatggtaatatatctcaactacgacgaagtccagcacatagtaatcgctatgtgtttactatgatgatttttattatcttcatctaacaacaacaacaacaaaaaggccagaggcatctgtgcaaagctcgataatgctaatggattatgtttattaagtattcactgtgtatttggttttgcgttttattatacctacgttctttcatttgttatcaaggtctctatgaagtcagagctattactatcagcattttacccatgaagaaaccgaggtttagagagattcttttccaggaactggatagccagcaagatgtgaagcagggtaatctgtctcctgagtctatgctcttcagtgccaccactgtttcccaaagtaggattttagaattttagaggatgcacagagctcgctcattcatgttccatcacatagtgagaaagttttgttttcttttgttttgtttttcaatcctgattgcaccaatgagaaagtctcagtttggtgctaatacatctttaattaaaaaaaaaaaaaagtagagatgaggtctcactatattgcccactccagtctcgaacttctggcctcaaggagtcctgtctccccctcccaaagtactgggattataggcatgagcmaatkcacttggcctcagtttgatcctaatatatctttaattcctctctacacttatctcccacttttaacagaaaagatcttgagttagaagctcttagcagagaactgagtctagagtgatttcattatatggttcatagtattgattttctatccatactggttttctattctgtactatactgagataaagtttttcatttaggtcaaaaataatttaaatattaagtaaatgttaatataagcagtgcacagaattggctctgtgctgtgcatgggctctgtgatctgggcaagttccctcacctctctgtgcctcagtttcctcacctgccaaatggrggcagtaatgatgccatgtgtgttgtaaagttactgggaggagtaaatgaactaaaacgtgtaaagcatctacaagcaggcccagcacacaggcagcaccaagtgaggatttgctagtggtgtttttatctgagatgccacctcctctaagaagccttcccttgatccttgctgactcgttgttattcctcatgccaggtccaaagtgtactgacaggtttcccctttgaccttcctatgactccccttagggcctaggctttgaccagccttatagcccaagggactatattgtactctcaagattggaggctgcctcctcaggggccaccctagccaggctcatcacacagctggctcagtgctctcccttggcaacaaccttaggataaaaracatttccagagaagttgtcacacagcatgcatggtttgagtgcttcacaagaaataatatcacaattccctctgagttggtaaggaaatgaaaaatgaatgaatgaatgaatgatccttcacaaaaccttcacaatgtcccagttgggtgaacagaataggaattatctccagacctcctgggttcaattttagtttcaccactcactagctgtgccctagggcaagttatttaatctctgtgtgtgcctccgtctttctcttgtaaaacagagataataacaggatctaccctagagagttattttaaggatgagatggattaatayatgtaaaatgcctagaactgtgcctggcacacagtatgtaaatatctgcaataataataactttctattttctagatgaagaaactaagactcagagaagacaaatgacatgcccaaagacacattgataagaacgcatctggtagtggtgttcgagtccagcgttgcagcagagagatgggtaactgtatrgccgaacagctgtcytctcrtggaagaaggaggccaatgtccaggagtggcaggcatactggaacttggacttctgtaggccaacctgggttccacttggtagatgggggtcttgctgtgttgcccaggctggtctcaaactcctggcctgaagcagtcctcctcccttagcctccagagtagctgggactacaggtacacaccactgcaacccctcagtggttgttatttaactgaagggggttttagctttcatgtatcagctcactctggagccagacagcctggccttcatggcagctctgccccttactacctgtgtgacatcgggcaacgttactgagtgtcagatttcttatttgtaaaacagggataaaaatgacattgctgtgcaaattaaaagaaagaatccatgtgagatatttagcacactggcatacaatgagagcttaataaacattgttagttttgtaaactgagggaaaaaaatagccacaggcctgggaacataaatgcttggtaagcttctcagttccctggaagtctgacacgcaatgtgtatgtatgaacaaggcaggaggaagcatgacaccaagccttccttttaacaaacactgtttaaatcagaggtcggaagtcatggactggagattcattctctccccactcatttctgcccagagacacctggtgatctggcatacacagtgctatgaacctcagaattatttgctagcatttacaaattgtgagtactcccacatacraactgtggtagatggaataatgcctccccacaaaaatgtccacagcctaatccctggaacctgggaatatgttactttacacagcaaaggaatgttgcagctgtgattggagattgagatagggagagtgtattagtctgttgtcatgcggctatgaagaaatacctgagactgggtaatttacaaagaaaagaggtttaattsacttacagctcagcacggctggttgggggggcgccctcaggaaatttacaatcatggtaggaggcacctcttcacagggtggcaggagagaaaataagagcagagcgaagggggaaccccttataaaactgtcagatctcatgagaactcactgtcatgagaacagcatgggggaaaccgcccccatgatccatcacctccacctggtcccccccttgttacaattcaaggggattgtaacaattcaaggtgagatctgggtggggacacagagccaaaccatatcagagagtcttcctgcagtgtccgggtgggtgcggcatgttcatagggtcttagaagagggaagcaagaggtgagaggacagaaatgccacattgctggctttgagggtggggccagaggagggacctgcaggcagagatagagctggaaatggaaaggaaaccttctcccttagagtctccagaagaagtgcagccctacagacctgtgttaggcttcagacctccagaattgtaaaataataaaattgcattattttaagccactcgaggcccatgtcctcaacaaagagaaagacggtggggtgctgtcagccagggtaggtacctgcttggtggtytgggtcctttcccactgtgtccattcagttacattacctgcccatctgctgaggcctcgagtttgggacctcaggtttatataattccttgcacaagcatgatcgattgattccggagagtagcagaacactgatatgcaggggaatctcctagttccaagtgtgagttgtagtctagacacttcctgttccctacagtcttttttttttttttttttttttttgagacaaagttttgctctgttgcccaggctggagtgcagtggtgtgatctcggctcactgcaacctctgcctcctgggttcaagcaattctgcctcagcctcccgaatagctgggatcacaggcacatgccaccatgcccagctaatttttgtatttttagtagagttagggtttcgccatgttggccagggtgatctcaaactcttgacctcacatgatccgcccgccacagcctcccaaagtgctgggattacaggcgcaaaccaccrcccccagccctcttccctactgccttsatgtgttcatctgggcaatgtgtgttgagggggcatagggaggggagctctaaggcaaatgtgctgggattctgcattcgtcatcctcaaaacaaaattggtccctaggtagttctgcctgtgatcctgcataatgtgcaaagccagtaagatgcctttgcctcatccccagggaacatgcctcccagccactttcatctcacctagtgcctacacagaaaggcaaccrcctccctgctgaagggaccccacgcctgtctcctgtttccacacaattaccccgggaaatgcctggcttcccatttccagytgcagccatcttgacagtttcagcctctccccacagcccacgtccctcacttgagcagcgagatgtgaagacagacagccgcttgagaactgcacagactgtccttaatctaagccatttaaaaggcatttgtgttccataaaacccgtttctgtaattctgtgcccctacttctttgaaagatgataaccctagggaggagrtyagccagggaggagaagttcagatgtgctaatattttaatcgctcattctttcatcacattagtcacattcattaartatgattaatttcaggctttgttgaaaaccctatcagtttccctatcagccacacatccatctcttgccaagcaggctggtgcagtagcaccaaaagtcccccagtgttttttacacctggattgtattatgtgccccctgaaaatgtgtggaattaattgagctcatttgtttcaaatactttgcaagagcctgggctcttgagtcaggcggcctaagtgtgatcctaagtcctcccattgctggagtcacctgggcaagtgactgacgccctctgagccctggtgtcctcgtctgaggatggagataagaatacctaactcgaaagttggttgtgaagatgaaagaaggctttcaaattgctaagttagttggttatgattgtaattaagggcccttggagatggatcattcatccattcattcatccattcagaagatttgtgtacagtgactactgtatgcaaccctgtgtgtccactgctgatgagagagacagcagcaaacacagcagtcaaatgcgtgtggcccccaggaccttatattttagtggtggaagctagacaaccaccaaacatgtaatayaccagatggtggtacgttctatggaggaaagaaaggacgaggggcagggagtcctgggctggtgggacagggtgctatggctcagagggaactcagagatcacctaattcaggccctgacctggagggctcatgctttgcacactgtgctaagaatttggactttctttctccaagaataaggacaatgagagccagcaagcagggaagtggagcaaggatggtgccgtccggctgctcagctgctggctggaactcccggaggactctgtgaggatgcaggtagaaggtgtgtaagcatgtgactgcatggaagccctcggcatgtgatccactccgtgttccaaattgccatcctttctgcgtgctgttagggacttcccccagctctccctgcagagtgaggagtactctgagacagacgggtctaggatgaactgtkttgatggagaaatgaacattttttggagggaaggaagatttcrgggtgtggggcataagttgaaggagtatggctctgaaagtccttgggcagtttgtagaggacagagaaggtggtaatgtcagtttctgcccctctcccacctccacctctggccttctcagtggtcctatggctccctaccttcagtcatcytgttctcaagcctgaagtgctggatccactcagctgcaayccagctcaacacctctgtggaagctttgcccatcaatcaggagamgctgagatccagagactgatgcccacgttctgtctttgcagagggaagcccaccagagccctcttctctctggggaggagctggctccctgaatctccaagacaaacccagmcagccctggggaccttgaatgtgagcaaggggagcagaaaggaggctccagcccacccagggcccctgcagggtctgcacacacaattacaggtcctcatttccctctcctaatgatgccccaaaacattaagggaagttaaatcaaaccaccaggtgtccagcatgaacagctgaaataataaattcacgaggtaagtaagacattttatttgtactatttcaaaattggtagatgcaggaaagcaaattgtgatgtgcttgggatttaatttgtatttcaaggtactaatgaaggtagcacccattttcccaaaggccttttcatccctgaatcttgagagcacttttctaagcatattgggaataaattaagttgcaaaacctccatgaaaaagattacggttaaaacataattttgaggaaccacttgagtttatccatttacctgcttttaagtacacacacctattttttttgcaattatttttcacaaaagaaggaactttgtgtgacgtatacaagcaggtaatggcaaacctccagcatctttaaaataaaactcaaattgggctgggcaggatattacatgcctgtaatcccagaactttgggaggccaaggctggtggatcacctgagggagctcgagactagcctgagcaacatggtgaaaccttgtctctactaaaaacaaaaaaaattagccagacatggtggcgggtgcctgtaatcccagctacttgggaggctgaggcaggagaatcacttgaacccaggaggtggaggtaacagtgagccaagatcatgccattgcacttcagcctgggcaacaagagccaaactctgtctcaaaaaaataaaataaaataaaaataaaactcaggctgaactaaaccagccttctgagtcaatgtgcagatattccataatgaagtatgctgattaataaattatttgattaccaggtaagtatacctgcaatcaatataactgccgaaaagctctgaattagaaatggtgcaataaaatttaactgaaaggtattaggaattggtagttttaattacagggaatgattaattgatcatttagacagtattgatctacaacttatttaattctttgcaatttaatttgtcagatttgaatccaaataactgatgatttgttccatgaatgccagagctggaagggatggggttggcagaagagacaagactggaccatggacctggtggttctgtgcagaggccaaagctactctccttcccacctggccctgtgctgggcctaacctggagccccctctatcctctgcctcattcttctccgggtcaaggtccagcatgaactccatgtcctccaggaagccctggtggacttgggcagacctggggacacgtccagcctcctggcaagatgggggtaacaggagtgtgtataaaggggaaggcaagaatgtgcccttggtggagcagtgaaaagaagccctcatgtgacaagtgttttgctcctaacccacctcctctggtgacatcttctgggttaactgctcttgctgatctctgcacataaaccaagctaactgtgagaggcctttcatttctagtttaaagcaaggagaccacagttccttctgaacactcacccccaaggagataaggagggcgtcccatgagcaacactgtgtgttaaagatgtacacgagcactgggacctgaccaaggacaaacacgtctccagccccctcagacccttgctgctgctcagatgtccgctgtcatcggtcacatcctaacctcaaccccctctctcctcccacataaaaggaggctgaaattcatagtaacttcagatggttctttaggacactggcccaccaccttctcggttgctggctctccaaaacaaagccccctcccttgacccaattccttgtttcttgacgtactggctgttgtgcagtgcatggtaccggcttgaactcggttatgttggcatggcctctggcggtgctcagtttgtgtggatgagtattttacagctactgtcctatttccagtccccttcctctggacggctatgggatgtgctgtggatgccctctcttaggctggaataaaccaccctaccttctcctctgccttgtctccaccaaataaactccttaaggcagggatagagtcttgcactccacgaagaagtattgctgcatcctcagctgtgtaagagtgaccgggcttcttctattccacctgtaatggaactttaggcacgcagagagagatggcaaatttgtgctggctgaaggggtcagcaaatgcatataaggcttcttgtgctccagagagagaatggagtgcagtcagtgagaccctgaggggagaaggaaccaaaagcctgggcagaagggatcgtggaggtgcccagggtcaggagggatgggaagggtgaggaacacaagagatcacctggaggcattagaggagaaggcaggcactggggacggtgccgctgatccaggtggagcaacatcctaggacccgagtgctgggcaggtgcatccgtggagggaagcttctctcctctctcggctcctgctgagagaggcaatcattcccctggcttgccctgcaagagacaggagctctaggtagatctctgctatctagggaatagaatgtgaatatttgaaagttctagaggtcaagtcttaggttccctctcagctcagatcccaaatggtacactctaccctaacccccttttcttgtagctttgctacatggagaggaaaataccttgccagacaccaacagtcccttctcagcacttttgtgtgaagacaactcagaccctaagagaatggggtctaatttgcaggtgccactggaaggcagaggtcacgggagccctggacttcagacaaggtagagggatcctggagacagcacatctggccctggagccctgcccacccggggagtgagggcagctctcctgctctcctaggaggcctgcccgaggacccccatgtcctctatgtgtgggattctgcagtttgcactcacaacccagagccttttacccaactaccctgtttgtaggaatgtgtccaaaataagcatcagacaagtacatgaagatgaatgtgcaaagacgttcataacaggattgtttataatcatgaaaaatgatctgcagatttcctgtctgctgtgcaggatgagttagacggggatgcatccataaaatcactttgccctcatttaaaattatatcatagatctatgtttaatgacatagtaaacggtactcaatgcattaagtgaaaaaagcatatacatatcaggatgtatatgatcaagtttttgttaaatggatgcatgtatgcatgtcagtaactgtctgtgtttgcaaacaaaacgtctagcaagacgtgcatcaaatattaacaatcattatctttggattctggatttattgacttctatttttgactttgccctttgtttttctatgttatctgacacttttacactgagtttatattatttttacaattaaaatatcaatccatcaatctacctccatttgggaagtagtaaaaagtacactgagtttatattattatttttacaattaaaatatcaatccatcaatctacctccatttgggaggtccatttcaactacacaaggaagacaggatagggaggaatagcactaagtatgagtgcctgtgattcagagagggaagcgacttggaattctagcccagctcctccacctgccccctctctaactcttccactctcccatacttgctcccggtgccccagcactcctgggtgcctcctgtcttcccagcacgcacaacccagctgagctttctattagtacccactttacccctgatcttcccgccctccacacctcttgtcactcccagtcactccactgatttttatttttttatttattgatgtcatcaccatctgaatcaacgatgtctgtttctttgcctgctcacttacagttggccttgtttactactgtgggaagctaatggtgtctactgtagccaaatcagcacatttatttatttatttatttatttatttatttatttatttggagaccaagtctcactctgtcgcccaggctggactgcagtgccgtgatcttggctctctgcaacctccgcctcccaggttcaagtgattctcatgcctcagactcctggtgggactgcaggtgtgagccaccacacccggctaatttttgtatttttagtaatgacgggctttcaccatgttggccaggctggtctcgaactcctgatctcaggtgatccacctgcctcggcctcccaaagtgttgggattacagacgtgagccactgagcccagcctatttattatttattttattttattttatttttttgagacggggtcttgctctgtctcccaggccagagtgcagtggtgcaatcatagctcactgcagccttgaactcctgggctcaagcactcctcctgtctctgcctcccaaatagctgggactacagatgtgtaccaccacacctggctgtaatcagcacctttaaagaacctaaagatggactcctgcccatcccaccccatgaaatctacatctgaatattagagaaactccaagggagttctcagttttcccatatcttctctgctcacacctgtgtccccacaacagcatacatcttgtccactgtatgtactcggtgaataagtaacaatcgaattgatagataagtggatgcatgtctcctgagccttggggaagaaaagagaagacagaagagggctacattagagaggaaagtttttaggccactgggcaggtacaaacaaggccaggcacggtggctcacacctgtaatcccagtactttggtaggctgaggtggacagatcacctgaggtcaggagtttaagaccagcctggccaacatggtgaaaccccatctctaccaaaaatacaaaaattagtcgggggtggtggcacgtgcctgtagtcccagctactcgggaggctgaggcaggagaatcacttgaacctgggaggcagaggttgcagagagcgaagatcgcaccactgaactccagcctgggcaacagagtgagactctgtttcaaaagaaagcaacaacaacaaaaaacaagagcaggtgagtatcaatgagaagaaacccctatccccagcagttggtgagttgagaatcatgccaaggaggacactcggaacagccaggtcagaaagcagcagcccctggtgatggcctggcccgcccagacagtgaatgccgttttctaaacctggtgagatgataaaattttaacctgctatgtaaagctatttttaaacatggaggggaaaaaaataacctttccctgggtaaaaccgtaacagtcacttagagcacaatggatctttattttttatgaccaagttataaattgttgaaaataagagtttcaaatggaaatgttgacataataatcttatctatagcagcatgaataaccaactataaccgttattattctgtgttctatgaacgttggcttttttgaaagttcaacttgctcaatatgtttgccttttaacatgagttaagaggtaatttgcatgaacacaaataaagaagtatcaattcagtggcattatgaattaattagctgcagcccaccatcatgaattgggaaatgcaaccgcactttccatctcttttatttatagcccactcttgctacgttacaccttttcagatattaagtactgaacatggttgcttcttaaaaaggttaattatccaagacaggtttatggtaccttatctaaaggccaatattctacttctttgggatcttggatttacataattacaatcagtggaaagtttatcagtcagatttcctttcccaccactcctcagcaggcacctttgtcctcttgagatctaccagtactgggggtctccaccagctggtctttgtttcttactccggcaaagcaacattgacagcttgcaacagccaactttccttgccttaaatgtgaggcacatggaatgaccacatgagcaaggcaggctgaatccagcccaaagcctgcagcacctggagcagagctcacc

SEQ ID NO: 93828 - DNA, 46037 bp, Homo sapiens
  misc_feature (1)...(46037): n = A,T,C or G
gcaacagcccatctccacaaaaaaaatacaaaaatgggccaggtgtggtgtctctcacctgtagtcccagcaacttaggaggctgaggcaggaggatcaccaccacaggaggttgaagctgcagtgagctatgatcacaccactatactgtagcctcggcaatagagtaagaccctgtctcaaaataataataaaccaaaacaatatttaaaaagctatgtgtggcccagaatggtggctcacacctgtaatcccagtgctttttagtagagatggggtttcaccatgtttgtcagcctggtctcgaactcttgacctcagatgatctacccaccttggcctcccaaagtgctgggattacaggcatgagccaccgcgccttgcccaatttgactctcttcatcaacacgttcctcttgcaccctctcaggcacatagtgccaggaagaactgttctgtttgtcagcaaaagagacagagactgcctgtggctatggtgcagataacgtggtggaaggtcctgatcatagctggcaagtgagactcatgctggtagctctggggcagtaccactgaactctgttccttgacaggaacagactgtgactctggactgggctttgcttacctgctagaagctacaaatgcttcaaaacaatcagaacaaggttgggtgcagtggctcatgcctataatcccagcacttgaggaggctgaggcgggcagatcacttgagctcaggagtttgagggcaacctcgtctctactaaaaatataaaaattatccgggtgtggtcgtgcatgcctgtaatcccagctacttgggaggatgagatgggaggatcgcttgagtctgcgaggtcgaggctgcagtgagctatgattgcaccattgcactccagcctgggtgacagagtgagatgctgtctcacaaaaacaaaattaaatttaaaaaaatgaaaaagtagaacaagagacagtgcacagatttggaaagccgaccattatttcttcagaacaaggaacacattgtacagcccataatggccaacaatgagcaaaaagatctcctcctcagagtcatagtttgatagagaagtaagatgtcctttgcaaaaattgtatcagtgagagaattaggacagcgggggagagctgatctagccagtccccctcttgcctttggcctctaagctgcccttaattattcctggatttgggccaagctaactttgggagacatttagtttacagtttaaatgaaaatagcccttccctaaaacgcagccacctttgtaaagctaatgagaaaccaccaggctaggagcacagagaagcccgaactctgctaagattgccagccattattccaggggtcacaagctaggcaacttccccagttactcctgcagataacatcactattgcagaacctaagattggcctttggagatatcttttcaggttttttgcatgtctgacaccaacaactccacatggaccccacccaccactcctgcggcccccctcagaggtgactcagcctgcaggaggaccatttgccacacccctaaggttgcacccccaaccaatcagcagcaagcacccattgcctagctgccaccaccccttccccgaaactacatttaaataatgtctaatctctgagccttccagaagattgactaataataccaactcccacgtggtgtggccagccttgtgtcaattagtctttcttgactgtaatgccatgctctccatgaaatgatttcgtttgtgctgtgggaacccatcaggtggttatagaggtggcataggctatgaaaacactggttgtctaaaacagggggagataacaattatgaagggctagtgtacacgagtgtgtgctcactaacatgaggggactaaaggagtgtccccactagatgttcctgtttttctggtggatctggggaaaaagaggtggggaggatgctggggttgctatgcaattctcaccgagggaggaatttgctggtataatgattatacatttttctttctttctttctttcttttttgagatggagtctcgctctgtctgccaggctggagtgcagtggcgggatctcggctcactgtaaccactgcctcccgggttcaagcgattttcctgcctcagcctcctgagtagctgggaatacaggcgtgtgccaccatgcccggctaatttttgtatttttagtagagacggggtttcaccatgttggccaggctggtcatgaacttctgacctcaggtgatccacccacctcggcctcccagagtgttgggactacaggcgtgagacacctcaccgggcctcttcctttttctttcttttttttttttttgagccaaggcgggcagatcacttgaggtcaggagttcgagactagcctggccaatgtggtgacaccccgtctctactaaaaatacaaaaattagccaggcatgatggcgggtgcctgtaatcccagctacagggaaggctaaggcagcagaattgcttgaacccgggaggcggaggctgcagtgagccgagatcatgccactgcactccagcctgggcgacagagtgagactctgcctgaaaaaataataaataaataaataaataaaactatgatcaatgcttgagcctaagagtttgaggctgcagtgaactatggttgcgccactgcattctagtctgggtgacagagcaaggccttgtctcaaacaaaacaaaacaaagcaaaactatgatcaaatacatgtgtatgccttttctcctattaatcacttgtgtggtattcctgccaaaaatgcatcatctgaatctaatcatgaagaaatatcagacaaatctgaattaagggacattctactgtaggtgccaaggggccctctgaagtttcgctgcaaaaaatcaacttacaaaaggcagagtaatagtcaaaaatgtgtacaaatttatgtaacatgtacatatgggagccttcagaaggaagacccaaagatacaggggaaattgtacatttttatgcaaatgattgaacataaaaggtatgatctaatgctgatagactgagtggggaggcccagcaaggcctgtctgtctagattcttcttggcctcttggaacaggcattccttccttctgggtgtgggggaggaccctctctggaatggagtcttatggcctacagtcaaacaagctaggtcagataatttctttttggccagtttttacaccaaaagaaggagggaaagttaagagtaatatatttagggttttttttgtttgttttttgagacagagtctcactctgtcgcccaggctggaatgcagtggtgcaatctcggctcactgcaacctctgcctccccggttcaagcgattctcctgcctcagactcccgagtagccgggactacaggcacatggcacctcgctcggctttttttgtatttttagtagagacggggtttcaccgtgttagccaggatggtctcgatctcctgacctcgctatccacctgccttggcctcccaaagtgccaggattataggcgtgagccaccgcacccagcttatatttagggttttatggctggctttgggggtaaatgactctgttttctatgacctgccttggggaagaggattctaacttctctggctaggctcgggggagaatgcacctgagggagaggaggacagaaggtaaaaaaaaaaaaaaaaacaacttgctttgtgggttgcttctgaggccttcattttggggtattgttttctgagacccaacactacaaaacaatgggcttatacacttcaaaagtgttaatgtcagccagccaggcgcagtggctcacgcctgtaatctcagcactttggaaggctgaggcgagcggatcacatgaggccaggagttggagaccagcctggtcaacatagtgaaaccctgcctctaataaagacacaaaaattagccaagtgtggtagtacattcctgtagtcccagctactctggaggctgaggcatgagaatcatttgaacccaggaggcggaggttgcagtgagctgaaatcatgcaactgcactccagcctgggtgacagaggaagacatcatctcaaaagaaaaaaaaaaagcgttaaagtcacagaagaaaagttctttgttctattcttgtaattctcgtgtaaatttgaaattatttcaaaataaaaactcagcaaatttagctcttcatctaagtcttttctattcaatgctaagtacaccccttatcattgttacattaagagcaattggtttcctagaatattagaactagaaggtcagctgtcaagcagccatttgttcactccacaaagatttcctgagcacctttagcggggcaggcactgtgccaggtacagagaataaactagacaccctctctgctgttgaaggggcctgagatcagcagcttaataagacaaatgaggatcctgaggtcctaggggttaagagtgtgtattatagttctattattcaaattatgaatgttatgcatctctcgtagttttacttctgagaaaaccaaagtcatagtattacacagactacagacaggctaggcgcagcggctcacgcctgtaatcccggcgctttgggaggccgaggcaggtggatcaacaggtcaggaattcgagaccagcctggccaacatggcaaaatcctgtctctactaaaaatacaattagctgggtgtggtggcgagcccctataatcccagctactcgggaggctgagataggagaatcgcttgaacccagggggtggaggttgcaatgagctgagatcataccaccacactgcagcctgggcgacagagcgagactccgtctcaagaaaaaaaaaaaaaatgactagagatgattcaacaaatccctgaatctcccttgtctacaatcccactgggcagaactgtttttgttttttgttttttttctgtagagacagggtctcactatgttgcccaggatggagtgcaatgtcacaatcttggctcaccgcaacctccacctccggggctcaagccaccatcccatctcagccttcagagtagctgggactacaggcgcatgccactacacccagctaattttttggtattttttgtagggatggggttttgccatgttgcccaggctggtcttgaactcctgggctcaagtgatacgcccgcctcgtcctcccaaagtgctgggattccaggcgtgagccaccgcgcccggccctacactaggttttaacagtaagtgtgcatttcccactttgatgacggtgatggcgaaagcaaagaagtctggattccaagacctctagtaactgccaggttgcgggggaaaatgtctggtttcccagacagaaggcttagagcagcaccgcccgcttggtctcattctaagtccccgtccaccccttgaacagcgctcacaatcccacacccagggccccggaacccacgcctctgccagtaaagacgccattatcttaacaaaaggtaactggagcctctccccaaagagactggttcccgtcccattcttctccaatccgggtggatttggcaaaagcccaagtgaccctccctagcaattccgcaaagccccatctcccgccccagactccagagtctcccgaccactctcatttcggagaggcctaggggcacggacccggaagcgtgacagaggccgcggggtaagaggggggcaagtgcaggcgcaatccctcctcagcctcgttgtcccgcccccttcccaaggccccagccaacctgttctaggcgtcgccggtcctcggatttcttctttccgcctcgcgtggtcacgtgacgggggaggggcgggatacaaaaagtgctttattttcccactccccggacgcccagcagggcagtttcttgaccttcggagcccctttcccgaggatccgctcgggagcctcccctggccaggagcaggggattagtctgccccgcgaccggccccagccacgacgcggacatcgccccctctgtctgggccgctgtcactcacgcgccaaagggccacggagaaagaaggggcgggccggggcgggccgggcgagcggaggcggggacttgcgccgtcctgaggctgcctcctagggtccggccggcgctggagctgcggatttagattgtcactgccacctcggtcggtgcttacttcgctgccagctggtcgtcgccatgaacccggacctgcgcagggagcgggattccgccagcttcaacccggagctgcttacacacatcctggacggcagccccgagaaaacccggcgccgccgagagatcggtgagggcggcgggcgagacctccctcctttcccgagaaaagctggagactccctcgatgcggagtcaggggcgctgtggggcctaggccctctggcccrgcgttaggggagccgggacccccacttcgaggaacagcctgtgtccctggtggggggatrtcgccattccccaggtgtgtccgcgactctgaagcctattgtgattcagggagggtggaacggaggcccgagtgtctgtctgccttttaatgccctttaaccccctttcagagaacatgatcctgaacgacccagacttccagcatgaggacttgaacttcctcactcgcagccagcgttatgaggtggctgtcaggaaaagtgccatcatggtgaagaagatgagggagtttggcatcgctgaccctgatgaaattatgtggtttaaaaagtaggtatgccttagaacagagcaagtgttgttaagcctaaactttacagctgcggtctatggtggcctttcatcaccgtgcttggtgtttgaagatgcaaactggcatattttcatgcaactttataaagttatatgtgtggccgggcgcggtggctcacgcctgtaatcccagcactttgggaggccgaggcgggcggatcaccaagtcaggagatcgagaccattctggctaacacggtgaaaccccatctctactgaaaatacaaaaattagccgggcgtggtggcgggcgcctgtagttccagctactcgggaggctgaggcaggagaatagcgtgaactagggaggcggagcttgcagtgagccgagatcgcgccactgcactccagcctgggcaagagtgcgagactccatctcaaaaaataaataaataaataaataaataaagttatatgtgtgaaaaataatgtgatcacttttgtatccaagccttttcgtgggatgacgtgtttgtagaatgctgataataaatggaaatgcaggagtttttgttctcaagagtacagtttcaaggatgttgtaaaagcattgttctgcccaagcaactcaaatttgactgatttaaatgcagaatcattttgctctttgtaaggaggactgctaaaattctgaatctgggagcatttttttttttagttgcacgaccatttaaatattttggagcaatagcagattatattatatggtagtgtggacctggatgaagaatgatctgtgacgcctctgaatgaatagaaagtctaagaacccagtagttctgaatccatgacagtgcttgaatggttgtcttgtgcatatgagagagacgtcataaaaacctgccttggttctagtgtggaagagagtatatccttttttcagaccatgtgttttgttgtgttttttgtttttgtttttgttttttgagacggagtctcgctctgtcgcccaggctgcagtgcagtggcacgatctcggctcactccagcctccacctcccggattcaagcgattctcctacttcagcctcctgagtagctgggattacaggcgcccgccaccacacccggctaatttttgtatttttagtagagatggggtttcgccatgttgccaggctggtctcaaactcctcacctcgtgatccaccctgctccacaaggaacggtaaaaataaataaaaataaggacttcgggccgggcacagtggctcatgcctgtaatctcagcactttgggaagccaaggcaggtggatcacttgaggccaggagctcgagaccagcctggccaaaatggtgaaactctctctactaaaaatacaaaaattagccgggcctggtggtgcgcttctggggtcccagctattcaggaggctgaggcaggagaatcccttgaacctgggaggcaaaggctgcactgagccgagatcacgccactgcactccagactgggcaacaaagagagactctgtctcaaaaaaaaaaaaaaaaaaaaaaargmcttttttgccttaacctaaacaaacactattacatgatcctagtacaagattattttggcctatagcatttttttctcatttattcctgggcattttctcttttaggtttctccattttaaaggaactccagtattttcatcggtaaagactaaatcgtatgagtggtgtatagactagaaccaagctaaatagaacatgttgcacgttctgcctttatggtaataatggtcactgcctctagtgcctttggtatcgattttcagcttgacttgggttatttttgtgaagatgaaatggtttactctggcactttggactttcctcagagctccactcagttttaaacgaaaaaattttgtttatttatttttggtagttcaaatcagcatacttccaaatggtctgttttgtttttgaagtttgtaactcatggctgtggggatattgagatagagtaactcctcctagaagattatgttactgatacctgtgttgtgtttgtaaatttgaaaaaattagtaagattttattccttcttgaaacgtcaggaaaaaagtgggttgagtgtgtgtgtgtgtgtttgaatgggtggtgcagtgcatttcaaagctgatagagatgatttcataacctgtgacctgttgataatgtgaaccagactcgagtgaggtcacaatgaaatagaacaaagtcttttatgcgggttaaagattcatggacaccgggaagttgttttgtgtatcatttttcatgtgaagtattaaagtacaaactttaacacaccctttgacacacttccaatgtccttaggatatgacaaggagatcagtttttaagtaagagaaggggtttgtaaatgagtcctggaaattatcgcatgcyatcgagttaaagcctcggttatataatctcatcgattataactcacaccagtgttttgtgtaccactaagaaagaaagaatgctgccagttaaccgtgacatgctattaattgtgaaatacatcacctttctttcttttcttttctttctttctttcttttcttttctttcttttcctttctttttctttctctttctcttcctctttctttttctttctctctctttctttctctctctctctctctctcygcatttccatttatttccattatcagcaggtgaagaggcayctgccacctcacccagctaayttttgtatttttagtagaaatggggtttcaccatgttggccaggctggtctygaactcctggccttgtgatccacccgccccttcctcccaaaatgctgggattacaggcataagccactgcgcctggctgagaaaasatttttaactgatgttaatgagcagcttctaaacacatgattaggacgcagaagtcgttccctctggtggaatctataatgattacattaattcattttgattaattagaaatattcgtatctaagagcatccatgttgagagttttttgtttctaagtggattatgatttatgtaagatagaaaagacaatgggactggggcatggtggctcacgcctgtaatcccagcactttgggtggctgaggtgggcagatcacttgaggccaggccacttcatgaccagcctggccaacatggcaaaacgccttctctactaaaatacaaaattaaccgggcttggtggcacacgcctataatcccagctacttgggaggctgaggcatgagaatcacttgaacctaggaggcagaggttgccgtgagctgggatcacaccactgtactccagcctgggcaacagagggagactgtctccaaaaaagaaaaaaaaagaaatggcggggataaccgtgtagtacttatttaggaaatagaaaaataagggtatattgtgtttactattatttctttctttctttctttttttttttttttttttttttggagacagagtctcgctctgtcgcccaggctggagtgcagtggtgcgatctcggctcactacaagctccgcctcccgggttcacgccrttctcccgcctcagcctcctgagtagctgggactacaggagcccaccaccacacccggctaattttttttttgtatttttcgtagagacggggtttcaccatgttagccaggatggtctcgatctgatggyctcgatctcctgacctcgtgatscacccgccttggcctcccaacgtgctgggattacaggcgtgagccaccgcgcccggctactattatttcttttaaggtggtrgtttggtttcagggtcccccagcactgcaatggcagcctatcccttctgtcctttagttcatgctctgctcattgcacaggttaggataaactggtagtaacattgcttcctaatcatgtgttgagaagtcgtgaagatcagttagatgagatgtattttgtactttaaactttttagatacgagctttgtcaaagtacaaaattgatccctataaaatctatgacacagcacagccaaggccaactactgtggattctgttttgtaagaagagagttgaggactaaatttcaatgtgatgtagagttaatccgtagtaatgttcattgaccattggggataaatttttacatgcccacattacttattgtaaaccctgaagacctttagcgawgtatgattctgccctggaatatgtatttactcttttggatatttgcttatattatctagggaaacatagttgaaattatttcttccttggagctcttgttaacagcgctataaataagtgttctatggagttatttttgctctttgaaacaaacaggtaaaacctaaataaagcaaaaaaaaaaaaccacacacattctaaaaaattcaaccaatcaaaccagcaaataacaccaacaacctccccttccaaaaattagagaagtttttatgctaaaacttaggtagaatttgcttagtggattaaatgtaaatacgaaatgaactgtgggaactgtggccttgaaataattagaagaagagagatcatcaggttctgctgctggctttttaggtagtaaaatggtaaatcttatatttaatttcataagaagggggtttacattttcctgaccttctccytgaaggccaaagctgtttggcaagaaggggttgtaggatgcagtttctaaaggaaggctgagatccttttctcttctctcctgtagactacatttggtcaattttgtggaacctgtgrgcctcaattactccatgtttattcctaccttgctgaatcagggcaccactgctcagaaagagaaatggctgctttcatccaaaggactccagataattggcacctacgcccagacggaaatgggccacggttagtccacattgagggtctgtgggtaacccacctcaggacatcagttaacagtgattgctggcatttgacttttttctgctgctacctgtttgggattctatttttaagttgttaagtcaaaattcaacttcttgttttctcctagacattttccctggaaactggtccagggctctggcctataaacgtcattcactgttatttcctaaagccttttattattgaacagcttgaaaagatggggtttacagtgcagcggggaaccccattatgttactctgggtctaatgagtaaagactttgttggaaattcttcagagggttagtgcctcagcaatatctggaaagcgcctctctgctctaatgcagttaaagctgtggattttaatgggggcagcaggcagtggcagctacctgtctcatctcattgcccactagcagggttataaggcagtttggaaaaaagtccatgattctcttcatctgacttcagtctttttagacattttttcccctacatgtctgggaactcttgtgttgccagtaattctttgttaaattgttcctaaatatctggcttccttcaaaaagttttgcttttgatcttaatgtgaaataggtttgttttcatagacaaggccattggcaggtttgagtgtttggaatttgaactgcccagcctcatgtctaattatcaaaatggcaggagtaaagaaagggaaagaaaaagggatgcagatatcagggaaacatcattttgtgtttgattgctgatttcagtgtgtgaattggtttaaggaaaatgttatttattgtcatctccatgggtactgcagctttctggtcatggtttgatgttccagacactttactaaacactcaagacttcaacttcaagatggtcagtactgaaattataagcctgaaagaaaggtttgtaaaggaagataagattcttttttttttttttttttttgagacagagttttgctttttttgcccaggctggagtgcaatggcatgatctcagctcactgcaacctccgcctctgggttcaagtgactctcctgcccgagcctcccgagtagctggaattacaggtgctcaccaccacgcccggctgattttgtatttttagtagagacgtggtttctccatgttggccaggctggtctttaactcctgacctcaggtgatctgtccaccttggcttcccaaagtgctgggattacaggctacaggcgtgagccaccgcgcctggctgacagatccttccttttttttttttttttggagacagagtctcactctgtcgcccaggctggagtgcagttgtgccatctcggctcggtgcaagctccgcctcctgggttcacgccattctcctgcctcagctcctcagtagctgggactacaggtgcccgccaccacgcccggctaattttttgtattttagtagagacggggtttcaccgtgtaagccaggatggtcttgatctcctgacctcgtgatctgccctcccaaagtcctgggattacaaggcatgagccactgcacccggcctgagagataagattctttatgtagtcctcctcgcttggagtatctgtgtgtttgtgtacatgcatgcgtggtgtgtgtgtgtgttgtaattttgaagtagctttgtggtacagaactctgtttcagtattcatcattatagaatttattcgacttaacagtcatgctgttcataggaggcataagatgtgaaatagtctgaggctaatggatttgttaagtatacctcttacctcttgttggtctaatgcttctgcctcatttataaagtaatatcacaaatatatatttgccctaatttttttttttttttttgagtcagagtctcatcctgtgccccaggctgaagtgcagtggagtgatctcagctcactgcaacctccacctcctgggttcaagggattctcctgcctcagcctcctgagtagctgggattacaggcacctgccaccatgcccggctaattttgttatttttagtagagatggggtttggccattttggccaggctggtctcaaactccttacctcaggtgatccacctgtctcagcctcccaaagtgctgggattacaggtgtgagtcaccacgcccggcctgccctaatttttgaaaggagagaggaagaaaggaagacttgaactatactggtttgaggcaaacagaagttggacagagatcctatatggctgtgggcaagtttgcatttgttagagttttcgttcccttattgcttttagttttgggtatttttttttttttttttgagacagagttttgctcttgttgcccaggctggagtgcaatggcgcgatctcggctccccgcaacctccgcctcccaggttcaagtgattctcctgcctctccctccctagtagctgggattagaggcgtgtgccaccatgcccggctaattttgtattttcagtagagacggggtttctccatgttggtcaggctggtctcgaactcccgaccttaggtgatctgcccgcctcggcctcccaaagtgctgggattataggcgtgagccatcatgcccagctagttttgggtattttcttgtatttaaaccaacgttgtcttaatctctgtggtttagagaacagtgtcctaagattagtcttttttcttgctggaattttgctaattcatattgctgttcttggttgatgactgatcttttccttggaaataagtcaggttggttaatttgcatcacgtgacggttttatcttatatggaatacacaaaaagtcaacgtccaggagatcrgcaatagagcagcttatatagaatgagatctaactatttaaattctgagactttggaaaatggatcaacagtgaacagtgattatctaacgcggtctcacagaagtagctgtaactttgggtttgggattctttcacttctgggtagctgctgagaagtgaaggggctcagaagtattcaggttcactccatgttccttccaaatcctaaaattcagtcacctacagaaagtctcagtcaccagcattatccttctttctagagtgtgtcttctttcctctaaggacacgaagaaactcggatatacacctgccctgtgggtctgggagccataatcaaaggcagaggcctgaacctgggtgataggctcacctccctggagttctgggatcaaaggaacagcctggggaactgggtccatgttatcatcctgaccatatgtttctttaggccacaaaacaggtcgtttgtttgctcttcacagatatgtaatcatttcaagatgtggccatttctggagattcttcttgctttgttttccttgtttgcttgcttgctcacttccttccttccttcctctttttttttttttttttgaaggagtctcatgttgcccaagctggagtggtgcaatggtacaatctcggctcactgcaacctccacctccccctggttgaagtgattctcctgcctcagcctcctgagtagctgggatcacaggtgtgcaccaccatacctggctaatatttatatttttagtagagacagggtttcaccatgttggccaggctggtcttgaactcctgacctcaggcgatctgcccacctcggcctcccaaagtgctgggattagaagtgtaagccactgcacccggcctctttctcgctctctttctgtcttcttcccttcctccattcctttcgttcctttctttctttattcctcacccatggactggggtcacattgccttgtttcgtattaccatctatttaggaatatagagattgtatgatacatagttatccttgaagctgatgcagtatcctggcaaattgccatcattaacacttaaatatgaaataatgcacctttctttgaaactggaaagaggtagtaaacttgatttttaagtcatcagtctttaccgcactccgttgccctctctccctaggcttaacagtctcctcttccctctgcccaagtgattctcttccctgttggacttctcatgagacttgcttccctggggatttgggctaaatttcaccaatattagtgataataatataaactttatgaaagctgtgttctggccaggcacggtggctcacgcctgtaatcccagcactttgggaggccagcgtgggtggatcacctgaggtcgggagttcgagaccagcctgaccaacatggagaaaccccgtccctactaaaaatacaaaattacctgggtgtgatggtgcgtgcctgtaatcccagctactagggaggctgaggcaggagaagcttttgaacctgggaggtggaagttgtggtgagctgagattgcgccattgcgctctagcctgggtaacaacagtgagactccgtctcaaaaaataaataaataaataaataaataagacgctgtattctttggggtcatacttctggaatacctctcagaaatgaattactatattgagggacatgagcattttagagcttttgctgcatagtttgaggcttttcctgaaacacagaaccagttgacaatatattgagcaagctctgtacctgtatttccacagctccatcaacgtggtcactttaatttattttgctactttaacatatttctttttttttttttttgagacggagttttgctcttgttgctcaggctggagtgcagtggcgtgatctcggctcaccgcaacttccgcctcccgcattcaagcgattctcctccctcggcctcctgagtagctgggattacaggcatgcgccaccacgcccggctacttttgtatttttartagagacggggtttctccatgttggtcaggctggtcttgaactcctgacctcaggtgatccgcccgcttcagcctcccaaagtgctgggattacaggcatgagccactgcacatggcctactttaatatatttctttttttttttttttttttcaggcggagtctcgctttgtcgcccaggctggagtgcagtggcatgatctccgctcgctgcaagctccgcctcctgggttcacgctattctcctgcctcagccccctgagtagctggtactactggcaccctccaccatgcccggctaacttttttttttttttttttttgagacggagtctcgctctgtcgcccaggctggagtgcagtggcgggatctcggctcactgcaagctcnnnnnnnnnnnnnnnnnnnnnnnnnnnnnnnnnnnnnnnnnnnnnnnnnnnnnnnnnnnnnnnnnnnnnnnnnnnnnnnnnnnnnnnnnnnnnnnnnnnnnnnnnnnnnnnnnnnnnnnnnnnnnnnnnnnnnnnnnnnnnnnnnnnnnnnnnnnnnnnnnnnnnnnnnnnnnnnnnnnnnnnnnnnnnnnnnnnnnnnnnnnnnnnnnnnnnnnnnnnnnnnnnnnnnnnnnnnnnnnnnnnnnnnnnnnnnnnnnnnnnnnnnnnnnnnnnnnnnnnnnnnnnnnnnnnnnnnnnnnnnnnnnnnnnnnnnnnnnnnnnnnnnnnnnnnnnnnnnnnnnnnnnnnnnnnnnnnnnnnnnnnnnnnnnnnnnnnnnnnnnnnnnnnnnnnnnnnnnnnnnnnnnnnnnnnnnnnnnnnnnnnnnnnnnnnnnnnnnnnnnnnnnnnnnnnnnnnnnnnnnnnnnnnnnnnnnnnnnnnnnnnnnnnnnnnnnnnnnnnnnnnnnnnnnnnnnnnnnnnnnnnnnnnnnnnnnnnnnnnnnnnnnnnnnnnnnnnnnnnnnnnnnnnnnnnnnnnnnnnnnnnnnnnnnnnnnnnnnnnnntgacatgctgtctcaaaaaatatatatatatatacgtgtatatatatatatgtgtatatatatatgtatatatatgtatgtatatatatacgtatatatatgtatatatatgtatgtatatatatacgtatatatatgtatgtatatatatatgtatgtatatatatatatatttcgattttttaaattattttctgctttgctaaacgtttttgctttatatatttaacacatccttctctgcataggtataaattttatcttttccataacttggatagttttcttctgggtttttttttttgagacatagtcttcctctgtcaccaggctggagtgcagtggcatcatcttggctcactgtaacctctgcctcctgggttcaaagccattctcctggctcagcctcccgagtagctgggatcacaggtgcccaccaccacacccagctaatttttgtatttttagtagagatggggtttcaccatgttggtcaggatggtctcgatctcctgaccttgtgatccacccgcctcggtctcccaaagtgctaggattacaggcgtgagccaccacgcccggcctcttctgttttcttctaatatttttgtttggtttctgtttaatgatttgacttgtatatgatacagagtgagaatgaatctcatggttttctagattttttttttttgtacttcttttttcttttttttgagagacaagagtctcactctgtcacccaggctggggtgcagtggcgcagcttccgagatttctaatgttcattgttaactagtggctttttcccattattatcttattcccattatgtcctttctggtttgtcttagagttttataataggttaaatttatttctggaaccttaaatatattacattgataggtttatttctttctttgtttttcttctaacataaattttgaccactggtgctttataaaatttttttgagacagaatctcgcactgtcacctgggctggagtgcagtggcgcagtcatggctcactgcaacctctgcctcctggattcaagcgattctacctcagcctccccagtagctggaattacaggtgcctgccaccacgcccagctaattttttgtatttttagtagagacgaggtttcaccatgttggccaggctggtctcaaactcctgacctcgtgattcacccacctcggcctcccagaatgctgggattacaggcgtgagccaccgtgcccagccaagactttttactctatttttatttttattttttatttttttattttaattttttatttatttttaagacggagtcttgctctgttgcccaggctggagtgcaatggtgtgatttcagctgcctgcaacctccgcctcccgggttcaagcgattctcctgcctcagccccctgagtagctgggattacaggcgtgcaccaccatgctcagctaatgtttatatttttagtagaaacggagtttcaccatgttggtcaggctggtctcaaactcctgaccccgtgatccacccacctcagcctcccaaagtgctgggattacaggcacgagccaccgcacctggcctttattttttattttattatttttatttattattttttttctttttcgagatggagtcttgctctgtcacccagcctggagtgcagtggcatgatctcagctccctgcaacctctgcctcccaggttcaagcaattcttctgccttagcctcccgagtagctgggattacaggcatgtgctaccatgcccatctaatttttgtatttttagtagagatggggtttcaccatgttggccaggctggtctcgaactcttgacctcaggtgatctgcctgcctcagcctcccgaagtgctgggattacaggagtgagccactgggcctggcatatttttatttttgaaagacgggttcttgctctgctgcccaggctggagtgcagaggtttgatcatagctcactgcagccttgatctcctagactgaagggatcctcctgcctcagtctcccgagtagttgagagtatgggctcgtgacaccgcgcccagttgattttttaaatttttagtagagataggatcttgctgtgttgcccaggcttgtaaggtatttaaaaatctgataggataagcctactgttgttacatttcaagatacgtgtatttggtatttaagcttgcttattctagatgaattctgatctgaatctgtcaggttctaaaaaaaaattctacaggaattaaatgtgtttttctccttctctatctggaattttaagttagttttatattgaagccttgtcttttcttgggaagctatttctttcctgttatttttatctttttttcccaccctrttaggtatttatcttttttctgggttttttttttttttttttgagacagagtctcgctctgtcgcccaggctggagtgcagtggggcgatctcggctcactgccagctccgcctcctgggttcacgccattctcctgcctcagcctcccgagtagctgggactacaggcgcccgccaccacacccggctaattttcttgtatttttagtagagatggggtttcgccgtgttagccaggatggtctcaatctcctgacctcgtgatgcgccctcctcggcctctcaaagtgctggtattaacaggtgtgagccaccacgcctgagtgctgttaattttttttcccttatagcctgcagcttttctcaattcacttattgtggtattttgttgacattattgatttcctaggatgatactcatgctttctacagagctgctttttatttcttcctttctcatatatgattagtctaattggtttttcctcagtattgattgtcagcctttccagccttgtatcatgtggaaagagaggctggggatgccttttgatgttttggttttaaaagagctgactctagcccttcactaagtataatgttggtgcttcgtaattttacgataaattatttaaaaataatatctttatcatgcataagcagcttttaaaacaaatacttggcttaagtcaaaaaactatgcagttcactttctccttgtaacatttctaaatttcatccacatctgaataatccttgtcttatttggaagaaatatttttttcctgaaaacattctttagtgtcagaaccatttgtgattatagtggttttacccctgccctactgagcgcatttgttgtaacccttagcgtgcatcttcactctgtggtacactcagatgtaaatcttccagaggctgatgggtgcttgatagtggcctttccttcaccaggaattgctctgatttctagtgaagtaaaataaccttccataaaagcatgaaaagtgtctggtcccaggtttcagtcctaactcagttttcaccttccaggttctaagtgcacattgaattttcttcctagacagtactcaaaaggctggggacagttgacatttctgtttgagtgaaaggcactctcatcccatgaatgtgtttttcttgggatttccgctattaatttttttttttttttttttttgagatggagtcttgtcccccaggctagaatgcagtggtgcgatcttggctcactgcaacctctgcctcccaggttcaagcaattctcgtgcctcaccctcctgagtagctgggataaccagcgcctgccaccatgcccagctaatttttgtatttttagtagagatggggtttcaccatgttgcccaggctggtctcgaactcctgacctcaagtgatccgcccaccttggccccccaaagtactgggattataggcatgagccaccgtgcctggcctttttttttttttaattttgaaatgattgtagagtcataggaagttacaaaaatagtaccaggaaaccctgtgaacccgtcacggagtctctaccagtggtgacaccttgtgggatttccattttygaggcttctaaggacagccctggctttttcagcatgtctttttagcatcttcattacagtcacagtctttttttttttttagatagagtcttgctctgttgccaggctggagttcagtggcacgatctccgttcactgcagcctccgcctcccgggttcaaggattcttctaccccagcctcccgagtagctgggattagaggctggcgctgccacacctggctaatttttgtatttttagtagagaggggtttcaccttgttggccaggatggtctcgatctcctgatctcatgatccgcccaccttggcctcccaaagtgctgggattacaggtgtgagccaccgcgcccggcctgcagtcacagtctttagtccatgctatgcttgtgcagtaatttccccagctaggagacaggacgaggtgacaaggtggttctttttttaaaaaataggtttagggggtacaagtgccatttccttacatgtatatattatgtaatggtgaagtctgggattttgcagtacccattgcccaaatagtgaacatagtacccagtaggtaacttttcaggcctcatacccctcccatccttccacattctggagcctccagtgtctgttttgttcgttgttgttttttgtttttcgagacagagtctctgtcgcccaggctggagtgcagtggtgccatcgtggctcactgcaacctttgcctcctgggttcaagtgattctcctgcctcagcctcccaagtagctgggattacaggtacccaccaccacgcccagctagtttttgtatttttagtagagatggggtttcaccctgttgaccaggctggtcttgaactccaacctcaggtgatccccctgcctcggcctcccaaagtgctgggattacaggcgtgagccaccgcgcctggcccctgtgtctgttactccattctgcatgtccatgttttaccccttgctcagctcccatggtgacgagattcttgtccttgttttgccattttcttttttccctgagcaaggcatttaattcatctcagccttaatttctcctctgtaaaatgagggattcagtcacacatactttgatttttctttttctaaagtgtgattgcttagctgaaagcctagccactagattggaagaagtcattgattagcacttgtctgagcagtgtgccctggttcttttcctccctaccttgcaaggaacaaacagcaatttaaaaactgaactgtcatttatgctcatttcaaagacacatagaatgataagagcaatatggagttgacggatttggagctggcaattacacagaataccagtaatgtggaaaaatgcaaaggcctatagaacgacttcctatccctagcaaaaattcacacagaatcctgtcccctgcacgttttaagtggaaaagaatgaccccagaaagttgatttaaaactaataaagctgtttattatcattaatgataatttctgtataattgtcacggagagcttatgcatgaatctgtaacttgtcgttattatggtcttcactagaaattgcatgtcttttttaatttctgaaataaattattgggatgaagagcactgtcagtttttgtattaaagtgtttcagtagagcgtggccgaatatttgacatgatgaatctgaatgaaatgatcagagctatgtgaggaatatggttctacgctggatgttttgtggacaaaacagaaaaaaaatcccagcctagaagcattattgaaattgcatcgaggaaaaactataatctgggggtcatactgtcactctgagagaactactatgttctgtctcgctttctcatcagaggaaatccttgtaccagtaccactcaaattctctgttctccgactcctggcttcaagcgattctgcctcagcatcccaagtagctgggattacaggcacatgccaccacacccagcaaattctccattctatacaactttttttttttttttttttttttgagacagagtctcgctctgttgcccaggctggagtgcagtggtgtgatctcggctcactgcaaccaccgcctcccaggttctcctgcctcagtctcccaagtagcttggattacaggcatgtgccaccacacctggctgattttgtatatttagtagagatggggtctcaccatgttggtcaggctggtcttgaactcctgacctcaggtgatccgcccaccttggcctctcaaagtgctgggattacaggcatgagccacggtgcccggccttttttttttttttttttttttgtatttttagtagaaacgggatttcactatgttggccaggctggtctcaaactcctgacctcaagtgatccgcctgcgtcagcctcccaaagtgctaggattacaggcatgagccaccatgcctggccctatacaacttttcaaattctctctctctttttttttttttttttgagatggagtctcactgtgtcgcccaggctagaatgcagtggtgttatcttagctcactgcaacctctgcctcctgggttggagcaattctcctgcctcagcctcctgagtagctgggattacaggtgtgcaccaccatgcctgcttaatttttgtatttttagtagagacagggtttcgccatgttggccaggctggtcttgaactcctgacctcaggtgatccacccacctcggcctctcagagtgctgagattataggtgggagccactgcacctggccaattctctcttatttatttatttwttttttttgagacagagtctcactctgtcacccaggctggaatgcagtgggcatgatctcggctcactgcaacctcygcctcctaggttcaagcgattttcctgcctcaggctcccaaatagctgggactactggctggcgccaccacgttcagctgatttttgtatttttagtagagtcagggytttgccatgttggccaggctggtctcgaactcctgacttaaggtgatctgaccgccttggcctcccaaagtgctgagattgtaggcatgatcyactgcactggcctctcaaattttctttatttcctttgatttaattcctgggckaggatcctctgccttgcacgtgtggttttgtgctgcattggctttggaatcagtaaccaatccctgtcctcgtactccttgccgactcaggaaaaatggaaattaacaagagctataaagtaatacagaaagggacagtgctcccatctatgattaagtgcacgcaactaattcatacttaaggtttttttgtctccttcccttgctctatttaaattgctgattctctcacacctgatgactcttctctcaaatgcccatccttgatatttcctcgaagttttgtgcaccgagggcggcctgagcctctggatcttcacttgggcatgttcctgcccaccttgcttcaccaggcaactgcggagcagcaggagcgcttcttcatgcccgcctggaacttggagatcattggcacttatgcccagacagagatgggtcatggtatggagtattcagtctaccttctgggttgggcgggcccctgtgagcttaccatgtgtggagtgcccaccatgtgccatcgatggtgtgtcgatgttctatggtctgtttaaatgagctctttctgcagagtccaggttttggtataaacactgctttggtgagtgggaattaaagaccatgatactgataaaatgattgtcctttttataccatagttccccttcagagggtcaagaattgcaaatcaggccttatttaccaagtggtttttcaatgttactgaggttgtatagaatctgtgtgcatatacaacccgaagctgtttttttcttcattactatctgattacctttactactgataccttaatgagtacaaattccagaagaaatacaaataatagtttgtgtactcttggatttgcttgagggaaatgagtagcttataactgacgtgtgtgacattttggagttatttgtactttgagtcaatcagtagttctgcaagtgacttggctggagagtgaaaaaaccaagataagccgaacttgcaggcatttggtttcagactctgtatctccacctttcattgatctttccaccccccacctgctttcttcatgcacctgggtgggctggaggtggccgctgttcctctttgtatcttctctgaattgggtccgtgtttgccattcatttgcttatggcttctctttttctgctctgacgtttcagaaaaactggtctagtgtgtatttgccacttgctccttatttctatacagctgctgctttttatttggtgttgaatagtattttacaggattttcatgagactccaagtggaatactatttgtttcagttgtgcttttgaaaacattttgtccttatctgttctgtttaatgttatctgcttttctgtaaaagctgcttctttgatgaaagatgtctgtgtctgatttgttgactcccactcgggaaagttgtggattgcacataagttggttattcaacttggaagcttctaaatgtttcaragtgtgtttaatgaggtctaagcgttatgaaagcagattggtaaaaggttcccaacgtttgctttagtacagtatttttgtagagactgccacctagaacatttttctatgactcttttcaaataattttgatatatttgtgttaagatttaaaacataagatcctgtctatcccagtacacataagaaactggaaactcttccttgccacattaatgaaccagcaggactaagttaggcctgccattggaaatctctagggtcaactgagaccttattattggacctttaggaatttttaaaagtcacatttcaggtcatttccccaataacagttatacttttatactttttttttttttttttttgagacggagtcgtgctctgtcgcccaggctggagtgcaktggcgcgatctcagctcactgcaagctccaccttccgggttcacgccattctcctgcctcagcctcccgagtagttgggactacaggcacccaccaccatgcccagctaattttttgtatttttagtagagacggggtttcgccgtgttaaccaggatggtctcgatctcctgactttgtgatccgcccgccttggccccccaaagtgctgggattacaggcgtgagccaccgtgcccagctttaatttttttgttgtttttttagtagagacggggtttcaccactttagccaggatggtctcaatctcctgacctcgtgatccccccacctcggcctcccaaagtgctgggattacaggcttgagccactgtgcctggcctttttctttttctttttcttttttttttttttttgagatggagtcttgctctgccacccaggctggagtgcggtggcacaatcttggctcactgcaacctccacctcccgggttcaagcaattctcctgcctcagcctccttagtagctgggactacaggcgcatgccacaatgcctggctaattttttgtatttttagtagagacgggtttcaccatgttagccaggatggactcgatctcctgacctcgtgatccacccgcctcggcctcctaaagtgctgggattacaggcatgagccaccacgcacagccatacatttttaatttatacgaattttggctgaaatgtcttcctctcacatgttatctcattcttctcattagtacagaattcaagaatgttgaattggtgtggttaacacaatacatatgacttgaaattggcatacttgcaactcagagatgggtttaaaaagacagttaacatccctgttaaattcatatattgtgatcttaaaaatgtgattctaagttgcctttatattttctttcagttgctgtaaataaatgtaacaaatcaaatacagaaatggaacatgcatgacacttagattttcaacttaataggaaaccatcagatagtgtgggaaattcagtgtcttggttatcaaccagttgtagctcatctacaggtgttttttgttagattttgtttttctctgagatatgagagtttaaaggactgtgcaggaaatttttccttgtgcctatttttttccccatctcttaactgaagtcaatgtaatttatctccttaggaactcaccttcgaggcttggaaaccacagccacgtatgaccctgaaacccaggagttcattctcaacagtcctactgtgacctccattaaatggtggcctggtgggcgtaagtgaatttttcagcatttattggatgttttgaaggtttgtcatgagattttgcttagaatgtagagcttttatgataatgtcggccagacttggtggtgaaatcctaacactttgggaggctgaggtgggcagatcacttgaggtcaggaattcaagaccagcctggttaatatgctgaaaccccatctctactaaaaatacaaaaattagccgggtgtggtggcgcacacctgtagtcccagctacttgggaggctgaggcaggagaatcacttgaacccgggaaggttgcaatgagccaagattgcaccattgcactccagcctgggcatcacagcaagactttgtctcaaaaacaacccaacaaacaaatatatgtgtgtgtggtgtgtgtacatagaggggtgtgtgtgtgtgtatatagacagagagaggtgtgtgtgtgtgtgtgtatatatatatatatatatatatatatatagagagagagagagagagagagagagagagagagagagagagagaggaaagccaggcatagcggcacatacctatagacctatagtcctggctactcaggaggctgaggtgggaggaccacttgagcccaagagttcaagcctgcagtgagctactatctgtgatcatgccactgcactccagcctgggtgacagagtgaaaccctgtctcttaaaaaaaaaaaagaaaaaaatttaaatagttttaacacaaacttttttttttttttgagatggagtctcactgtgtcacccaggttggagtacagtggtgtgatctccgctcactgcaacctccaccttctgggttcaagcgattctcctgcctcagcctcctgagtagctgggactacaggagcgtgccaccacacccaactaatttttgtatttttagtagagatgggatttcatcatgttggccaggctggtctcaaactcctgacctctggtctgcccgcctcggcctcccaaagtgctggaattacaggcgcgagccaccgtgcccggctgacccgaaacttttatatcttcttattccattctgagttattatcttggaatatatatttccaatacagttagtggttgaaggattttgttattcacattatatattttatttatttataatttatatgtaagaagccacatgtagctagtgattactgttttggacagcactgccttaagggataacaaggaagtagtttaaattaatattcttatttttatcctaaaattttctctaygtaaatgtatgagaaataagtagaaaagaaagtaataactattagcttaagggaatttctttctgaaagctaggtgtgatgctgtcagcagaaaggctttctggacacatactattggtttagtctagtgttagatttaacatattctttcttcttttttctaccctttaaaaatgtatgaacgtttgcccacccctcccttgttctctttgatattacagttggaaagacttcaaatcatgcaatagttcttgcccagctcatcactaaggggaaatgctatggattacatgcctttatcgtacctattcgtgaaatcgggacccataagcctttgccaggtaagaactgttcatctgatgttgagatgaaaatgaaactgagcrctttcttctgcaaaaggtagaatgcccaactgaagaggcggagcaaaagccagaaattccagagcataaacatctcgtgactgtcctttcatctgtggtaggaattaccgttggtgacatcggccccaaatttggttatgatgagatagacaatggctacctcaaaatggacaaccatcgtattcccagagaaaacatgctgatgaagtatgcccaggtatgttttgatagaaaataaagcagaggcatcaaacagtggagttgagtggctgttactcacaatagggttagaatggtctgttcttttagaaggtaataacagcagggcacactggcatattcctgttatcccagcactttgggaggctgagtgcgtggatgacttgagcccaggagctcaagatcagtctgggcaacatagtgagaacccatctctacaaaaagtaaaaaaatctagctgggtatggtggcacacgtgtgtagtcccagctacttgggagactggggtgggaggatcacttgagcctgggaggccgaggctacagtgagctgtgattatgccaccgtactccagcctagatgacagtgagaccttgtctcaaaaaaaaaaaggaggctgggcgcagtggctcacacctgtaattccagcacttttgggaggctgaggcgggaagatcatgaggtcaagagatggagaccatcctggccaacatggtgaaaccccatctctactaaaaataccaaaaaattagctgggcgtggtggtgcgcacctgtagtcccagctactcaggaggctgaggcaggagaatagcttgaacccgggaggcggaggttgcagtgagcagagatcatgacactgcactccagcttggcaacagagtgagactccgtctcataaaaggagggaataaggctgggcgcggtggctcatgcctgtagtcccagcactttgggaggccaaggaggatggatcataaggtcaggaattcaagaccagcctgaccaatatggtgaaaacctgtctctactaaaaatacaaagattagccgggtgtgatggcacacgcctgtaatctcagctactcaggaggctgaggcaggagaatcgcttgaacccaggaggcagaggttgcagtaagtcgagatcacaccactgcactccagcctaggcaatacagcgagactctgtctcaaaaaaaaaaaaaaaaaaaaaggagctaataatgcatttttccttctgatgccccttttttttttttttgagagagagagtctctgtcacccatgctggagtgcagtggcgtgatcttggctcactgcaacctccgcctcctgggttcaagcgattctcctgcctcagcctcccaagtagctgggattacaggcatgcgccaccacacccagctaattgttttgtatttttagtagaggtggggtttcaccctgttggccaggctggtctcaaactcctgacctcaggggaccctcttgcctcggcctcccaaagtgctaggattacaggcatgagccaccgcacccagcattttttggtttttttttttttttgagacagagtcttgctctgtcacccaggctggagtgcagtggcgcaatctcagctcactgaaacctccgcctcccaggtttaagcgattctcctgtctcagctcctgagtagctgggattacaggcacgtgccaccacacgcagctaatttttgtatttttagtagagatggggtttcaccatgttggtcaggctggtctcgaattcctgacctcttgatctgtctgccttggcctcccaaagtgctgggattacaggcgtgagccatcacgcccactctgatgcttcttttactgcgacagtgaaatcagaaacagttgtcagggttgaaggacatattttgatttgctaaaccaatgattctcaaacttttgcatgygttagaatcacctggaaggccagttaaagcccaggttgctaggccctaccctggagtttctgattcagttggtcagggtggggactaagatgtagtatttcatgcaagttgccaggtgatgctgatgctgctattccagggaccacactttgagaaccactgaactgcctcttgggcttaaaagaaggaagtatcagttccacgttcttcttccaggtgaagcctgatggcacatacgtgaaaccgctgagtaacaagctgacttacgggaccatggtgtttgtcaggtccttccttgtgggagaagctgctcgggctctgtctaaggcgtgcaccattgccatccgatacagcgctgtgaggcaccagtctgaaatsaagccagggtaaggatagggtcctagatgrgctcagtaccaaaggcctagtttttaccccattcagatcccagaattcccaaatgtcaatacagaagatgcattagcactgcaaaattggctagggtgataactgggcctgtaatttcatatctaggcttccttttcttaagaggaaagacagaaataaccacccttgctataatcagtgactgccaaaaaagaaaaaaagagaatacccaccttattatttttaactttttaagaaaaatagtaataatattacttgaactttataagtgaaatgttcaacacactaaaggcagtttgaaagttctgattactactagcaactgtaaattgtgcatggtgaaagtgacattaaatttgtttcccttttgcattcatagccacagtttattcctacaactgcctttcactgatactccctgatactctttttactcctaaggaataaagaaactggccaggtgtrgtagctgacacctgtaatcccagcactttgggaggctaaggcaagaagattacttgagcctaggagtttgaggccaacttgagcaacatagtgagaccctgtctctattttcttttcttttttttttttttttgagatggattctcactctgttgcccagactggagtgcagtggcgcgatctcagcttgctgcagtctctgccaccctgggttcaagtgattctcctgtctcagcctcctgagtagctgggattacaggtgcacgccaccatgcccagctaatttttgtatttttagtagagacggaatttcgccatgttggccaggctggtctattttcaaaaaaattaaaagttaattaaattttaaggccaggcgcagtggctcacgcctgtaatctcagcactttgggaggccaaagcgggtggatcacttgaagtcaggagttcaagaccagcctggccaacatggagaaaccccacgtctactaaaatacaaaaattagctgggtgtggtggcgggtgcctgtaattccagctactcgggagactgaggcaggagaatcacttgaacccaggaagtggaggttgtagtgagccgaaatcacaacactgcactccatcctgggtgttagagacttcatctcaaaaaataataataataattacatttttaaaaaggaataaaggaattgatacaatgagacccttgctaattcttacacttcaaaatatttaacaccatccattgggtcttctccaagattgtggtcaaaatacaatgtattcagccatctggtgagtagagctttttggcattgccttcttattaggttgactagcgttggttttgtatgttgctatgagctacggttttcttagtcatactggaaagactaggacagatatggactttgcagccagaaaattctgtcagcctacgcagtacaaggtaattacagcatggtcttagggagccaaatagcctaggcaccgtggctcatgcctgtaatcccaccactgtgggaggctgaggcaagagaatcgcttgaacttgggaggcggagcttgcagtgagccaagatcgcaccactgcactaaagcctgggtgacagagggagactccatcacaaaaaaaaaaaaaaaaaaaaaaaagcctcaatttaaatctaagacctgccacatacgagctgtgtgacctcaggcagattcttaacctctcagtttcccatttgtaaaatggagatagtaatagtaactacctcacagtgcccttaagaggactaaataagttaaaataccaagtgcttagattagaacctggcatatagaaagttctgtataaacatttacttactactttttttctttttctatgtcacgtagtgaaccagaaccacagattttggattttcaaacccagcagtataaactctttccactcctggccactgcctatgccttccagtttgtgggcgcatacatgaaggagacctatcaccggattaacgaaggcattggtcaaggggacctgagtgaactgcctgaggtatgagtttggtctcattcactcatgggcacccttctgtttcrtggttgcctgttggatgaggtccagagataactaaatgttggtatttcctgaaaagaagtatgtattctgagaacttcttctggttgaaagtagatcagatatgaagatctgtggggtttgttgttcagtatttttagtgttatcagaaatactgtaccatgttgattatttgtcaatcaaggaaatgtaagtggtgaatgtttagccaagtagaacagcttagatgggcatgggtagtgttctgtattcttctggccagtcggacagctgtgcttcttcagtttgcatgtgtggcagctgtgttttgacagtggccaagatgttagaggaggggtgtgttttctcattggttctcgggctctcagcaccacagatgtcctgacagatctgtgcttgtcctctcagcttcatgccctcaccgctggactgaaggctttcacctcctggactgcaaacactggcattgaagcatgtcggatggcttgtggtgggcatggctattctcattgcagtggtcttccaaatatttatgtcaatttcaccccaagctgtacctttgagggagaaaacactgtcatgatgctccagacggctaggtgagagtcaaatcctcgattcctcccatctgttcataagaatgttctagtccttttcctaggttcttgttcccatggtttttcttcaccgtatatatatatttgttcctgaaaggtatacttttgccttccatcctgactcacggtttttatttcgtggtgaggctagagagtatgaagcacctgttacatagcttgcagttgtatcaaggatagagttactgggctgggcacagtggctcatgactgtaatcccagcactttgggaagctgaggtgggcagatcatgaggtaaggagttcaagaccagcttgatcaacatggtgaaaccgtgtctctactaaaaaaatacaaaaaaattagccgggcatgatggcacattgcctgtaatcccggcctacttgggaggctgaggcagaagaatcgcttgaacctgggaagcggaggttgcagtgagccaagattgcgctattgcactccatcctgggcaacaagagcgaaaactccatcaaaaaaaaaaaggccaggtgtggtggcttactcctgtaatcccagcactttgggacgccaagccgggtagatcacttgaggtcaggagttaagagaccagcctggccaacatggtaaaaccctgtctctactaaaaaaacaaaatattaaaaattagccaggaatggtggcaggtgcctgtagtcccagctacttgggaggctgaggcaggagaatcattcatttgaacccaagaggaggaggttgcagtgagctgagatctggccattgcactccatccagcctaggcaacaagaatgaaactccatctcaaaagaaacaaaagaaagtagagttactaaaagcatgtttactggtgacttttaggttcctgatgaaaagttatgatcaggtgcactcaggaaagttggtgtgtggcatggtgtcctatttgaacgacctgcccagtcagcgcatccagccacagcaggtagcagtctggccaaccatggtggatatcaacagccccgaaagcctaaccgaagcatataaactccgtgcagccaggtgagctctccctcaagagctagaatacgcagcagtggggctggggccctgacrgatggcaagaaggcatgagtactgttgatcatttcctcagacctccaatctatgtcttaacagattagtagaaattgctgcaaaaaaccttcaaaaagaagtgattcacagaaaaagcaaggaggtagcttggaacctaacttctgttgaccttgttcgagcaagtgaggtcagtggtagttctctctttttccccttccctgccctcagcatccygcattttctggtacagaaaccctagtcactgtatattgaatctttttccaaggttctcaaactctggtgttttctttttaatcttaggcacattgccactatgtggtagttaagctcttttcagaaaaactcctcaaaattcaagataaagccattcaagctgtcttaaggagtttatgtctgctgtattctctgtatggaatcagtcagaacgcgggggatttccttcaggtcagtattttctaagtataagtcttttttgttgttgttttaagaaaaataattgttggctgggcacggtggctcatgcctgtaatcccagcactttgggagcccaaggcgggtacggtgatcacttgaggtcaggagttcaagaccagcctggcctggtgaaaccctgtctctactaaaaatacaaaaattagccaggtgcagtggcacatgcctgtaatcccagctactagggaggctgaggcacgagaatcatttgaaccctggaggcagaggttgcagtgagccaagatgaaaccactgcattccagcctgggtgacagagcaatactctgtctcaaaaaaaaaaaaaaagaaaaagaaaaatagccaggcacagtggctcatgcctgtaatcccaacactttggccaaggcgggcagatcacctgaggtcgggagttcgagaccagcctgaccaacatggagaaaccccatctctactaaaaatacaaaattagccaggtgtgctggcgcatgcctgtaattccagctatttgggaggccaagggaggagaattgcttgaacctgggaggcggagattgcggtgagccaagatcacaccattgtactccagcctgggcaacaagagtgaaactcagtctcaaaaaaaaaaaaagaaaaaaataattgtcatccgctttatagctgtatatgcatatmattatgtctatctatatacatatatatgttttatttacttattttggtctcttttaggggagcatcatgacagagcctcagattacacaagtaaaccagygtgtaaaggagttactcactctgattcgctcagatgctrttgctttggttgatgcatttgattttcaggatgtgacacttggctctgtgcttggccgctatgatgggaatgtgtatgaaaacttgtttgagtgggctaagaactccccactgaacaaagcagaggtaaaaatccagtgtctctgcacctttttaaaagtcttcacttaaatattgaagcaggaaaggcctctcgaaggggatttatctgtgaaagctctgaaagtaccatggccacttctgacagtcactttatttgagcaacaggttcagaagggaactgggttgttcccacagtaaccagggtcttaatcaatttcaatttttgataacgaattgaacatttaaaaatatatacaggccgggtgcgttggctcacacctgtaatcccagcactgtgggaggccgagtgggcagatcacctgaggtcaggagttcgagactagcctggctaaaatggcgaaacccaatctctactaaaaatacaaaaaaagcagccaggcagtaatggtgcayggctgtagtcccagctactcgggaattctcctgcctcagcttgaacccaggagaacccaggaggcggaggttgcagtgagccacgttcgtgccattgcactccagcctgggtgacaagagcaaaactctgtctcaaaaaaaaaaaaaaagtatacacacacacacacacacacaaatagaataaaatatacaaaaagagaattccgtagtgctctttggtacaccctttgtctagcagcaatgactatcaactcgtggctagttgtgtttcatctgaaccttcatccccctcctcctggggactattttgaaataaatctaagacatcagggccaggctcagtgatgcacacctgggaggccgaggcaggtggatcacctgaggtcgggagtttgagaccagcctgaccaacatggagaaaccttgtttctactaaaaatacaaaattagccaggcgtggtggcgcatgcctgtaatcccagctacttgggaggctgagacaggagaattgcttgagcctgggaggcggaggttgcggtgagccgagaccatgccattgcactccagcctgggcaacaagagcgaggctccgtttcaaaaaaaaaaaaaaaactaagacatcagataattttatccataaataattcaatgcatagctctaaaagataaggactcttcagaaacaaccacaggctgggcacagtggctcacgcctgtaatcctagcactttgggaggctgaggtgggtggatcacttgaattgaggagttctagaccagcctggccaacatggtaaacccccatctctacaaaaaaatacaaatagcagccaggtgtcatggcacacacctgtagttctagcaactcgggaggctaaggtgggaagatcgctggagtctgggaggcagaggctgtagtgagccaagattgtgccactgcactccagcctgagcaacagagcaggaytcagtctcaaaaaaaaaacaaaaacaaaaacaaaaaacagtatactatttaacatggcaaactctttattagtagttcttctctctcctttccccacaggtccacgaatcttacaagcacctgaagtcactgcagtccaagctctgaagtgtcacaaggacaagtttaatctgcttcagaaagcgcctgtgtgcaactcaaattttgtggaatctttttcgaattcaaatagctatagagcaaatgataaattgacccctttttataaatggagggaaaaaatgaacagatttcagagattaaatgaaaaaaagcagatgttttaagtgcaattaacactgaaagagacctgttaaaccattcagaaaaagcttaagaaatgcgatatgacttccttttgtaatgctgctgatcccagtagactatgacttttgataattagcagaatttaactactgagtagttgattattttcacattttaattgctaatcactggctatataagtgtttttaagcaaaggtatttttgaagtggtgtagaacccttccaagctttcctgctcagtgttctaccagacttaccctggggcctggcttaaaagcaggattgaagaaaagggactgggggaaggaaacttattggaaaacttgatgcgaatgagtttctgcttggcacagtctctgcctgcttgctctcctttgctgatggattgcatttatcaaactattcatgctagcatttttccaacgagggaacttattccgcacgggcctactgtaggaccattgtctcgtgtarttaggaattttccatttgaaggatygctaaattgtcacagtagtaggaagtatagggaaacctctcagctgtggcactgttgtagctttggagtgcagagtgtaactctgggacaatcagatttcacatattctgtcatcttggcataagccattaaaagcttggagattactgtatttggcattaaaaaaaaatgtcacttaggtcagcactcccagaygtagcacagaaaaaccctttgacacaaaccatgtgttctgatttttggttcagaaaatattgaaactgtgagttgttttttttttaacaactgggaaaaaacaaaaacaaaaaactatagttagaaaaatggaagttccataggttctatttcttactctatgtatggctttgttttcagtctatttctaggagctttctctgaatcgctaattgtcctttcagttgaaatctaatttatacaatcattctatacttaaaggttaaatacatcttaattaattttttcttaaagtcaatgtaagtcactttgttttgtttttttttaatctacgccatatgcctcatgaaaccagctgttctagaatcagtcctgagaatatggcttaattccatggaaacataactcctatcttgggacctgacataatatctatctatcctggggaactggtaatatgagacttataggttacagcagaaatgctacatgttgacaaaagccttaatcgttccactgggagaactaattgataattgtgttaagattgaagattaaccctgtgttaatctcacttgagtctatcctgacagtagttcagattctggaaaatgataaactgacctgctagatgtagaattgtttcaaaattagtgttgaaataccttgttcacagatgaatatctgggcaggatctgagggtgtttggaatgacaccccccaatccagttgcatagatgggatgtctttgcaggtttgaggagatcatcgacctgcagagccccctttgacccagtacctcacgttttatttaaaatctaaatctggggccaggcgtggtggctcacgcctgtaatccaagcactttgggaggccgaagcgggtggatcacctgaggtcaggagtttgagaccatcctggccaacatggtgaaaccccgtctctactgaaaaaaatacaaaaattagctgggcatggtggtagcacgcgcctgtagtcccagctactcgggaggctgaggcaggataatcgcttgaacttggcgggtagaggttgcagtgagccaagatggtgccactacactgcagcctgggtggctgagcgagactccgtctcaaaaaaaaaatctaaatctgacatttgatgctatttttattaatattggaatgttctgtcttgaactttattcaatataatcaagaataaagatagagtaaacgtcactgatttgtactattaagagagaaaaaatatgccacacaactaaacataggtttaaattatgaagaaatttagaatagaggtttattagatttagggaacactaagaacaaaaaaggaaggagtgatacctgcctgagtggacagctgtaaatcagctgtaattactgcagttgtaccaatagttgtgagtggctccagtcactttaggagtccttggaagtacttggtacacatttgttggctgtaccttaaaggaagtggcaagtccagtttgttctctctaccacactagactgccactgacaagtttgggtctgttggattcaaaattttgtaagccattttcacaagtacaaagatacattttaaccttgtcttctccaaaattactgagtaggaattttatttttatctttttgagacagggtatcactgtcacccagactggagtgcagtggtgggatcttggcttactgtgacctctgcctcccgggttcaaatggtcctccctcctcagtctcctgagtagctgggacgacaggcacgtgccaccatgcccagctaatttgttctattttttctgtagagacggggttttgccatgttgcccaggctggtctcagactcctgggctcaagcgatcatttcgcctcagcctcccaaagtgctgagattataggtgtgagccacagcatctggcccagagtgaggagaattaatgagattttttgtgtgtgttagataatattgatttaagcctttttttaaaaagtactctcaaccaaatacaaaattgaaaatgtgaggtttaatagaaatgtgttggctatttgcaatggattttcttcttgcccaagtgtttggagttctactttatgctctgtatttaaaaattagtgacctcaaagcagagttgatgacacaggctttggggccctcatgttcttgtctttagaacatatcactactaagtatcagcttatcttcagaacattacaacattcaccgtgttcatatgctttctgagaagtcaccacttgtaatttcagatcacatacacctgaaggcattttatagttcctaaagttaacatgttagatcttttttttccaccccatgagggtctcactctcacccaggctggaatgcagtggtgtgattgtagcacactttggccaccaactcctgggctcaagtgatcctcctgctttggcctcctctgagaagctgggattactggtgcacaccaccacacctggctaattttttatttttttttatttttggaaatagggtatggctatgttgccttgggcccgtcatgaactcctagcctcaggtgaccctcccacctcaggcctcccaaagggttgggattacaggagtgagctactgcactgggccaacatgttaatttttttttttttttttttgagatggagtctcccaggcgggaatgcaatggtgcgatctcgacttcactgcaatcttcacctcccgggttcgagcgattctcccacctcagcctcctgagtagctgggattacaggcacctgccatcacgctcggctaatttttgtattttgagcagagatggagtttcaccatgttggccaggtgatctgcactcccactccccccacacttcccaaagtgctgggattacaggcataagccacaagccacctcacccagccaacatgttacatcttaattcttggattttcttcactgcagggctttgggtggagaaataaaactcttcaaatgcatgatcttggagatccctgtgaatcaataattctttagacaactgcggctcaaaatccctcctttcccttttccgagttattccatccatcttattagaaaggaagtgaattaggtgtaggtggtctgtaacacctgcacatctttttatacgtgtagagggtatgcctgggatatataggttgtcttcaagcagtagctgctactacagctagagagaggaggagtgccaggaaactgatgacctgagaccaagagtcttgttgatgttctgacttagataaaggttttgatcattttcatgaaataatgcagggaagtcatttctgctgtttctttactactccattcttggaggattagaacaagtcacactgtaattgactaaaacgactttttattttaaaatattgatggtggggttttgcttttttttttttttttttttttgagacgttgtcttgctctttcacccagggtagagtgcagtggcgaaatcttggctcactgcaacctctgcctcccgggttcaagcaattctctgcctcagcctcctgagaagctgggattacagcgcctgccaccatgcctgtctagtttttttgtatttttagtagagacaggggtttcaccaagttggccaggctggtcttgaactcctgacctcgtgatccacccacctcggcctcccaaagtgctgggattacaggcgtgagccaccgtgccgggccagtgtttttaactgtccacacttactaaattttccagtacttcttcctatggttcatgatagtaaacacagaaacatataaggaacattattagagttaccagatgttagctgttgcatatgtgcacattcctagattcaagggtgtttttgccttaaatttaagtgggtcattggttgtcttgggaagatcatggaaaattcgggattttttagaattctgaaccaaaatatgttttgagtgtttcttagtaaatgtgtgatcttccaccttccacattcagactgcggactacacttcataaatgcctttttatttccagttatggattcaactaaatgactgccttgggagcacataattactttgctacctttttccccctttgctgttgtggctcgagtttggttctcacctgagaagatgcattgagcatatgttgttacccagccctggcttaatggtgtcctgtggggtaggggtgggaggacgaggggcacggggccagagcatgtgaatggatcatggttggacagctgtgacctgccagcactgcgggtaagcaaaactacaaaccgttctttcctctgtgacattgaataaaccttaataaaattcataattagcacatactagaaaaaatgtgacttaatctttttgtggggcgacagtattgggtttcattctggctatacagctttgattggatcattaaacaggtcagtcacttccctcaagctttggggtgtggaataaacaccggtgaatttgtggattcacccgtcaacctcccaatatcaacacatttctcacgcctccgcgtcggccacgtgtcagccctcagaagtgggcaggaggaacttttaagcttcccggcagttcccaagagggcctttgagcctggcgccctcttcccggagaggcgttggggcagctcctagcaacgtgcccgccgccggcagaagcccggccccgccaactgccgcgcgcggctccctgggagctgtagttcttcatggcgtccccacctcctctgtgagggcgggtgagtcgaccgccgactgcgactcccaggatgcctcgcgcccgcctttccgcgggaggccagacggctgagggtgccggcagcggctggaagcgggaggccagtcctggccgggctgggcgacccgaatggagccagggccggcgctggtcccagcggccgcacctccgggggcacggcgcgtaacaggaggcttccggggctgagagcgttacaggctgcgctccggggccagataggccgggcgctcagaagggtgacgcattgaggggcgcggagtctcgggacggaggggcgactccggctaggggtcttgcttaggggtggtctcgggatctgtaaaacgcctggcatggagtcggctgaatacatgtggggacggggttactctgtagccctttggccttggcaaaccaagcctagaaaatccccatagtctgagaagcccgtacaggatcgataggagatgccagaagttccttgatgtgttatgggacacatttggacttgtaggtcgtgaagtcgccattgcagagaaaaagaaacaaggccgggcacggtggctcacgcctgtaatcccgacactttgggaggccaaggcgggaggatcacttraggccaggcgtctgggacgaccctgggcaacatagggagacccccgtctctacaaaaaaaattttaaaatttgccgcacatggtggcgtgtgcctgtggtcccagctgctagggaggctgacattggaggatcgcctgagcccaaggaggtcgaggctgcagtaagctatgagagctgtgatcgtgccactgcactccagcctgggcaacagagcgagaccctgtctggaaaaaaaaaaaagaaagaaggccaggcgtggtggctcacacctgtaatcctagcactttgggaggccgagacgggcagatcacgaggtcaggagttcgagacctcctggccaacagtgaaaccccgtctctactaaaaatacaaaaattaaccgggcatggtggcatgtgcctgtattcccagctactcgggaggctgaggcaggagattcgcttgaacccgggaggctgaggttgtggtgagccaagatcgcaccactgcactccatcctgggcaacagagcaagactccgtctaaaaaaagaaaaaaaagaaaacacatgtattcagggtgggctctgtaggtaagcccagataacccttgcattccaataacaggacaggccaatacttgggacataaagaggacccctctgactcctttcttccaggacatcctgtaggtgggttttggtaaagtggaggagggggagggagacagctaattccgaggaaaatgttctcaatgggtcagatttactgcctatgtaaagggaaatatttccactgtcagtgaaaatcgtgttgctggacgtggtggctcacacctgtaatcccagcactttggaagaccaacgcaggaggattgcttgagccccagagttcaataccaacctgagtaacacagtgagaccccgtctcgaaaaaaaaaattttaaaaagaaaaagaatatcaaagagtaaccagagttcatacctgcttttgtgctaaatgctgcctagaaagtagtcatgggtgttgcctgggaaagggtttcagccttggtgccaggcacccacctcctttctgaaatgagtacttgccacttgctgcatcggctttcagggtaagggatgatggccactgcccttttttcaagtaatctcaaagcctcagaaagcccattaagttatccagagcacgttttttttttttttttttttttg

SEQ ID NO: 93829 - DNA, 21444 bp, Homo sapiens
gatcatcttacattgctgttttcctttgggttattttcccatatttacttatgagactatgtgttaaaataaatctttttttctgtcttttgttgccttttgacttcttggggacacttttggttagtttatatgaagccaattttgtccacattttcttttgtagctgtactatccatccatttcccagggttttgtggggcttcctttaccagatgtgggttttcacttattcacatatctgtctctgagctccctattccattctttggtctgtttttctgttcttgcagctttgccatgctacatttgttactgtaactcagtaataggtcttaatgtctggtagaatgactttctcttctgtttttatttcagtaatttgggggtggggtacaggtggtttttggttacatggatgagtgcacctgtctcctaaacagtgtacactgtactcaatatgtaaccttttatcccttgcctccctcccaacgtccctccctgagtccccaaagtccattatatcactctgtatatttttgcatcctcatagcatagcttccacttataagtgagactatatgatatttggttttttattcttgagttacttcacttagaataatggtcccagctccatccaagttgttgcaaaagacattatttcattccttttaatggctgagtagtattctatggtgtatatatgtcacattttctttatccactcatttgtcagtgggcacttagattggttccatatccctgcaattgtgaattgtgctactataagcatgcgtgtgcatgtgtctttttcatataacgacttctttccctttgggtagatacctagtagtgagattgttggatggaatagtagatctacgtttagttctctaaggaatctccttactgctttccacagaggttgtactaatttacatttgtagcagcaatgtaaaagtgttcccttttcaccatatccacaccaaaatctattgtttttttgactttttagttatggttattcttgcagaagtagggggtatctcactgtggttttaatttgtatttccctgatgattagtgatgagcatttttaaatatgtttgttcaccgtttgtacattttcttttgagaaatgcctattcatgtctttgcctactttttgatggggttatttgattttttgcttgctgatttgtttgagttccttgtagattcttgatactagtcccttgtcagatgcataatttgcaaatattttcttccactatgtgggttgcctgtttactctgctgattgtttctttggttgtgcagaagctttttagtttaattaggaccgatttctttatttttgtttttgttgcatttgcttttgaggtcttagtcatgcattctttgcctaagccgatttgcttttctctaatattttattttcagattgagctagctctttatgatgtttttcttcccaaaaaagtttagagtaagttcatcaagttcctaaaagttagatagattatcatttgcactgaatatattctcttgtttgacttgaatatgtgattgatatgtgtgaaaacaggtaacatcataatattgacacatagtttgtcatagtaaaatggttattaatgtattcaaataatatttaagcttttaatagagcttaaaatatttgcttagatatcatatgcatgttttgttaaatcaatccttagatattttgttgctatggtgaaatgtatcttttattcagatagagggaaatgtataaattcattggaaatacagagactttacgtctcttgttaaaatttaattcagatattttatattattatcattattattaatatcttatcttttatctttttccagatgcttcttattttcctggaaaaaaaatcaactcaatctggttgccatgtcttataataggacaatgtttagattactcaagtatatagttttttttaaaggctgttaaaagctctagaagaaaccatgggaaaattattttatagcttcagagtagggataaccctattttgatacaagtcccaggagctacacaagaaaagactgacatactgttaaatgagaaaagatatggaatatgtgtatagtatatgatgtactcatatttttaagatactaaaaattatctctagaaagatacataaaaataataataacttaggcaacctgtgaggagaagaagcaggtgactttgggccataggggtagaggatgttttatagtttttaaatttagagccacttaagtgtacaatgtattaaaattttaaactgccacagaaaaagaagaaagattaagcaaacaattcagctcccttactgggtcttaaacgtttataaatgttttccagtgaagtgttctgtttttctaagtataaaatcaccgtctgccaccgccacatttcaaattgcattcctctcttttttattcccttgtctaattgcatttgctactatcgctaatacaatgatgaataagagcaaaacagtggatctgggtattttgtttcttattcacttgcattttgtgtttgctttcttaccataaaggatatttacctttaggccaatatgttaacctttttaatagctggcttcagagtgttgtgttttcctsagaataatctttaaaaaatcggcaccatttttttctggtacttttctaattttctgcttttctaatttttttctgctttttaaattctccagtatttcatccatgtggaatttattttgtgatagggagaaaaagtctcgcttggaaacagagaagctggagaattgtgtctttgttcccttgataatgattggggctggggtgttttcttagggacgacctggcccagctgcccttcctgaccatgtgcattaaggagagcctgcggttgcatcccccagtcccggtcatctcccgatgttgcacgcaggactttgtgctcccagacggccgcgtcatccccaaaggtgctcacagcctcagggggaggagcctcctgggtagcaagaggggtccctcaggcaggggggccttgtcctgactgccctcttctctcccacaggcattgtctgcctcatcaatattatcgggatccattacaacccaactgtgtggccagaccctgaggtagtgcctccctcaccccaccctttttggagtccattccaaggttcctagaggaggtgacagggttttgaccaggaaaatccaacatcacctctcctcaatggagacacatctgccaaaatgtctctccaaggccgggggtcttggagacaactgggagaccccacccaactgggtgaccccacccagcaagccttcttggtctcacctgcaggtctacgaccccttccgtttcgaccaagagaacatcaaggagaggtcacctctggcttttattcccttctcggcagggcccaggtaaggatggcctgtgtctgaggcagagatggcatgatgggtgcaggggtccaaaaagggggaagttacagatggtcccagttccagctctccttccctcccttcctcaggagttcatgggcaactgttcacagaatgggtttgggaaggtcctagaggggtctgcggtgtgctcagagtcccctccttcatctgtttatctgaactgggggtaggagcctgggccaggtttgggggatatgcaagcacacatgggagtcctgtggacacttatcccctctttctgcccctcaagcctatgtgggtgcgtttggggtcccaggccaggttctaagcatgacggggccgggatgggggtcatgggcacagtcagatcccctcacttttgcccccagaaactgcatcgggcaggcgttcgccatggctgagatgaaggtggtcctggcgctcaccctgctgcacttccgcatcctgccgacccacactgaaccccgcaggaaacccgagctgatattgcgcgcagagggtggactttggctgcgggtggagcccctgggtgcgaactcacagtgactgccctacccacccacccacctctgtagagtcccagaaacaaaactatgctgacacctctgcttgagcctcgttgacagccagcatggggctcctggggactggtgggatctaagaaagggaggtgagtgggtggaggcagggtgacgtctctgaacccaaaaccctgacggcctctctggctgagcacagggcatctaggcccttagtgggttctcccagagcccaagtaaaaactttatcctgtgggcagtagggagccctgggaggtgtttgagcaggagagggaacaggattaagaatgggtttaaggagcaagactgagactctgattcagcgagaaacaaccataggggcagatcccttcatctgtcctgggaatgtcctcccaagactggagtcctcagctcagaacaaagggaaaggggtgcagcttccaccctggcaggctctcagaaatttttagttcctttttccaccaacttcccacccctgtttctccccctcccagtgcgttctctctgtgactctcttcccttactttcagaggcataggatctggagccagactgcttgggctcaagtcctggctctgctgcgtgacttgagcaagttaattcctctctctgtgcctcggttccctcaaccatataatggagacaacagcattacctatatcagggttttcctgaggtctcaatataagggactcagagctgtgcctggcacacaatgaatgctaaatatatggagccattattatttcctgtctcagaaagtctggctgttaaagaatgttgtctttcaagatcgttatttctaccacgactttaaaggctgtgttttggaactcaaaggcaaaaattctaatatctgtgctccttgaacaacctcttctcctagagggctgtgcatataagatatgtatatatatatatatattatatatatatatatatacacacacacacacacacacacacacatatatacatatacacacacacacacacacacacacacacacacacacatatatatatatatatatttttttttttttcctgaggatggtgaaggtacctgactgtgtgaggtggtaggagaatgagagaaacctcagtcagtgtctcaaaataaaatcctgctacaaacattgatctcttttcatagcctaagggatgttgcatcgctaaaccctgttgacttctctaatctcttctgtagctgatctccttcccttgctacactcggttactctggccttgattctgatctccaaatacattatattttttatttgggaccatcgtattgcctttgcacctttatcaaatataagttgcctatatttatttggatctattttttgggcttttaatattctgttccattgacctatttctcttttcttttaccaataccgcaacatcttggttactgtagcttcacggtaagtcttaaaacttggatattgtcagtcctccaactatgttctactccttcaatattgtgttggttattctgagtcttttgtctctccatataaattgtagaattagattgctgatatccataaaaaaactttctggagggccccagggagcgcggggcgccgctgctgctgctgctgctcctcggctgggttgtgtctactgggcccgcggctgcggcggcagaggggcctgagccgggagccgcgctcagccgagagttgggcagagggagtgcccgcgccgccgcggcgtcatgggccccctcccctcacctcagcgggcaccagccgcgggaacccccgggcctcctcgcgcccgagcctgagcgacccctgggttctccggcgccccctccctccccctatttttcttttcctgctcttgctgaccctaccgcttctgttctccgttatggcaagagagccaccatccccgctccgggtcgaggcgccgggtcccccagaaatgcggaccccaccggcgatcgaggccacccctaagggcaccctgcagccggcaggcggcagactccgcttcctcagtggctgtgtgcccatcttgcatcaggtggccgggcacaggtatgggaaggacaaaatgggtatactgcaacatccagatggcacagttttgaaacagttacaaccacctccaaggggcccaagagagctggaattctataatatggtttatgctgctgactgtaccgatggtgttcttctagagctacgacaatatttgccaaaatattatggcatctggccacctcccgctgccccaaacgatttatacctaaaactggaaaatgtgacccataaatttaataagccctgtataatggatgtaaagacagggcaaaaaagctatgatcctttttgcctcatctgagaaaattcagcaacaggtcagcaaggacccattaatggaagagattgggttcttggtgcttggcatgagggtttatcttgttcattcccatagctatgagacacaaaccaacattatggaagaagcttaacaaaagaagctataaaggatggagtctccggattttttcataatgggyactgcttaataaaagatgctgttgctgccattattcagaagactgagaaaattctgcagtggtttgaaaaccagaagcagcttaacttttacgcaagttcattactgtttctttaggaaggttcatctcagccaatcactacaaaactgaatgacagaaatttggcagaaaagtttttgtccaaaggacaactgtcagacacagaagtactagagtgcaataataactttcatgtattaacttccacagtgaatggaaaaatagaggcttcagtaggcaaaagcttgtccaagatgtatgcccatcacaggaaaatgtatacaaaaaagtatcacagtcagacttcattgaaagttgaaaatctagagcaagacaatgggtggaaaagcatgtcacaggaacatttaaatggaaatgtactttcccaactggaaaaagttgtctaccatcttcccactggttgccaagagactgctgaagtgtgcatgatagatatggctgatatgttccttagcaacacagtagataagggatatgtttatgggctaaagcatttaatttctgtacttcgaagtattttagacaattgaatcatctgttgcagtattttttttttttttttgagacggagtctctgttgcccaggctggagtgcagtggcgcgatctcggctccctgcaagctctgcctcccgggttcaggccattctcctgcctcagcctcccgagtagctgggactacaggcgcctgccaccgcgcccggctaattttttgtattttttagtagagacggggtttcaccgtgttacgcaggatggtctcgatctcctgacctcgtgatccgcccgcctcggcctcccaaagtgctgggattacaggtgtgagccaccgcgcccggcctgttgcagtctttttaagaggtgggccaatcataatgaagaggagcaggcaatatctccgcacctttaatgctatgcaaaaaatatgtattgtgagtcgacattttatttgtctttatacttttggaagaaaggttaacttttttataatcttactcaggaaaatatatgttcattagaaaactatgaagaataaagaaacttaggaatgttaagcagggaatgtagtggtacatggcttaaacatcttttttggctcaagcaaaatgcaaaccattattcagtcattaagagtttagttagctttctgtaaccaattcatgaaatctctgtccacccaatttgacaatgagccatatctaaaataatacattattagaacacctaccaaaatctcaaaagcacaggttgatgtccttagtcttgctatgtatgaagttattaaaactggagaaaattctacttcagaaataagtactgcttaggttttatattaaaaattcagaccagcatatcaaaggatgcttcttagtgaaatgatttagaattgytgcattccaaaagcaggttttctctttaatttttacaactctctctctctctcaaaatattatacttcatgaaaaagacaattgacatggatgacaacaagagtcttgaaattaagggcacactcattgttcttaccagggttagaagagagaagttattttcaaggaacaaatattttgctttacaacctctcgtttatgagaaaattggaatataaatttattacattgtgaaaagtatcataaaccatatacctttttatctaaatgcagtttcaaaaaagtaaataattgaagttttatttctcctctaaataactggaatttttttctttaaaaatttatatatttatatgtccccatttagttaagtggtagtgtaaatgtatactgttaaaagtggtttctcagaattatagtaagcaatgaaagacagtatctaattaggttgttatcaaaaatactatgtgtgaataagtccatcatatagggctggtgtgtatctaaattcatgcttctatttcactgttactcaaaacagttttatattatgttgaacagtgaaattataatttaatttcatggggacggggcagtgctatagttcctggaaaaattagatttgtattatctttatttcacacctaccaccttagaaaaatcaactagttgtcattgaaaacatttaaaactttgagtcttcaaatacatttgatgttaatgctgtcattacttgcactttgattcactaataacatttctaggtagttaccagttttgtcatttttctggaaaatattttggagttgtaaattgtttctctttttcttctagagttacaaattgaatttttaaatccaagcacctttgttgtggtgtggagagaagtatcacaattttatgtttattttaccttctcaaccttctcttggggtactttgcaaatacctgagtctaaacagaagtaccaaatacatgctctatgaactctatccttagtaaatctattaaacctgaataacttaaaagatcatgtgtgttttgtaatagcaaaatttgattttaattttttatttggaattggtgtatttatcatggggacttccagtttttcttcactttkcaaatggatattggctatagttttatgttttaatgggaatgaatttcaagtcaattaataatcagaaaatttttagttttacttttttcttttacaatatggacttttgttgttatttggatagtagttcaataaatcttaagctcagataattaaacactattttgaatcttaacaagatactgagcatttttttgtatgggatgatatcagcctatgtacaatgaatttaataaacttaagtattatcagatattttgcacattttagatcaataaaatctgaattaactgttcaagatttttttatctgtatttggaaatataattttgtaaaatcaatgtcttacctttttattacaatagatcatgttttgtattcaataaagcaagaagcccttttatctgttgtttttcagggaagggaktaacatttaattctgtttgtttacatttgttttcattgttatccaatgctcattttatgttgctttataagtaagcttaggtataacagaataagtatctgtttatctaatctacatgtgactactttagtctctctcagtcacttaatattatgctgaaatttaccactgtggggatgaatgatcactatccaacaagcgtatttgaacatgtaaatgcttaagaaataagtataatatggatatagtttgggttaatagtattctcatagttttttccctctatgaaacataagtaatgattttagtgtatttcttatggaatacactcatttataaaggactttaagaaattgtggatgtgaataatatctttctctagtaaaaatttaaattgtaaaaaaaaaacccaaaacctttctgatattttcattgtgatttcactgaatctatagatttagttgggaagaactgacatcctgacaatattgagctttttgtcttacaagaaatgctcaagggagtcctgcatctggaagtgaaaagaggatcattaccatcatgacaacatgcaaaagtataaaatccactggcaaagcagatacacataagagaaaagaatcaaaccttattactayagaaaactaccaaaaccacaatcgtaaacaataagagaggaagagaggaataaaagatatacaaaacaactagcaaacaatgaataaaatgacagaagaaggttcttacctataataactttgaatgtaaacagattaaatcccccacttaaaatatatagactrgctgaatggattttttaaatgacccaactatgtgcttcccataagaaactcactttacctatcaaaaaacatatagactgaaagtgaagggatggaaaaagacattctacccaagtgggaaccaaaagcaaataggagtagctatgtttatatcagataaaaataaaacagacaagggataaattcagcaagagcatataacaatagtaaatatatatgcacccaaaactggagcacctagctacagaaaacaattattattagatctaaagggagagatagactcccatacaataatagttgtggacttcaataacccaatctcaatactggacagatcatctagacaggaagtcaacaaagatacattgtatttaaatttcactttagaccaaatagacttaacagacattgacagaatagttcatgcaacagctgcagaatacacattttttttcattagcacatggaaaaatctcctggagagaccacacattgggctacaaagcaagtctcaacaagtttaaaagtactgaaatcacatcaagtatactttctgayggcaaggaaataaagctagaaatcartaacagaaataactttcaaaactgtacaaatacatcaaaattaacaacatgctcttgaacaaccaatggattaataaaaaattaggaagtacatttaaaatttcttgaatcacatgaaagtataaacacaatgtatcaaaagctatgggatacagcaaaagcagtattaagaaggaattttatagcaataaacacctacatcgaaaaaagtagaaatatttcaaataaacaatctaatgatgcacctcaaggaacaagaaaaacaaaagcaaaccaaactcaaaattagtaggaaaaatgaactaatgaagatcagagcaaaaataaatgaaattgaaagtaaaaataaaatacaaaagatcaataaaacaaagagttttgtttgtaaaaaaataaacaaaattaacaaatgtttagctaaacaaagtaagaaaaaagaaagactcmaataaatgaaatcagamatgaaaaaggagacatgacaattgataccacagaaatacaaagaatcattggagtctattacaatcaaccatgagtcaacaaattggaaagccwagtaaaaatgtataatttctcaggcayatacaacctatcaagattgaaccaaaaagaaatagagagtctaaacagactaattacaagtaatgaaatataaccagtaataaaaactctctcatcaaagaaaagcccaggacctgatggcttcaatgctgaattctaccaaacattaaaaaaaatacttaatacccattcttttcaaactgttccaaaaaatcaaagaaaagagagttcttcttaattcattctatgaaggcagcattacccttataccaaaaccagaatgggacacaagaagaaatgaaaacagcagaccaatatcgctgatgaatagaagtgcaataattctcaatgacatactaggaaatcaaatccaccagcacactacaaagataatttactatgatcaattgagatttatcccagggatgcaaggatgttttgacatattcaaataaaaaaaatgacatcacatcatatttattgaagagcaacagagtgaatagcaaaaaccatataatcatctcaataaatgcaggaaaagcatttgataaaattcaacatttcttcatgataaaaaacactaaacaaagtaggtatagaacaagcatacataacaaaataaatatatagaacaagtatacctaacaaaataaaggataggcatgaaaaatccacagccaccatcatacaaaatggggaaacactgaaagcttttcctctaagaactggaacaaaacaartatgcccaccttcaccacttttattcagcatagtgctggaagtcttggccagagaaatcaggcaagagaaagaaataaagggcaaggatgtcaaattttccctgtttgaagatgacataatatgtgcatagaaaaccctaaaagctccaccaaaactgtcttagaactggtaaacaaattcaataaagcagcaggattcaaaatcagcatacaaaaatcactagtgttcccatacacaaatgatgagctagcagaaaaagaaaaagaaagcaatgccatttacaataggtgcatatataatatttaggaataaatttaaccaagtagttgaaagttctctgcaagaaatgctataaaacactgatgaaagaaatggaaaaggtccctcaaaaatggaacatcttcccatgttcatggattggaagaaataatattgcaaaaatgactctactactaaaagcaatatagagatagaatgcaattcctatgagaataccaatgagattcttcataaaaatacaaaaaaattctaaaattcgtgtggtatcacagaagaccccaaatagccaaagctgtcctgagaaaaaagaacttagatggagatattacactgccaacttcaaattatactacaawgctatagcsaaaaccatatagtactggtataaaaagagatgcatagaccaatggaacagaacagagaacccagaaataaatccatgaatttagagccaactaatttttgacaaaagtgcaaagaccattcagttagaaaaaaacagtctcttcaataaatggtgctgaaaaaactggatcttcatatttagaagaagaaactagacccctctctttcatcctattcaaaaatcaaatcaagatagatgtattagttagggttctctagagggacagaattagtaggatagatgtatgaaycccacttctggtaccaaaatctgtattagtcagggttctctagagggacagaactaataggatagatgtatgaaccccactcctggtgccaaaatctgtattagtcagtggtctttagagcaacagactagtaggatagatgtacatataaaggggggtttattaaggaatattgactcacacaatctcaagktgaggtcccacagtaggctgtctgcaaggtgaggagcaaggaaactagtccaagtctcraagatgaggaatttggagtttgatgttcaagggcagaaagcaaccagcgagggagaaagatgtaggctgggacgataagccagtctagtctcttcacgtttttctgcctgctttttttctggctgcactggcagctgattagattgtgcccacccagattgagggtgggtctgcctttcccagtccactgactcaaatgttaatctcctttgacaacaccctcacagacacacccaggaaaaatactttgcatccttcaatccaatcaagttgacactcaatattaacaatcacaatagattacagacttaaatgcaagacacgacactttgaaccagtagaagaaaacatctgggagacacctcaggacattggtctgggcaaggattttttttttggtaagacctcaaaagcacaggcaacaaaagcaaatagacaaacggggtcatacgaaaccaaaaagcttctgcacagcaaagaaacaaatcaacaaagtgaagagacaacctacagaatgagaaaaaatatttgcaaatcatccatctgacaagggattagtaattagaatacataaggaacttaaacaactgaatagcaaaaaaaaaaaccacctcaaaataatccttttaaaaaataggcaaactatctgaatagacatttctcaaaagaggagatacaaatggcaaacacatacattaaaaaatggtcaacatcactaatcatctaggaaatgcaagtcaaaaccatgataagatgtcatctcacccctgttaacatatgtaattatttttatacattgttggatttgatttgatattttcttgaggattttgcrtctaggtttgtgagcaatattaatctgtatagtttttttgtttctttcttcttttcttctttctcttttcatttcttgtcatgtctgtctgtatttgscattargtataatgctggcctcataaaatgaattargcaatatttcctctgcttctgtctttcaaaagacatggaagaaaattggtataattccttccttaaatgtttagtagatgcaacggcctacagcattatgctgccctgggccgcgacagcgtgggcgccgcctcrgtcaacctggarccctcggatgtgccgcaggacgtgtacagcrgcgtggccgcgcaggtggaggtgttccgtaggcaggacgcccagcggggcatgcgggtggcacaggtgctggaagscttcatcacccgcaaggtggtgaagcagacggtgatgaccgtggtgtacggggtcacccgctacggtgggcgcctgcagattgagaagcgcctccgggagctgaacgactttccccaggagttcgtgtgggaggcctcccactacctcktacgccaggtcttcaggagtctacaggagatgttctcggggacccgggccatccagcactggctgaycgagagcgcccacctcgtctcccacacgggctctgtggtggagtgggtcacccccctgggcgtccccatcatccagccgtatcgcctggagtccaaggtcaagcaatcaggaggtggaattcagagcatcacttacacccacaacagagacatcagccggaagcccaacacacctaagcagaagaacggcttccggcccaacttcatccactcgctggactcctcacacatgatgctcaccaccctgcactgctacaggaagggcctgaccttcgtctctgtgcacgactgttaccggacccatgcagctgatgtctccatcatgaaccaggtgtgccgggagcagtttgcttgcacagcgagtccatcctgcaggacctgtccaggttcctggtcaggcggttctgctctgagccccagaagatcttggaggccagccagatgaaggagacactgcaggtggtgcccaagccaggggccttcgacctggagctggtgaagcgttccacctacttcttcagctgacacccggcgggccttgtgccagtgtgtaaataaagctcttttgccaccccctcaaaaaaaaaaaaagtctagtagaattaatcagtgaaccaattggggtcttggctttctgttttggaaggttattaattattgtttcaatcgatttaatagatataggcctattcggattatctattagcacttaccttttattcttttctttccccttctcgtatcttttggatggatggaaggtaaatgatggtatatacatgtgattcaaaattatgtagctggtaaaaattataacattgatagagaaatataggacccatatgcattatttaaatacctatataataatcataaaacatgtttatgccataagtgcaaggattgaaggacaatatgaaaagtgtagttaggtgaatcttacaaattatttaaagagactgtttaaggttagtcaagcagagtgacatacagaaaagaagactactattaaatcattggcaatatccctctgtattaggccactcttgtgttgctataaagaaatacctggctgggtatggtggctcatgcctgtaatcccagcattttaggatgccaaggtgggagaattgcttgaggcttggagtttaagaccaaaaaaaaaaaaaaaaaaaaaaggaaatacctgagactgggtaatttgtaaacaaaagaggtttaactggatcacggttctgcaggctgtacaggaagcatagtggcatctggttctggggaggcctcagggagcttttactcgtgttagaaggcaaagtgggagcgggcacatcacttggcaaaagcaggagcaagagagagagggtcaggtgctacacagttttaaataaccatatcttgcaagaactcactaacacgaagaccacatcaagccatgagggatccgcccccatgatccaaacacctcccaccaggcgccacatccagcattggggattacaattcaacatgagatttgggaagggacacagacagacccaaaccatatcaacccctaatgccagcagaaccactgagtagctttaggatcttcagaaaggattttaaagctcgaatagtcccagcactgtaataattacaagagaaaatgtaactacaatgtagcatctacacaataattgtgattctcttctccgttcttgttcaatccaatgtttaatataaaaattcaagtgaaggtaaataaaagcattggggaatgaccttgccatgtggtattaagaagaagattctcaagcacaactgcctaagttgcaattaccacagctacatctagaaggaagatgtgagagttttcattccacattaactagaaacctagcatgaggcagatggctggaagcagtcgagggagtgtccaagaccttacacagaaaatcatgttcagagaggaagcttgttgctcattccttttttgtgcccagctgcctgggttcccttctccaccattttatttggtagtaagctatctagagaacttgctccctacgctgagccaataagcgaaatgtgtgagctttgaaggatacagtttcatttcgaggaatggagaatatctgtgcaaagttggggcagttcagagcagagtgagctgcagactgttctgcaggtatggggctggaagtcttcacacgacctcatagtcctggcacccaaacttactcagacaatggtgtgtccggaattggtgggttcttggtctcactgacttcaagaatgaagccgcggaccctcgcggtgagtgttacagctcttaaggtggcgcgtctggagtttgttctttctgatgttcagatgtgttcggagtttcttccttctggtgggttcgtggtctcgctggctcaggagtgaagctgcagactttcgcrgtgagtgttacagctcataaaagcagtgtgaacctaaagagtgagcagcagcaagatttattgcaaagagtgaaagaacaaagcttccacagtgtggaagggggcctgagcgggttgccactgctggctcgggcagcctgcttttattctcttatctggccctacctatgtcctgctgattggtagagccaagtggtctgttttgacagggcgctgattggtgcgtttacaatccttgagctagacacaaaggttctccacgtccccaccagactcagaagcccagctggcttcacccagtggatcccgcaccggggctgcaggtggagctgcctgccagtcccgcgccgtgcgctcgcactcctcagcccttgggtggtcgatgggactgggcgccctggagcagggggcggcgctcattggggaggctcgggctgcacaggaacctacggaggccgggggctcaggcatggcgggctgcaggtcctgggccctgccccgcgggaaggcagctaaggcccggcgagaaatcgagcgcagcgccggtgggctggcactgctgggggaccgagtacaccttcccgagcagccgctggcccgggtgctaagcccctcattgcccggggctggcagggccggccggctgctccgagtgcggggcctgccaagcctacgcccacctggaactctagctggcccgcaagtgccgcgcgcagccccggttcgtactcgcgcctctccctccatacctccctgcaagctgagggagccggctctggccttggccagcctagaaaggggctcctacacctataagtgagaatatgcggtgtttggttttttgttcttgcgatagtttactgagaatgatgatttccaatttcatccatgtccctacacaatgagaacatatggacacaggaaggggaacatcacactctggggactgttgtggggtggggggaggggggagggatagcattgggagatatacctaatgctagatgacgagttagtgggtgcagcgcaccagcatggcacatgtatacatatgtaactaacctgcacattgtgcgcatgtaccctaaaacttaaagtataataataataataaaaaaatccaaaaaaaaagaaaagaagagaaaagaaaggggctcccacagtgcagcggtgggctgaagggctcctcaagtgccgccaaagtgggagcccaggcagaggaggcgccgagagcgagtgagggctgtgaggactgccagcatgctgtcacctctcagtgggagcaggtgtgacaagagttgggcaaatcagacctttaatccaccctgataggctggagtgtgggcttatggcatttctcctttgacccaattaacctccactcccaatgtatctctgtgcagaaggctcagctaggtgtatcagccattgtaaatcctcaacataaattataatttaacctagaatacagagactaggtagcaggaggagaggaaatgtagagatactaatctcttctcccttatcagaaagaaacctagcataagaaatttcacgcttaatgggccaaagagtaaatcagaaaactccatgggtgatggtatgctcatggtggtggtggtggtgatggggaattatttgccctcctgtgacctcccttggattaatttctccccaggacaatgggaaaaatcatttaatccttggagtttttttttttttttttttgcttgagagtgactctgatcctgtttctgatggtcatgttcctcagcatcatactgagtaagtcactggccttgtagcatctggagtgattggagtgatccaagatccctagttcccatgtcacaaatgaggatcccacatatctgggacagagatggaacattatttctgggtgtgtctatctaatctattcaccctatctatctaatttctcatctatatatatatttgcctacccatccatccatcaatccatcttagctgtacgtttatccattccatctatttatcctattatctatgtatctatctatcatctattaatagctatctatccatctgtctaatatatccattatctatatctactttatctatctacctaatgtatccatcctatctactctatctatctgtgcatctacccatccatctggaccctgagctgattcctctgcacccagctggcctgacgccaggtgttgattggctgcccaggctcaggagacacatccaggctgcagggattggttggcccagcccaacccagccagccctcccacagcctttgctatatcaagggccagggtcaaaggcctcccagcagacagagagaggaggttgtctgggacagactgctcctgacagaaggtgccaggctgggggtggcaggcctggggggggtcctggcctgggatggagaggggcactgcccaaggcccacgcagctcctgggtgctgscctggaggatgggtggtttccgagtaactgaaaccaagcccctggcaacctcacagtgattcaggctgggcctttctggactttaatcagtctctctctctctttcccattctaagtgcttactagggaactggaggccacttggctgctggttttggttgggcctttctggactttacctctcagcccctttttacccatccctgagccctccctgctctacctccggcactgcccgtccctgcctctccactgtccctggaggtccctgggccgttctctgggcctcaggatctcaccgtccatcccgtctgccctgcaggatgtcccagctgagcctgtcctggctgggcctctggccagtggcagcatccccttggctgctcctcctgctggtcggggcctcctggctcctggcccatgtcctggcctggacctacgccttctatgacaactgccgccgccttcggtgtttcccacaacccccragacggaactggttttggggacaccagggcatggtgagtgtggcagcaggatgggtctaggtctcaggatggatggacttcctgaggggtacgaggcttagggagtgggggtgaaggggtgggctgggatctggggtggcagagaagcagaggaggcatcttactcattcctctgcttattcatttctgtgaggtgcctacgcaagcccttctcacttccttgtcctcccactccaggcctgcattgaatccttttcctgcctgtcttcccacattaatgcacctctgcggggctcctgggcagagggttggctgcacagagaggcgagtccctggcattcccacattctccattgctggactcgaggcttcttatgcccactgtccagggtcctctccttgcctggactatttcctgttatgagggtacagctgggccagaggagaggcatgggccgtctcccacttccactacacccgaaggcacctttctcttatattcttcttcttatctccctcttatcaatgagacctgttgccaaacccagataaaagttggccactcacttcacctttcagaagctttccttggcctttctcctccccgtgaccttgccctctgacttagaccgctctcctctttggggaatgtggtcttagtctgctcatttgcaaatggcaggattgatggatgtgtccacagataaagtggaagggtgcacaggacacactagcacagagcctgctgcagaagctgctcccaggtgggagccattgtcctgatggacagttagagtcacctctgctccactagtggctgctgaaaagggaaggtctcccatgtgcagaaccttctccatgggaggaactggagcctctgtggatcagccaggacatgaaggcatgtggggaccagccttagggacatgtcctgaggcgatactgctccccacaaatctcccctgtgaggacctccccatatagctgcctctgggctgaaatgactcccagaaaaagaaaatccttcctctcaagataactgggcctctgtgagtggacagtgcgtcttctccctctgccctgggatgcacccttgggacttggagatggacccaagagagatagagcaggaggaat

SEQ ID NO: 93830 - DNA, 22539 bp, Homo sapiens
tcccagctactcgggaggctgaggcaggagaatcgcttgaacctgggaggcagaggttgcagtgagccgaaatcatgccactgcactccagtctgggcgacagagcaagactctctcaaaaaaaaaaaaaaaaggactaagcgtagtgcctcaggcctgtagtcccagtactttgggaggcagaggtgggaggattgcagaggacaggagttctagaccagcctgggcagcatagggagagcatcatctttagttattattattattattattgagacaaaatcttgctctgtcacccaggctgaagtgtaatggcacgatctcggctcactgcaacctctgcctcccaggtttaagcaattctcctgtctcagcctcctgagtagctgggattacaggcgtgtgccaccgcgcctggctaattttttgtgtttttagtagagatggggtttcaccatgttggccaggctggtcttgagctcctgacctcaagtgatccacccacctcagcttcccaaagtgctgggattacaggcaggagccactgggcccagcttctagttattttttaatgatactaaagagaaagaaaggaacaaaatgatgcagtctgataccatttgtatcaaacacacacacacacacacacacatatatatataaagtgaaaaaatgtataaagtaaaggaggctgggcggggtggctcatgcctataatcctagcactttggggaggcagaggcgggaagattgcttgagctcaggagttccagagcagcctggacaacatggcaaaacctcatttcttctaaaaaatacaaaaattagtgggccaaggaggtggaggttacagtgagctgagatctcacctggcactatggcccgagtgaaagccagactgtttatttttttctttttatttatatcatgtaattttattttttgaaacggagtctcgctctgtcgcccaggctggagtgcagtggtgtgatctcagctcactgcagcctccacctcccaggttcacaagattattctgcctcagacaactgagtagctgggattacaggtgcctgccaccatgcccagataatttttgtagttttagtagagacgagttttctccattttagccaggctggtcttgaactcttgacctcaggtgattcacccgcctcggttcccaaagtgctgggattacaggcgtgagccactgtgcctggcccagaccctgtttgaaaaaaaagaaaaattagtcgggcatggtggcaggtgcctgtaatcccagctactcggaaggctgaggcagaagaatcgcttaaacccgagaggtggtggttgcagttagccgagatcgtgccactgcactccagcctggggaacaagagtgaaactccgtctcaaaaaaaaaaaaaaaaaaaaaaaaaagtaaatgggaaaaataaaaagggaaatgaaaggaaatttatatgaagtagctttttagctttttttttttcctttggtagagaagaggtctcaccacattgcccaagctagtcttgaacttcctgcctcagccttccaaagttctgggattacatgtgtgagccactacacccagtaccttttctatgttttgatatgtatagatatccaaatacctaccattgtaacatcacaaagaagatgaaggtaaaaacaacaaaacaaatacttagcattgtgttgcaattgcctacagtattcagacagttacacactgtccgggttggtagcctaggagcagtaggctttatatagcaggggtccccacccccacccctccctggcctcgtggcctgtcagggaccaggccacacagcaggaggtgagtgatgggtgagcattacctacagcctgagctctgcctcctctcagatcagcaacagcattagattctcatagcagctcaaccctattgtgaactgtgcatgtgagggatcgaggttgcccattccttatgagaatctaactaatgcctgatgatctgaggtggaacaatttcatcccagaaccatccaccctccttacgtccatggaaaaattgtcttccatcattcaggtccctggtgccaaaaaggttggggactgctgggctataccacatagcctacacgtgtagtagccataccatctaggttttttttttgagatggagtctcactctgttgcccaggctggagtgcaatggcaggatctcggctcattgcaacctccgcctcctgggttcaagtgattctcctgcctcagcctcctgagtagctggtattacaggtgcgcaccaccatgcccggctaatttttgtatttttagtacagacagtgtttcaccatgttggccaggctgttctcgaactcctgacctcgtgatccacccgccttggcctcccaaagtgctgggaatgaaccaccatgcccagacccatctaggtttatctaagttcccttgtctaggtcagtttgcattgctataaaggaatacctgagtctgggtaatttataaagaggtttatttggctcacagttctgcagactgtaccagaagcatgacactagcatttgtttctgggagggcctcggaaagtttccaatcatagttgaaggggaaggggagcaggcattccatggtgagacaggaaggaagccagaccgagagaggatagcagtgccgtgctcttttaaacgatcagcaatctcatgaatagaagaactcactttaccatggaaatgtcactaagccattcatgagggatctacccttgtgaccaaaaagacctcccactaggtcccacatccaacactgcggatcacctgtctgcctgcctggcttccttccttcgtttccccttccttccttcctctttcttctttatttttgttttattctttttcttttttctcttttttttttgagacggagtctcactctttcacccaggccagactgcagtggcgctatctcagctcactgccagctccacctcccaggttcatgccattctcctgcctcagcctctcaagtagctgagactacaggtgtccgccaccacgcccagctaattttttgtatttttagtagagacggggtttcaccgtgttagccaggatggtctcgatctcctgacctcgtgatctgcccacctcagctcccaaagtgctgggattacagacgtgagccaccgcacctggcctctttcctcttttttttttttttttttttttttgagacagtctcactctgtctcccaggctggagtgcagtggcacaaayatggctcactgcagccccaacctcctgggctcaagaaggatcacatttcaacatgagatttggaggggacaaacatccaaactgtatcaaactccatgatgttcatacaatgacaagattgcctatggagacatttctcaacatgtccgtgtcattatgtgaccccatgactgtaattcttgtaaaggtgggtgcagtaactgttcagtacgactgtttttctttagggcattgtttctgtactgggaggaaaggagttggagtgaagcacaggtgacttcaacttttttttttttttttttttgagacagagtttcgctcttgttgcccaggctggagtacaatagtgcgatcttggctcaacgcaacctccgcctcccaggttcaagcgattctcctgcctcagcctcccgaatagctgggattacaggcatatgccaccacggctggctaattttgtgtttttagtagagacgagggttctccatgttggtcaggctggtctcgaactcccaacctcaggtgatctgcccgcctcagcctcccaaagtgctggcattacaggtgtgagccaccacacccggccgtgactttgactttaattacaatgtgttattcatttattttagagactgggtctcactctttcacccaggctggagtgcagtggtgcaatcatagctcactgaagcctcaaactcctgggctcgaacagtcctcctgcctcagcctcccgagtagctgggagtacaggtatcaaccaccatgcttggctaatttttattttattttattttattttttgtagagatgaggtctcactatgttgcctaggctggtcttgaactcctggccttaggtgatcactcttgttgcccagtctggagtgcaatggtgcgaactcggctcactgcaacctccacctcccaggttcaagcgattctcctgcctcaccctcccgagtagctgggattacaggcatgcgccaccacgcccggctaattttgcatttttagtacagacggggtttctccatgttgtcaggctggtctcaaactcctgacctcaagtgaaccgccctccttggtctcccaaagtgctgggattataggcaggagccctggtgcccgctgatcctttctttacttggcattttctttttcttttcttttctttttttttttttgagacggagtctcgctctgttgccgaggctggagtgcagtggcgcgatctcggctcactgcaagctccgcctcccgggttcacgccattctcctgcctcagcttcccgagtagctgggattacaggcgcccgccaacacgcccggctaatttttctatttttagtagagacggagtttcaccatgttggccaggatggtctcaaactcctgacctcaggtaatccacccacctcggcctcccaaagtgctgggattacaggtgtcagccaccacgctcggcctgcaaaaccccacctttaccaaatttttaaaaattagctgggcatgataggtaacaagagtgacaccctgaagaaagaaagaagaaagtggagggaaagagggaggaaggatgataggaaaataaatctgccaggatctaataaagcttagtgaccatgccaccatgccactcctaagtatttaaaagaaatgaaaatttatcttccccaaaatactcttacagtacaagctctattaacagtggccaaagaccggaaacaatcaattggccaagaacaggtgagtgaaactatattggctacattatagtatagccacacaatgaaataccactcagcagtaaaaaataacgagctgttgatatccccacaacatggacaactctcaaaaacactttgctgcggccaggcagggtggctcatgtaatcccagcactttgggaggcggagatgggcagatcacatgaggccaggagttcgagaccagcctggccaacatggcgaaacccctctctactaaaaatatgaaaattagccaggtgtggtggcgggcgccagcagtcccagctactcaggaggctgaggcaggagaatcgcttgaacccgagaggcggaggttgtggtgagcagagatcgcgccactgcactccagcctaggtgacagagccagactccgtctcaaaaaaacagctttgttgagcaaaagtcagacacaaaagacaacctattgcatgcttctactaacgtgaaaatcaaggagacaaaactatcgtggagcgatagaaatccaaatactgcaaaatgttctgtccatttgagtcattccaagctccctattcttttcagagcctacactgtggaggacccccaggccgcagattgatagcaactgggacagttctggtttcagcgcccagcgcagacgccactcttcgaaaaggtggggcacacgccaaaacgcaatcatccggtcttcagttatcagtactaaacatggcggctcccaccgagcaccacacccagatcacgagaccgcgcgctgtcggagccagtctgtcggctcactggggcgcgcctacttttagattgaccaataaacgcgaggcgtaaggcacgccctctttcttcccgtctccgccaataatctcccggtcccttccacaggacccaatcaccgcttcggcctctcttgaatgaaaaggcagcggcccagtcagcagagcagcagcccgacgcaagaggcaggaagcgcagcaactcgtgtctgagcgcccggcggaaaaccgaagttggaagtgtctcttagcagcgcgcggagaagaacggggagccaggtgagcagcggatcccgggcgcggggccgcggtgtggggacgtctgaactgagagcgagaggacgaggggagacgttgggatctaaggggaggrggagaaagggtcgcgagacggtgggggcggggcggttggtgtgtcagagcgctgtgtgttggccgttgggcaccggggcgcatgcgctaggggtgggccagccgttggcgcgcggtgctcggggctcggggcccgcttctcggaggggctgtcatggcctacggcgctccgagccccacttggagtctgtcagttcgtccgaatagaccccgcggcggcctggggccatttggagagggacgagggggtgacgccggggtctggggcctgggtgggagaagttggagctttcagttgtcaggggtttctttgggtccgagggacttgatccctttcccagtctaccttcttcttggtctactttttacgggattcgggattctgagatttagagcaaataagactttattttggaaggccgggcgcggtggctcttgtaatctcagtactttgggagagaccaaggagggcggatcacttgaggtcaggagttcgagaccagcctggccaacatggtgaaacctcgtctctactcaaaatacaaaaaaaaatcagccgagcgtggtggcgagcgcctgtggtcccagctactcgggaggctgaggcacragaatcgcttgaacccgggaggtggaggttacagtgagccgagatcgcgacactgcactccagcctgggtgacagagcgagattctgcctcaaaaaaaacagaatgaaaaaaagattttcttttggaaataggagtccccaggtgggaataaactccggggtggaaagcctgcctggggacacttgagggtaactgggtacacgtggcgtgtctgggttgtgagttccccgctgtcacctttcaagttcatgcgctcctggcgccttagcggtcatggccacccactttgggcggggaaaaccccgccggatcctttcctgatctaatcagttttgagctttagatcctgtccagcccggtttctcgaaaattttatcttagcagattcggttcaccccaatttatttatctctctctctctttttttttttttttttttttttttgagacagagccttgctctgtcgcccaggctggagtgcagtgacactatctcggctcactgcagcctccgtcttccgggttcaagcaagcacatccggctaatttttgtatttgtagtagagacggggtttcaccatgttgcccaggcttgtctctaattcccgacttcaagtgatccgcccgcttcgcctcccaaagtgctgggattacaggcatgagccaccacgctgggccccaatttctttttttaaatttatttttcttgagaaagggtctccctctgtcacccaggctggaatgccatggcgccatcactggcagcctcgacctcctggctcaagcgatcctcccggcacagcctcccaagtagctgggactacaggcccatgccaccacaccgggctaatttttttctttttttaatttctacttatttattttttagcctttgctacatagaaggtgccccttgggctatgtgttttttaagtttttttaagttttagggtacatgtgcacaacgtgcaggtttgttacatatgtatacatgtgccatgttggtgtgctggacccgttaactcgtcatttgcattaggtatatctcctaatgctgtccctcccccctccccccacccamccggctacttttttaaaaattgtttttgtatagacgcggtctcgacttattgtccaggttggtctcgaactcctgggctcaagccatcctcccacgctggcttctcaaagtgctgggattacagaagtgaggcaccatgccgggcctgccccaaatttatttccccaccaacaaaacaactttgctttatttccttaaaatacaccatctcttggccacctagatttggagcccagaatagactgtggcttttctctacccatggattggtcaggggatgttcctgtcttttggcatgtcccaccctttctttccttacctcacgcccctaccctggttacttctcttttatttggtgactggttttccctgctactggtcttaacctaccccttcatcggaggagtaagttacagtactcttgggcagatcctgattgagtggctcagctccaatctaattagcagttccctattgcttaacaagtacacaggcccaggctgggcgtggtgggtggctcattcctgtaatcccagcactttgggaggcagaggcaggaggtttgcttgagtccaggagttcacgaccagcctgggaaacgtggtgaaacactgtctctactaaaacaaaaattagccaggcgtggtggcatgcacctgtagtcccagctacacaggaagctgaggtggtggactcactgggcctgggaggtcgaggctccagtgagctatgattgcaccactgcactccagcctgggtgacagagcgagaccctgtctcaaaaaacaaaaaaacaaacaaacaaacacatgccctgtgtggctgaccagctcttccagctttgtcttctgccctgacgccagccagctagtcctactctgcataccccaaaaggctctggtgcttttcggactgacctttcttggctcctgttttccctgctgcctgggaagtgaccccttcagattgcctgtttgaagggtcagataaagagacatgttcaactctgcctgaacgcctttattctagttccatttattcagccattgctatggagtgcttattagctgttctcacagggcagggctgactggaagcggtgctgttttagttggggctgtgaggaaatgcctttctggagcaaaggaggcccaaaagaagtgggggatttgtgacccttccaggcagcaggaacagcaagtgcaaaggtgctgaggtgtgtttgagacacggcagcaaggctggcgagtgaggggcaatgggggagatgaggtatgagtatagaggagtcgggttaggaggggcccggtaggctggctttgtgaggactcgagtttttttctaagcacagtaggaacccattaaaagttttgagcagaatagtgatgtactcttaggtttgtttttttttttgagacagagtcttggtcttgctctgtcgcccaggctggagggccatggtgtgatctcggctctctgcaacctctgcctcctaggttcaagtgattctcctgcctccaagtagctgggattacaggtacccgccaccacacccggcacatttttggtatttttagtagagatggggtttcaccatgttggtcaggctggtcctggactcctgacctcaggtggtccgcccgcctaggcctcccaaagtgctgggattacaggtgtgagccaccgcgcctggccgtgacttagtttgatagggtctttctggctgctctggggaggggctgggggatggcaacagggaaaccagggaggaggatattggcttaattcaggcaagagatgatggcacctacatgtccagctgacagtggttaagcaaaatgtagtatgttggtgagatggaacattaggtgaccatggaaagaaatgaggccaggtgtggtggctcacacctgtaatcccagcactttggaaggctgaggtgggcggatcgcctgagcccacaagttggagatcagcttgggcaacatggtgaaaccccatctctgttacaaatacaaaaattagtggtggcgggcgcatgtagctcctgctactagggaggctgaggtgggaagatcgcttgattgagcccgggaggcagaggttgaagtgagctttgattgggccactgcactccagcctgggcaacagagcaagaccttgtctcaaagagggggraaaaaaaaggaagggagtactgatgatgtggtagagcacactgtgctgagtgaaagaagccagacacaaaatgtcacaaattrtaagatttcatttatgtgaaatgtccacaacaacaggcaaatccatagaaacagaaagcagattagtggttgcccggggctggggtggggtgtttagggtatggatacgtaaagggtacaggagcttttatttcaaggtgatgaagtattctaaaattgcacatgtggtagtggttgcacatgtctgtgactacactaaaaaccactgaattatctgccttaagtggtgagttgtatagcatgtaaatatctctgtgaagcttttctttttttttttttttttttttaggctggagtgaagcgtgatttcagcccatcacaacctccgcctcccaggtttaagcaatttwtctgcctcagcttcccgagtagctgggattataggcgcctgccaccatgcctggctaaatttttgtatttttagtagagttggggtttcaccatgttggtcaggctggtctcgaactcctgacttcaggtgacccacccgccttggtctctcaaaagtgctgggattacaggcgtgagccaccgcgcgcagcctgtaaagctgttctagttaaaaataataataaggccaggcgcggtggctcacacctgtaatcccagcactttaggaggctgaggtgggtagatcatgaggtcaggagtttgagaccagcctgaccaacatggtgaaaccctgtctctacgaaaactacaaaaattagctgggcatggtggcaagcacctgtaatcccagatactcaggaggctgaggcaggagaatcttgaaccctggaggtggaggttgcagtgagccgaggttgcgccactgcactgcagcctgggtgacagcaagacttcatctcaataataataataataataataataataataataataataataawaaaacaggtgatagcagcttggggccagcatggtagcataggtgagaactggccagagggccttggtgggattcactgcctcatggacagggaggttgagagagagaaaacagccattgagacaatggaattgctgtttctgagccgggaatgagtgacmgcgaggccaaaagtggcctaggatcctcagcatccagcctcaggaagaattgtagcagctgtcaccctctgctccaccccccactggagtctggggtaggggaggaggacgaaagacaattgtcctcatgtttgggtcccttgcacccagcaggcacttggtatgcattagattaataaagcaaagaggtaggcagactttgtattaattccattttccatcttctcagctttatttttattggcccaggcccaataggaggcctttcatgagagcacttaattattcccctgtgcagaccacagagagtgggagaagctggggctgggcagatactgcttgctctctcgcaaactcagttcccaccagcatcctggcagccccacccctgggatctttgggctcctgccccatgaaagcccagtgggttccttggggagtgatagggagggggcttctctgggctgagtagtctgaggaggttcactggagctgaggcttgcgtgtggagaaggaggcatttgtgcagagacctgggggcagagcattcctggcggtgacagccaggttcaaaggcttggggcaggggctccaggggtctgagcagctgaacaaggctgggggtggtgtgggatgaggtgagcaggggtcaaaccaaggggattgcctggcctgtggtgagagttgggattttaactctgtgagccatgggaagcccttggaggtggagggtgttctgtctgtgggtgtggccagaggggcatgggggagagatggggtagcttgggggtggggaggtggagacagggcgaagctgcgaggtgcagcccaggtagagctgatgggctcactcrtggaaggaggcggcagagaatgccatttgaatgaagcttcatcatccttctgtgcccactcgcgggaccctgcctctctctcttctcagcatcatggcagaacaggatgtggaaaacgatcttttggattacgatgaagaggaagagccccaggctcctcaagagagcacaccagctccccctaagaaagacatcaagggatcctacgtttccatccacagctctggcttccgggactttctgctgaagccggagctcctgcgggccatcgtggactgtggctttgagcatccttctgagggtacgccttctgggtgttatcctcttgcccaggtcctcaccaagacaagaccagccctgcccgcccagagcggtgccgcctccagtttgccgtgggtgagggaggggcccgtctgtcccgcggatcagttgtgcccagcggggcctgtggctgccctcggcagtggggcgttctgctttgaccaggcggataccccagccctgcaggtgtctgtggccttgtccggactcggcctcttctgattgccctcactgtgggcccccggtcaactggtgaggatcctgcacgggggtgcatccaggttctcgtccctcacgctctgcttctcctgcagtccagcatgagtgcattccccaggccatcctgggcatggacgtcctgtgccaggccaagtccgggatgggcaagacagcggtcttcgtgctggccaccctacagcagattgagcctgtcaacggacaggtgggtgggctcctcccttcctggccccaccctgcctgtggcggcggaagtagagtaggctggatggggtggctcacacctgttagcccagtgctttgggaagctgaggctggaggattgcttgagcccaggaagtcgaggctgcagtgtgctatgatcacaccactgcactccagcctgggtggcagaggtagactccatctcaaaaaataattagttataacaaaaattagaaattgccaataagccaaaataactggaaagtgcccacagtttgccccttgccccagaggcatcgttgctgttttgccgtgccacttacctagagagtgtccatctgtgaaggttgggttgccccgaatatagctgtcaccactgtccttgctgttaggccctggctgtcttctcccattgtcttgtgtgccactgtcctggggagacacttcagtgaattctggtgtcttgctcccgagtcaggccaggtgcacatctttgggcttcatattggcgcccgtgccctcgttatctcagagcacatcctgaaggatgaaggtgctgtggagggctgtggtgtggtccagtgtctgatggcacrggtgggaagaccggggccgcccgagtgccgagattcaggaaatccttagagagccaggtcccatgtcacccaggcaggccaggtctaaccattacattatgcgggccattttctgttccattttctgtttcttattgtgggtcctggtgttgggagacaggtttcaatagctgtgggagggtatagggagtgaggggtggggaagggccgtgagaagtgggaggcatttggaccgggccttcaaatggcctgtgatgttgggtgcagtgtcagggggactgggttgggtggactctggtggggaaggggtttaggacactgcctaaggccctcttcttatgccacttcccaggtgacggtcctggtcatgtgccacacgagggagctggccttccagatcagcaaggaatatgagcgcttttccaagtacatgcccagcrtcaaggtgagtccctcgggccagactggaccaggcgccacttggtttctgcagctttgttagcctcggctctggcccagccagcatttaccaagcttggcaggggcagctgcctttgaggtttgcggtggtttttgctccttaaaagcctgatgaattatgcatggctcccaggggcctgcgcaggtcccagcctggggctgcctttgagtggagccccgggaggctctcaggcctgccttggtcccctgaggcctcctgttcgcaggtgctgggccgtgcaggttggggccttgggccgtgtatcagcatggagcggtttcctcctcatccccataggtgtctgtgttcttcggtggtctctccatcaagaaggatgaagaagtgttgaagaagaactgtccccatgtcgtggtggggaccccgggccgcatcctggcgctcgtgcggaataggagcttcagcctaaagaatgtgaagcactttgtkctggacgagtgtgacaagatgctggagcagctgggtgagtcctctgcccttgcagccccagctgagagtcagtgactaggcgggccccatagcaggcggaaggctcttgagtgggtyacatgggcggccggcaggcggggctcctgtggtgatcttggggaaagctctgctgctggcagagggatgtgctgtttctgagcccgagccgaatgggaccacggggcccaagcaagcccccgtccctcctggacgtaaaggcatgcacacatacctctgggagtatgaggcttctgccacctgttgggttggttccaggccccgcctgccctcagtgagccccgacagggccggtgggagatgggcttgtgtcctgggaggcagctgcagctctcaccccagcggctgtctctgcctcaggctcccctccctgaagcgtggctcgaggcgcacgggcacggctgctccgcgccagcgtgtaagtggattgcagctcctcccgcgcctgcgctcgctggccaccccccagcccctcaggcaccaggactggccactcccgcggctcactctgccctcgtcacggtgccactggctccctggcacaggttgggaggggtctgggtctggtctggggtgggggtcctgcatggcagacgctcatgcccacccatgtcttgccctccccacctagacatgcggcgggatgtgcaggagatcttccgcctgacaccacacgagaagcagtgcatgatgttcagcgccaccctgagcaaggacatccggcctgtgtgcaggaagttcatgcaggatgtgagtagggcgagagtggcagctttggccttccccaggggcctggagcctggggccccaggacacccrcacggcccacatggcacggaggatgctgggatgctgggagccggcggagcctcctttcctcccctcggtcttgtcaaactgggagtcaagcttggtccacacctgagtcgggccagagcttacatccagyttttgagcgatgtttactgaggtctggtgcagcaggtcctctgggaagtgtcgcacaaaggagtcgcccactggaaggttctgggcaggcgagatgcccagaggtgatccctgcccgcccctcccacctcccttcccacacagcccatggaggtgtttgtggacgacgagaccaagctcacgctgcacggcctgcagcagtactacgtcaaactcaaagacagtgagaagaaccgcaagctctttgatctcttggatgtgctggagtttaaccaggtgatacttccatcagcctgtcctggggctcaggaccttcgggaggtcactgggccacagggactgtgtggccctgactgccactccttccctcaggtgataatcttcgtcaagtcagtgcagcgctgcatggccctggcccagctcctcgtggagcagaacttcccggccatcgccatccaccggggcatggcccaggaggagcggtgagtgcragccrcccgccaaggctgcagggagcaccaccaggagcccagtgtctgacggcctccacttgtttctcctgcaccccagcctgtcacgctatcagcagttcaaggatttccagcggcggatcctggtggccaccaatctgtttggccggggratggacatcgagcgagtcaacatcgtctttaactacgacatgcctgaggactcggacacctacctgcaccgggtgagcagcctcacgggcatgttgctttcccctggyggtggggtggggccccagccctgcttttcctcaagtcctgaggtagtatctgtggcctgaccctgatcctgtcygcctgcaggtggcccgggcgggtcgctttggcaccaaaggcctagccatcacttttgtgtctgacgagaatgatgccaaaatcctcaatgacgtccaggaccggtttgaagttaatgtggcagaacttccagaggaaatcgacatctccacatacagtaagtgccttgggcagggccaggggtctggggcagagggttcctcccccggcccttcagttcactgcatctcatgtcttacagtcgagcagagccggtaaccaccacrtgccagagccgcccacccggagccgcccgcatgcagcttcacctcccctttccaggcgccactgttgagaagctagagattgtatgagaataaacttgttattatggaagcctggctcccaccccatctatttcttggtcatcttggcctttcacggacaccctgggcccggcctctgaatcaccaccagcaggcaaggccatcttctgtatgcatgtgtttaattttaagtgtcaacactgaaaaattttaacagataaaaacacattacacaacgtctacaaccttcacaacagtgagaacctcctgcccggccaggcagggcaggcctctgtaccgtgagcctcaggcagtggccccaaggggcctcgccatggggcctctgacatcagtcttagcttaagagggaagctgagccccagcgcctagtctcttcagttctgcagcaaagacatgagaggaaaagtccaggatgggacaagcgcccttagtctgtcccgagtactggccacaggtgccagggcaacatgctgcattgcagccctgggccagcccctgtccccaccctgggtcacaaggtggagcagagaggcagccagcagcaggaccagtggctccgactccaccccactgggtgtcctggactttggtgccagactatagctgccactccctcctggtggcacacgggatcagggagggagggtggagggagtagagtggtggacgaagggaggatggatggtcttcgtgtacaaagctgctgtggccacaggagctgctgggccgtccagaaccatgcgccttcatatgccggactctgatgccctgagggcctggagaggagagcccagaggcctgagccccgctagccctggtgccttcctgcccacacccgccccaggcgcagccccttacccgggtctgattgtggccagtgccagaygtggtggaggtgaattctgagtacttgctccccccagcaactaggcaggcccacttccggtattcttcccgaacctgccggcccagacaccaagtcagggcaggagcaggccctgggaccatgcacgctcctccccatgctctgccctcagccccaccttcttggtgtttttgtgtttgtcttttttttgagatcgggtccccctgtcacccaggctggagtgtagtggcaccatcatagcttactgcaaccttgaactcctgggcccaagtgatcctcttgccccagcctcctgagaagctgagatgggtattcagcacacccggcttttttttttttttttggagacaagtctcactgtcacccaggctggagtgcaatggtgccatcttggcccactgcactcctggttcaaatgattctcctgcctcagcctcccaagtagctgggactacaggcgtgtgccaccatgcctggctaatttttgtatttttagtagagacagggtttcaccatgttggccaggctggtcttgaattactgacctcaggtgatctgcccacctcggcctcccaaactgttgggattacaggcgcctcaccctggctatctttgaatttttttgtaaagacagcatctggttatgttgcccaggctggtctccaacttctgggctcaagcaatcctcccacctcagcctcccaaataggtgggaggatgacaggcgtgcgccactgtgcccaggcccccaccttcttgttgagcaggcagtgcagcaggtagaggaaggcgccctgcaggcagttgaggatggtaaacacataggtcagcaccaagctccgatcgtcgaagatgaacaggccaaagacccaggtgcagcccaacaggaagagctgcgcgatggccgtgatggtcagcgccctgcgaggagcggggttgcagcgtgggcccccacctcacctccagcttcatgcccctcaccccggccccgcctccaagtccttccagcctctcctctcacctcgccttctttaatttcttcatgtctggattgatttcagaaaayttctgagtgagcttccagacggtagtcacgaaaatgacagcattgcactgggcagggagcagattgtgggttagagggcgagagcgatggtccagccgggcctgggcctgtggcgctcgggcttcggtggagggagagtgggtacttaccaaaatgatgaaggtcacaggtcccaagaagctccagaggaagccctgctcaaagtccaaccagcagctaggagggaagggaggggtcccatcagtgccccaggaagccaggagcggaamggagggcggccggacattgtgtgtggcactgcctgtgagccccaggcccagcaccccgccttcctcctgccccatctcgctgcactcactatctggggcggccgtagcccttgctgtagatggcagccgagacgcccacgatgagcaggggcacgccatagccgatcaggcagagccagcgcgtactcaggccctggccttggaacacgcgcaccacaagaaagtagagctccaggccttcgaggctcatccagcagaaggcggccaggaaacagtagtgcagcagcccggccaccaggcggcagcgcagccccacctgcggggcggggacggaggggcggagcgacgtcagcgcggggaggggcatgcggcgccagagccagtcgcctgccaggtcccgagagtgggcgggaccacagccggagggtgggcgggtctggagcgggggccaggtttccccccagggcccacccccaacaacgctcagaagcgagcgggcactcggggtgtggccaggcagctccaaagccagcgccctttaaagagacaacccgacccccmggtgggcggggccagatcccggacaggggcggggcctcatgcctccagggcccgcctacccgactgagccccgggagtgggcggggctaacccctcccaggcctccctgaccccagagctcaggagggagcggggcgggacctcacctggccgccttcgttctcgatgccggccaggaagatggtggagcccacgaagaggcagatgcagaggtgcaggtgtatggtggtgcgcgagccctggatgggccgcaccagcaggaaagtgaggatgcacagcagcaggcagaagagtgacagcgccagtcccaccctggtgatcagggtcagcttccagtcctaggagtggcaccgggtgctcagggttccttcagggcatgaggccttcctgccctctttgtggtcccttttcccccccacactttgacgggcccacctctctgacctcctcccttgtccctcctagatctggccacacttaccagctggaaggggagtctagggatttcacatttttgtgcttgctgggcctttggcctggaccacaggcgccccccttctctgcctggttaattgcagttttcgacaaggcccagcttaacgatggatcctactgaagtcacgtacagaaagtggtgctccaggctgggtgtggtggctcatgcctctaatcctagcactttgagaggctgagggggggcagatcacctgaggtcaggagttcgagaccagcctgcccaacatagtgaaaccccgcctctactaaaaatacaaaaattagcggtgcatggtggcatgcacctgtaatcccagctacttgggaggctgaggcaggagaatcgcttgaatccggaggcgggggttgcagtgagccaagatcacactactgcactccagcctaagcgatagagcaagactctgtccaaaagaaaaaaaaaaagaggccgggtgcggtggctgacacctgtaagcccagcacttcgggaggccgaggtgggtggatcacctgaggtcaggagtttgagactagcctgggcaacatggtgaaaccctgtctctactaaaaataccaaaaattactcaggcatggtggtgcacgcctgtaatctcggctactcgggaggctaaggcaggagaatcccttgaacctcactagctgagattgtgccaccatactccaacctgggcgacagagactccgtctcaaaaaaaaaaaaaaacgggcaagtggtgcccccttggaatgctctccatggggagcttttagttgacatctcacaactggtacgggatggacaggcagaggagcggagctagtggctgcacccagtgtatagttgctgggttgtagagaagaggccaaaggaagaggctgcgaagggtgtgacgtggggacacctgggctgtgcaaccatgcagatatatctgagcaaccagtagggctccatggagaactagctgcctgtctggttgcagctggacctcattacctgtgggcacttgaggatgcctccagctacttacctccacgtcataatgagccataaggatcgcaaagctgctcaggtggctgcattggcaggtggtgctgccgttcttgctgcccagcacctggcagccctcggtggcccagtgccctcccctgtcgctgtcactcttccagaaggcacagagcagctcctgccgtggcccaggcatcacgtcctgtgggcagatgggggtggtcagaaaggttggcctggagctcactcttaggtcctgggcttgggctgagtctaagagggctgctttttactagatgagtattgaccgagcgcctactgaatgtaacaggtttggagacacagcagtgaacagggcacacacaagtacctacccttgtgaggttgacataagagtgggagaggtggccaggcatagtggctcatgcctgtaatcccagcactttgggaggctgaggcaggcggatcacctgaggtcaggagtttgagaccagcctggccaacatggcgaaaccccgtctccactaaaaaatacaaaaattagctgggcctggtggcaagcacctgtaaatcccagctacttgggagtcctgggcaggagaatcgcttgaacctgggaggtggaggttgcactgagccgagaatgagccactgcactccagcctggatgacaagagtgaaactccatctcaaaaaaaaaaaaaaaaaaaaaaaaaaaagtgggagaggcagattatgacataaacctaacgaataagtaatgtagatagtgcattagaaggtggccagggatgatgatggctcttgcctgtaagtaattccaggactttgggaggccaaggtgggaggatcgcttgaggccaggagtttgagaccagctgtggcaacatagcgagacctccatctccattaatttttttgtttttaattaactgggcatagtagtgcacgcttatagtcccagctactcaggaggctgaggtgggaggatcactggagcccaggaattctagaccatcctgggaaaaatagtgaggtccccgtctctatcaaaaataaaaaaattagctgggagtggtggtgcatgcctgtagcctcagctactcaaaactctgaggctggaggaatggttgagttcaggagttcgaggttgcagtgagctataatcgcgccactgcactccagcctgggccacagagtgagaccctcctgtctaaaaatataaataaataagaaaagaaagtctgggagtggtggctcacgcctgtaatcgcagtactttgagaggccaaggcgggcagatcacctgaggtcgggagtttgagaccaacctgaccaacatggagaaaccccgtctctactaaaaatacaaaatcagcgaggtgtggtggcgcatgcctgtaatcccatctacttgggaggctgaggcaggagaatcacttgaacctgggaggcagagattgcagtgagccgagaacgtgccactgcactccagcctggacgacagagtgagactctgtcttaaaataaataaattaattaattaaattaaataaataaagtaaggaaataaataagtaatgaggttggggaaggcccaaatcagaaggccagaaacataaaagactgagtcacgtcgggaaagagcatcccagagagaggcccagcatgtgcgaaggccctgggttatctttgaggaagtgagcagagtgagcagagaccttggcaggagggtctcttcccgcctccccatcggaggactcaag

SEQ ID NO: 93831 - DNA, 75257 bp, Homo sapiens
tgcttcttggtcgacttcttatattatcaatataatacaaataactaaggccagactcggtggctcacgcctgtaatcccagcactttgggaggctgaggcaggtggatcacctgaggccaagagttggagaccagcctgaccaacatggtgaaaccccatctctactaaaaatacaaaaaaaatagccaggcatggtggtgggcacctgtaataccagctacttgggaggctgaggtgggagaatcgcttgaacctgggaggttgaggtttcagtgagccaagatcacgccactacattccagccagggcgacagagcaagactccatctcaaatatatatatttatatttatacaaaaccacacatatataagcaaaaaatgttgtgtaatcaaaatactccagtaacaaatttataaatgaggaattgtattcatgaagaaaatttacattcaaacttgttttaattgaaatttttaaaaagtcttctaaaggatcacacaggaagcagttgccataatcatgaaaggaatttcatgggttgttctgttttgttttgagacaaggtctctctctttgtcacccaggctgtagaacagtggtacgattttggctcactgcagccttgacttcctgggctccagcaatcctcctaccatagccccctaaattgctagtactacaggtgcgtgccaccatgcccaactacttcttttgtatttttttgcggagactgggtttcaccatgttgcccaggctggtctccaactcctgagctcaagtgatctgcccacctcggcctcccaaagtgctgggattacaggtgtgagccactgtgcttggccgaattttgtttttctctatattcatttcaggctgtgtctgcatgttcttagtgaagtgcagaattgagattattaactcaggctagaaattgtaatgcaaagaggaggatctttgattatttatgaatgatttttacccatataagtcacatcttaattaatgaggattacatattcccatggcagattttattatgtaacatgtcagagcatgtaatgtagtgggataaaagtggatcttagaattcaacagaccagtggctgggcacggtgtctcacgcctgtaatcacagcactttgggaggccaaggcgggcgaatcacctgaggtcaggagttcgagaccagcctggccaacatggagaaaccccatctctactaaaaaaaaaaaaaaaaaaatacaaaaattagccaggcatggtgtcgcttgcctgtaattccacctactcaggaagctgaggcaggagaatagcttgaagtcaggaggtggaagttgcagtgagctgagatcaagccactgcactacagcctgggcgacagagcaagactcagtctcaaaaaaatcttaaaaaattaaagaattcaacagacctgagactaaatacaaaagatccactgcttactacttcatttcgatttagccactttatctaaaagtgagatttttatgaggattagaggtaatgctcagaaaatgcctagcatagcacttcacatagacactctaaatctgttaggagagaagaattatatggagaacacaggaacatattctagggtgtattcacttcacactttccccttttcctcagatccaagtccccaagcccttgtaaggatgtgccctttcttgcaggacaatctattaccattcatgtctcagcctgggaaatgccttccccaggggtggaatgctgtcttctccctctggcctgggtctaataacattttgcctctcatttctctcctgccagcactctaagctagctttgtgtaaaggatttttgcccttaagggactttttggaaagccgtacattgcagtggaacgagcattgtatattgagtcaagggacctgggattacaagggatatgaacttgggcaaatcagtttacttttctgcaccttggttcttctgcaaaatgttgatatgagttggatagcatctaggtgtcaggatattagcaatcaatgttactgcagacattaatattctagtattaccagcagggactgcagctatcaatgtataaccaacaactctacccatcctctacagaatgatgtagtgtaaagaatatgggctcatgagtaagatagaactgtgttcaaccttgttactcagatctgttacctaacagatctggactgtgtgaccaaaggctatgtccttaggttccaagttaaatgtccttctttataaaaagagaatggatgcctattttattaggttatcatgtggattgaatcagatactgtttgtatattcctgggacatagatctgttcttgttgaaggagtctttaaatccattatagtgcacagtctttatcttactcaacactatcaacagcatatgacacagctgatcacattgtgtactttaatacattttctttacttgtactctcagaactctctctctcattcattttcgttcaactccctgacctctccttcttagtcactttggtatacatggggcttctctatcaaccctcactaccaggccatctcattcagctccatggctttatatagcatctttaagctgattattccagaagttgcatttccagcagatacctctcttatgaagtccagattcatatgtatagctgcccacttgatatctccatttggctgactaattgacatctccatttggctgactaataggagtattaaacttaacaagtcacaaacttcttctcatattcacatcacctgtttcttggtaactggcaaatctattcttcagttgcttaggctaagaactttggaattatctgaatcaccccacatcaatctactaacagattctcttggcatgattctcacgtatccctagaatctaactactttttaccttccctctgctgccgttctagcgcaagcaactgtcatcttccatctggacctctgtagtagtctcctaacaacaagcaggaaagggagcttccatcctgctccctttccttgtagcagccaggaagacccttctatggcataagcaatgtcatgtcacttgtcatagattaagtttcctggaagctgactgaggtggagtttagcatgcaagacttttcgaagagtgcccttgggatcaacacttgtggaagggaagaagaaagcagaattgggcagatagagaagtcaagtggttatacagatccaatgacaggcttagccaaccacgtgttagctttttagagctagaatgattcctcagagttgtttcaaattgggctaacatacagatctttatgctccctcatcaatcagccatggatgtggtctattccataagggacacaacctcggcaaagcagccctctgcagctgcagcagtccctgaagggattgttaccagtcagccaatagtacacccggtagtggagacaataggtattcattgaagaaggatctgggtagcacaacacaggatccatcatatgactcctttccctagttccctcctgtggcttcctatcactcagaatacaagccaaagttattatcatttctctctgtccacatctcctccaactctttcccctaattcactcccttaaagccaagttagctacccaggtgtttcttgaacctctccatctcctactagtgcactcctgtttcagcacttggcatagacagtccaaatctgtcagaagatttagacacttggctattaagctattcccccatatatctacagggctggcttctgcactttattcaagtctctgttcaattttcactgtatcagaagtgctttctcttaccaccctaaaacaaataacacgctgccctctcactctgttcccttattttgcttgatttttctttttttagcatttaaattatgaccgaacatggttatatgtatatttgtttcttgctctctccacttggatataagatccatgaaagaagggactttgtttttattcactgctgtatttccaatgactataacagtgccaggcacatagctgatgctcagtaaatattcgttaactgtaattattttggaagcagggccgtattctacagtaaataaaagataaggcactggactgaaacaaacataggttttatttgtgattctaatcacaaataggggtgaggtcaaatatgataatgtgtgtaaagcattgttaagcagctaagggataatactaagaatctaaaattgtttataagcgcagtgcctagcatgcagtgaatgcttaatagtacttatttttttgatcattattatgataaatatatggattgatttatggttagagttgttttttgatgagcctgtgattgttgtttaaatgatgcaaataatctcttcagtttttcattttaggacatcctgtagatagcctgagcttatatatatatatatttttctctctctttctttttcttttcttttcttttttttttttttttttttttttgagacaaggtcttactctgttgcccaggctggagtacagtggcatgatcatggctcactgcagcctcaacctccttagctcaggtgatcctcccacctcagcctcccaggtagctgagactacaggcacgtgccaccaaacctggctaattttttgtattttttagtggagttggggtttcatcatgttgcccaggctggtctccaactcctgggctcaagcaatccacccattttggcctcccaaagtgctggaattacaggcatgcgccactgtactgggcctattcccttttcaagagggagaagtttggtttatatctcagtttgctcaggctgctctaacaaaatgccataaactttgttgcttaaacaaccgaaatatattttcttacagttctggaggctgagaagtccaagatcaaggtgctggcctattcagttcctgctgaaagctctcttcctggcttgcagacagccagcttctccttatgtcctcatactgtctttccttggtccatataggggagcaggcagatttctttcagttctcctgaagccactaaacccatcatgaggaccctaccctagggtcttagtctaatcctaaattacatcccaaaagtcccatttaaataccatcaccttgaggtttaaagctttaacatatgcattttgaagggacagaaatagtcaatccataacagttgaatttttttatgtcagaaagtttcaacaacaacacaaattttaatatgtggtattggaagaaaagttttcataagtgcaacttcttcattttatatatgtgtttatacattgtgttgaaattcatttaaaattacatttactttaataggggtttgaaaaatttctctttaaaggaatcttgtgatttcttttgcaaaacttttttttggtaatcagaatcatcgttctataatttatttatctgttttacaaatttggatgcttacacaattgattttcttaattcttcgtatggatggacttgctgcaattcttatttaggatgtatatttactgtatgaaatgaaaatgtaggctgaaagtcagaaaataaataaattttaagctcttgtcaatctacatatatgagcataaattttaaaaaatatatcttttttcccagtttatttaaattgttgcctcacaaatacgcacaacaactttatctagtaaacgttcctcttgcattaacagcaaaagcagaaggtgtgaaggatacaggaagcgagaaataacttttaacgtctgctctagccctcctggactagcctaaaagcagacaggcaggaaaggctttgggacatagggtgatttgcaaggtgactccgccggtctctttcaagcgggagcgatacacaggtcagcccggatcgtccatggtcactgccgtaagtgacactaacagaatatatcagaaaatcactgcctttaaagaaccaggacatatcattcctctctccaacgaagtcttatattttaccattctgcgtgtattagaaagctaaatttaaacagcaacaataagaaatcttccccagtggatccctcgagcctttcgggaaaatgcaggtttctggctgacaggaagaagaaacagcatccaatcggcacttgtgtctcaatgaccaatcaaatttcgccttacattgcatcgctgggataaacggagctggacgactcagtctcttggtctgtggctgctgcggttacctggatgggcgagcacctctgaggctggctttgttacctgggcaataagggactagcagttcagccgttttctatgcctgctggatttgtttgtatttgttcccagccactgctcatgtaatgtactcccttaaccaggaaattaaagcattctcccggaataatctcaggaagcaatgcaccagggtgacaacgctaactggaaagaaaattatagaaacatggaaagatgccagaattcatgttgtggaagaagtagagccgagcagtgggggtggttgtggttatgtgcaggaccttagctcggacctgcaagttggcgttattaagccatggttgctcctaggtgagtatatcgacttgccactagatcattgagtccttttagccagattacgttctcattttccycctttatgcgtaatagtctgtattatcagctatcctgccgaaaagctgaactgtttccttttttggatatggaacttccattagccagctagagccgtttctgcctcacagtgtacccataagaagcatagatgctattctsgtagcacttggcactgcatatttgaattttagaaaagctttcttcccgtttctctaacttctctggagaataacacattgatgttgtgttttcttggcttataaaaaatacagcttgaaaaaaaaggaatgaaaaaagaatgtttgtatcaggcagaactacaagtgacaatggttaaagttatagaaaagttaatactcgaaatagtcctgtgcttgctggcctgcgcagctcttacagaccgtgcggaatacatgcctcctgtggccacgtctgttcatggtgtctgtttttggagtgtttaagagaaggagatcttaagatcttatgatttatttcgtattatggaaatactgagcccctatacaagcatagttcacaaatagcaaatgaagcaaggttataaaagtgcaaacttgttaatttggcaagaatatggtatggtgttcttaaaaaaatagtcaagaatgttttcaagtacgtctgaattatttctatttatgaatagagaaattaagacttggaaagactaaatgacttatcactatgcagctaaggcattcttgaatagagagaagactgagaaatagcccaggtgctgttcacctagtgtcttactcctttgaggaatcctgtgaagtagggattatcagctttgttttacaaatagaaaccaggatttaaaattggtgaagtaatttacacaaggtaacacacctggtaaataacagacgtatgcatcaagcccaagtctgatggactcctgctgtccattgttatactaggctgcctcacatagaccaagttttcaatcctgctccgcctctaatttactagattagctggtgcaagccatttatcctttctggtcctccaaaaagccatttgtaaagatgaagtaacagtatctgcttatgtcataggatcctcctgaggttgttgtaaaaggtttttgatgcaaatcaattgcagtgtacatataagttattaaatattatatgaattgttacataggctgtctttaaattcaccaaataaatgtctctaactagtttctacagtcccgtgaaaaactgtaccatattcttgtcacatttacagtgaaaaagtgagttatttaggtaatctgaaaagttcacctaggccctgctcaccatatctaggaaagaaaataygtccyggcacatttttcagttattttggcttccactgtagtaatcatggcttggaataattatggtagaattttcatatatcattcaccaatttagggtcttcatgaactttgcttattactattatttgtggacttacccaaagtgaactgatcaaggtagtgttctgagattggggttggaaacctccccaggatagtgggagagtcctgggaggaacttctgaaactagccctaataaggtcttctctggaatgggatactttcatcaggagcaacctcctcccttctgaaagctcacctttttctgcctaattacaagtgcctcattcctaaaggatccatgggtggttccacccgcagttcttctacatgaatgttgaaagagttgtttctgaccagacttagtttacgtctgggagactggggttgtttgcaggttggttctaagagcttctttcacctcctcaaagcgacacagcttcctcccagcatcgcatgccaaacaacttttggtttgggtgatgaataaagaaaatgaagagttgtaaaaatgtaatcttttttagttcgtaaactctaaaaagtgactgcatttaaaaaatattacataggccctcgaaccatttaaaaatggagaaaagattttagacagcatttttgtcctaggctttgaacattatatatagacagataattatttattatttatttatttattttgagatagggtctcaaaataaatccagggtggagtgcagtggcacgatcttggctcactgcaacctctgccttccaggctccagcgatcgtcccacctcagcctctgaatagctgggaatacaggtgcacaccaccatgcctggctaatttttttgtactttttgtagagatgcggttttaccatgttgcccaagctggtcttgaactcctgggcttgagcagtctgcccgccttggcctcccaaatttctgggattacaggcatgagccaccacgcctgactaaaccaccaaatttcaattatttgaacctattttttcctctggagttggttagggctttctacattagaaaacagaattttaaaaaaaattatgaagtatttcaaatttatagaaaattacagaaactaatagacaattatgtatataccattcagctttaacaaatgttaatattttgataggctaacttttaagtataataaagctgaatgtgagctcagtagcgaacctgtaagcttggtattatcaagaggatattggccaaacagcatacttgctggcctttcagccacctaaaatcacataataaaagttggctgaattcccagatgggtaacttaaaaaaaaaaaaagtttatgaaatagaacctaattcaggaaagtaaaatacttgaaatctttaaactgtgaaactcactttattttgactagttattctccatatgaacttgcttattaactagagccagtttccaagtgtgggagatctgggaagccggctgtgacagaaagagattgtagaagggcacagccctagtgatacatggagtgtgggtgggatcctgcagaccaacagcatttgctctaagctactgggtgttcccaaaccagctggcacaaagtcatcttgtgggtgtgtggtttttgtaatatccttttttaagttacaaaataaagagatgtttattgtaaaaagtcagaatgagcataaagaagaaaaaaaaatcacctgcaaccccattgttaacattttgttctatgtatacctcctttccattttttaagcatatacatattttttgttgttataaaaatggatgatggtattttgtaacctgcttttataaccagatacattgagaacatttttctttttttttttttttttttttgagacggagtctcactctgtcacctaggctggagtgcagtggcacgatcttggctcactgcaacctctgcctcccaggtttaagcaagtctcgtgcctcagcctcctgagtagctgggattacaggcatgcaccaccatgcccagctaatttttgtatttttagtagagatggggttgtgccatgttggccaggcttgtstcaaactcctgacctcaagtgatccacccacctcagcctcccaaagtgctgggattacagacaggagccaccactcctggccaagaacatgtttccatgctatacatattttaccacatttcttctttctctctttctctctctctccctctctttcccttcccttttgttcgttcgttcgttcgttccttccttcctccctccctccctccctccctccctctctcttctcttgtcttgtcttgtcttttcttttctwatcttttcttttcttttgttttctttcttctggctgtgtcaccgaggctggagtgcagtggcataaccatagcttactgtaaccccgaattcctaggttcaagggatcctcctgccttagccttctgaatacctgggaatacaagcatgcactaccatgcctggctaattaaaaaaaattttttttctatagacagggtctcacaatgttgttcaggcttacatttcttatttctaatggtggtaatggctgtatgtatttcactacacaattataccattttttatttaatgcaacagctattattgggcttttagtgttcttttgtttttgttttgtttatattacaaacaatactatggtgaacatccttacagctaatctttgcaacatctataacttttaggacaaatttttagaagtaggatttcagagtccaggagtttatgtaggatgactgttatcaaattgcccttcagaaagttggactaaggtccttccaagttgttggtcttttttttttaataacagaattgctgtagaaatttatataaaagttcaagatgattatatttgtgttcaaggtggtatcatttatttcttctagggtcacaagatgctgctcatgatttggatacactgaaaaagaataaggtaaaaaaatgctttaagtctggcaccatatacacagaatattttaattgttttatttaggaaaaactgtattggtccatctttggtatattatggagtttatttggtaacattttggctatcatttcaatagagttgaaaaataattggcacataattcaaatatgtggatctgtaatctgtctttccagttttacattcttcttgatctccttcatgtaccctcatgaacctgaccttggaggcatgtctttcttgcctgtgtttatgtagttcctctgtgtgggatagactttccctcatctctgcttgtccaagacctgtccataccttaagtcccaactcacataccacgtcttctgtaatgccatttccagccactctactccatacaactgatgtgatttattacatatttactcaaaaggatttttagccctctaccatttttttgagtactgtttcaggtcatggaattgctgtaggtgaaggagtgcaagagattcttgttcacttgaagcgtatgacctaaggggcagacagagaagagagacaagcagctaccgaacagcgtttgtgtgctttgatggggaagtgcagggtgctgtagaagtgcataggagatgatgctcttaacccatgtttggtttggtttgtttttggggggataagtgagtcaggggagacttcctggaggaagtgatattgaagtatttctctgaagaggctaggaaaggagtagacagcctgtaatcccaaggctttgggaggccaaggcaggaggattggttgaccccaggagttcgaggttacagtgtgctatgattttgctactgtactccagactgggcgacaaagcaagactctatctcaaaaaaaaaaaagaaagtaaagtgttcatacagaataaatgatatgtgtgaaggcccagaagcaagagaaaggtggatgctttcagggacagaaaagttcagtgaccctggaatagagagtgtgagaaagaagggcaccaagagacaaggccagagagagaggtaagcatgagccagatcacaaaaggccatgtaagccaaagttagttgtgtggacttgatccaaaagactatggaaagccactgagaagttacccagagatgtaacaaggtcaaatttgcagttcagaaagatttctcattagaagcagtgtggaaaatcgattggagggttgctcaagttagagatgggggaaactggttataaagctattgcagtaatctaaggaaaagatgataatggctgagattaagatttagtggagatagaattagatagatgtgaggggttttttagagggtagaattcttaaaatttgattacttatgaggcaggatagggagtggggctaagggagaaggaggagtcaaggctgatgtctagctttctttggtaactaagtaaagttatcgttccatgagattgaaagcaacgtagaaggaacaggctttgaaggagaaacagtgtgctcagttctgaacatgttaggttttgggtgatgtggatcatctaggtgggtggatatgtagggtctgaagttcagaatagaggtgaatatatagatttaggaatctkcagcttttaagtagttactgaaaccattagaatagatgaagctgcctggggaaaagtgtaaagtaagagagaagagggcctatgacagaatcttatcacagaactgataaattgaggaatatcaccctatatggaatgatcaaacaaagaagagtccgcagtgggaaaggaggatctaaaagaggcccaaagaaggtaaaacaaaaagatggtgtcatggaaactaaagagaatagtgttttaaggaggagagagtcagcaatgtcagatgctgtaaaagtttaagtacgattaggactaaattatatccatgggacttggtgacagagaggttgttagtgcgtttggtggaaacagtttcatttgaattggaggccaaagccatattgcaaaagattgagaagtgaggaagtgatggcaaagggaaaaaaaaaaagagagagaggagccataggtgaggagggggaggggagagctttgagcatgttttaaggctgatggtagaagaaggaattgaagatacagaaaagcaagaattatgactatagggagatgccaagaaagtaggaagcactgtgactccaagcacaggttctggaatgagccttatcgaagatgcacgagcacatccttcattgtaatcagaaggcagaggggaagtacagatgtggacaaggttgttaggtttttttttttttttttttttttttttttgaggcagagtctcgctcatttgctcaggctggagtgcagtggcatgatcgtggctcactgcaacctttacctcctgggttcaagtgattctcagcctttggattatyttaatggactgtctgcctggctttcttccacatggttggtggactctaggaaaaggggctcaaatacatagatgcaagaggaggaggttgctcaagtgtaccatctgaaagaaaatattttacaaccacacctccccttacttttcagccagattggttcatcagaatctctgggtatgagaccctgtgttattgatagtttttaagagttcatcaggtgactctaatgtgcagtcatcctggagaaccattttataaagtaaagaatatgaaggaaaatagggaaataattcttgaaagggaagttgtataccactgatacacttctcctatttaagtttttatatggatattcacagattaattcaacaaagattttaagcattttctgctaaactcactgctcattcgcttataacactaagttaaacatggtccctaccctcatggagtttctagtgcagtgaaagagaaaaacaatctctaaatggcatgagctataatagggcaagtccagggctatgaaaatatataggccaggtgtggtggcttatacctgtaatgccagcactgtgggaggcggaagtgggagcatcacttgaggccaggagttcgagaccagcctgggcaaaaaaagtgagacccgcccccctcttctctgaaaaaaaaaaaaaaaaaaaaaaaattagctgggtgtggtggtacacgcctgtagtcccagctacttgggaggctgaggcaggaggatcacctgagcctaggagttcaagattgcagtggcctatgattgcatcattgcactccagcctgggtgacagaaagagaccctgtctctgcatgatgataataataagttaaaagagagagagagagagagaaaacatatagtagaaggagcacttctggtgtgggattgaagcagtattatcattcaagtgagtcgcatttaaattttttacctttcttgttatagatatcaacaccccagtctctttttaggtaacctaattcatgggatttaaaacaatcatcttttttctttctctttaaggtgactcatattcttaatgttgcatatggagttgaaaatgctttcctcagtgactttacatataagagcatttctatattggatctgcctgaaaccaacatcctgtcttattttccagaatgttttgaatttattgaagaagcaaaaagaaaagtgagttttgttttgatccatagttctgcagaagcagaaatttgaaagtgtggatccattacccaatctttattatttttataatgaatctctaaaaaacaattatgaaatttcccttctaacaatatttcattatytcctacaattatttggttaattgctcttttttcaatgagatgtttagtttcaacattaattcagactataaaacagagactgctctagacttgttagtgtatttatgatgattaatatgcatttgattttaatgaatgagatagttattgtgaaactatgcatttttagcagtaaaattttaaggcactctaaggactaaatgtgtattgctttacttagattgtatgaaaatgctgatcagaaactgtctgttggttttctgaagttagaagaccaatagccaaygtcatatagtacttcarkcttgttaytgaagtcaacattctgacaggcaaagtttctaggttggctgttatcaacaattattccttgaaatgtcatcatttttagtcagcaaataattcttacagrctttatgtaagatacgtagatgggaaagtagaagcatttacagagagaaataactcttctggaacacctaacaatgacaggattacaatcaggtttaattgaactctggcctaccttctctccctttatcttttctccttcccattttctcttcctctctcccttctttcctttcatttagtaatatttattgaatgccttaggtgcccagcactgttctacgtgccttcctactagactacccagaaaatataaaactattcaattctactgttcatcaactttacttaatagcagatacagtcatgcactgcataatgatgtttggactgcatatatgatggtggttccataagattataataatgtatttttaccataccttttctatgtttatgtatgtttagatacacaaatacataccattgtgttactgttgcctacaagtcagtacagtaacatctgaacaggtttgtagtcttggagcaataggccataccattctaggtttgtgtgagtgcactctgtgatgtttacaccacgaagaaactgcctaacaacacatttctcagaatgcatcaccattgttaaatgatgcacgactgtatttggatggaagcaaaggaagaggttttttttgttttttgttttttgtgttttttttttttgttttttttttttttgagatgcagtctcactctgtcgccaggctggagtgcagtagtgtgatctcggtgcactgtaacctccggctcactgcaacctccgcctctcgggttcaagtgattctcctgcctcagcctcccaggtagttgggactataggagcacactgccacacccgggtaattttttgtattttagtagagacagggtttcaccgtgttgcccaggctggtcttgaactcctgagctcaggcagaccacctgcctcagcctcccaaagtgytaggattacaggcatgagccactgcacctggccaagggagaggttttytaattcaaagcctaatattggccattctgttttcttgttaaaaaatttacaggctctggattgtaacattccagtgtgtgagttaatagttttaaaaataaaaaggatgtttctgtattggctccttctctaaggagatgtagaatatgccagagatggcaaagtatagatatcatccatattcatattaacattagaagagatgtaaatgttgcaagtaaaaattagagaggttaatcatatctagaaagaaaagcaagagattgaatattctaataagcttggaattttaaataaatttaaaaaataaagtttgccttaatttgggccagtaaattagagtggattttagcttgggtttcctaaaaataaagcctgagatgaggatttagagctkatgcttaatttgagaggtacaatctctaggcagtgagagtggcaagaaaggaaagtgattcaaggtgggacgagaagcaatacaaagtgatgcgtttaccctgctgggctcatttcacagtgagctgactgttggctattcagcaggtacagctactctaccacccaaaatacctctggacaggcagtacaaagaaactgcacctcaacccagcctggaagggaggatttatctgcctggcttcctgtcagctcctgtttcccattggtcaaagtttgccagtggggatataaccaaccccacaattctaggttataacattccactctttcagcagccacctcgaagccaaatctaacacccagtaatacaacttttcaaccaagttgagaattagaaaatccagaactcagagtacgcctgtctatactgtggacaccatggaagaagagctccttctttgacaggcaaaagtgaaagcaggggagagcagtcagccatggaggtggtagccgaggtggagcatgctgagagggtctgtgagatggcggcaccacaggaatctgaggagctgcagaaaatgtttctgataagatgaattagatttcagaaatatgttctaccctctcaagccttgtgttttatactggaatcctaacctcagccaatatttccctgccctgaaaactcagtgccrtgacacaatctcagctcactgcaactccacctcctgcactcaagtgattctcctgcttcagccttcctagtagctgggattacaggtgcgmaccaccatgcctggctaatttttgtatttttaatagagacggggttttgccatgttggccaggatggtctcaaatgcctgacrtcaagtgatccacctgcctcagcctcccaaagtgctgggattataggcatgagccaccatgcctggaaggctaatatatatttagttttagcaataaaaattcttgaatttttttcattttttttaagaaaagatctcttcatgcctttgtctattttatattcaagtattgttaaatctaattactcagtgaattacatgtttcaaaactacctttctaggctatagtttgttgttttcatctttttgcataccgttgccaaatggaatggattccatttcctaagtctttactcatttccctctgtacttgcaaaactctatttggcttctctgtccttcctttatgcctaaagggacagaaatacacctgagaagaacagtaatggtaacttctatagcccaaagagtccttttaggaactaaatttatttgtcccctctttttatgtacaaaaggtacaaagtataacaatgtgtatttgatatttcatgttcattgtttataagatgtgattttaaaaacatgacgtaagtagtccatgttctttgtagaaaaaatggaaartgcagatgaaaattaagayacttccacacttagatataagcattgttagcattttgatatatttttctagacctatatatgtatttttataaaaatagtatcatacagtttatattcttttatagcctgccttttttttgggagggcaacttcatgactttatttgtggtacctgtgctttatcttgaaaataccttctccccctgtcccagacagcgggctgggagggggcagcaaaaaatagaagacttccctccctattgcacatggaccctatgtacaggcccacccggctgaggccagcaggcctcttggcacattcttggatccctgctcaggaggggagggctgacggggtgctatcacatgtgagatcgggaactctgggcggccactttggtcctgggtactgatatttgcacttcttggtcctcagttccttcctggtcctgtctctggccctagtcccctctgtatagcctgctttttatacttgatgattcaaatcatttaaaatttttgcacagtattctggtagttggtgattctataatttatcttatttcctgctatgagacatgtaagctgtttgtagttttttgttcaatagaagtaaaagttcattagagagacattatgggtctaaataagtacctaaattcacgaagtttttagatgcttctgttacaagtagagggtcatgactgcaagttgtccaggttcttggcattttgaacaaataattggacaaaacgcccatcaaagcaaagaaagaatgaagcaacaaaagagcaaaagcagggatttattgaaagtgaaagcacactccacagtgtcggagcaggtccaagcagcggcccaagggacaggatacagaatcttcttgggtccaaatacccactagaagtttcccaatggccacttcatgctcaccttatgtaaatgaagtggtatcctgcagtcagtctgattggttggagaaagcagccaaccagaggctgaagtgaagttacaaaggtcacgctcctgtgcaaacatctgattggttgcaaaaagcaaccagtgagaggctagggtgaagttacaaagttatacttctatgcaaacgaagacttggcctgcaattagtctgattggttgtggacagcaaatttcccatctgcatgcagaaaaggtgaggggtttgcaaaggcagtagcccccggtgcttttgttacttaggtgtggaaagttagggttttcctttgaatttagttctgggaaatcggagtaaaacagccttaggttccctgccaccagaccctattctcttgctttacttcttccattttgtttcaaagcagtctacccatcacttttttgtatttgtcatatttacattcccctctactactgtggatagtcatgagtggactgttctgacctgtgctcctcaaagtgttgtccagtttgctaccagacytctgcaggataagaaggttgtgcctgaatataaaccaagacattgcttagttctttgagagattttggctactcccccaccccacccaaacgctgaactaaggagtatatttttagtgacaattgattttcattccactgcaaaattcttatttcatcataggtggctgtcaagcacttgcagactatcacattatacccaaggtttttttaagttctggggcacatgtacaggatgtgcaggtttgttacattggtaaacgtgtgccatggggatttgctgcacttatcaacccatgacctaggtattaagcccagcatgcattagttatttttcctgatgctctccctcctcctaccccacctaaccccgacaggcccccagtttgtgttgttccgctccatgtgtctatgtgttcacgttgttcagcttccacctataagtgagacatgcagtgtttggttttctgttcctgcgtcagtttcctaaggataatggcttccagctccatctgtgtccctgcaaaggacatgatctcattctttttatggctgcatagtattccatggggtataygtaccacattttcattatacagactatcattgattggcatttgagttgattccatgtctttgctattatgaatagtgcttctgcccaagttttttttttttttttttttttgagacagaatcttactctgtcaaccaggctggagtgcagtggcatgatctcagctcactgcaacttccgcctcctgagttcaagtgattctcctgcctcagcctcctaagtagctgggattacaggtgcccagcaccacgcccagctaatttttgtatttttagtagagatggggtttcaccatgttggccaggctggtctcggactcctgaccttgtgatccacccgcctcagcctcccaaagtgctgggattacaggtgtgagccactgtgcctggccatgccgaagttttaatggaagttaaatataaggaaaaacacctgggcctggctcagttactgttaacaactattaattacttattctgagaagatgtgagggatacacattgctgccctcaaggagcttgmaatctagttgaaaactataatagcacaagaacaaagacaactctatgaaatggaaataacatagcataattactatctgcctataggttactacttgcccatagcaaaatggtgattttgaatttttgaaagaacactttcctttcagaaatgcagaacaaatgtattcacttagcaaaaagytatggaataactactatatgccaagaattgcactaaatactaggcatacaaagatggttaagacattcctcataccctcatttcacttggaaagaggcagtcttagaacagaagtcagaattagctgtaccaagaagagcaaaggtcttctaggcataggacaacagcaagtgcaaaggaaaaaaaaagtggtttataaattgtttgttactattttgagctctggaaaagggatataaagccaataatttctctggaaatactttcaaggacaatatgatacctaaggaataatcaaaagtagaaagtaggtaaattgaaaagctgtagaaaaacagctattatataaagtagaaagaagaaaataatatcatttgaaaacattagctaaaattggatgcacaatgtgtaagactgaaaataaagctagtttcatgttcaaaagcctatgtatgcatcataaagtaaagccgactagtatataagcaggaaatattaaaagtgacattgaagggtatctcttgcttattaaggttatgattgcaagtttctttggagtatctaattaatttgttttatgctaaatgaagttcattaataattttcatcagttactttaatataatttttaaacatcttaagttttgtaaaaatgggctattgctacaaaatgagaaaagttcccaaggtgtatagtgaatatttgtgttttgcttttcttatatagaaactgttgaagtttgaaaatgagtcataaatatctatagaaaagagtaatatcccatagtaatgtaagatgtgaaaaaagaaaacaattgatattttccttttttatatgaggattttcaaaatgttaactaattttgttattaatcatttggctttcttgaaaagagatgcacttgcaaatttgttacagcagatcaaggaaaggagttttgcaacagatgtctgaatcggaaaactgccttgcagaagtaaaataatccaatgagtcataacaatagtattgttaatatgtgctttgggtagagggttttcagtagtatattttttccctcctgctctcgtctttttttgtgttgtaccaaataaagaatcaagaaatgaagtaactaaaatgtctaattctggagggtgtgctcacagttcaccacatttcatttagatcattaactttttaaaagcttcagataggccaagctgtatcaatgctgtcccatcagatctatcacattcattattaatacaatattgcccccatcagcattggtcttgcactgtgtctcttttcacttggaaagtatcatttgcaagttacctgaaatgtttttcatttattgacctcatgctggtatgtgattaccttttccacttcacattgttatgagctatttgtgtcacattttactacatcrtaagtttaaatatttttaagtaactttctgccaggataaaatatgtgcaagggtagaaaattttttccttgctgattatttaaacagatttgcaagccattgacactagcttatttatgagaacactaagtatactctggagtatttctggctttctgtttagcttatagttatgattttattttatgtttccacatatatttcctgtggtttttttcttatttatatacacttatctactaagttgttaggttttatgtgtactttactgatacatttggctacaaagttgttaggttttcatgtgtactttactgatacatttgactactaagttattaggtttttatgtgtactttactgatacatttggctactaagttgttaggttttaatgtgttctttactggattactttagtttaatgaaagatactgtttcagaattccaaacatcattaaagcatttcaatcatgggttagtaggtaagggaggtacaggttgattgattgattgattgagtttccatttgttgctggtaatgaattttatttcaataatcaaataaattraatcaaataaatcaataaaactgaatatttactttatactttcaagtagtataagaatgtgcaattgatataataacctttctcaaatgaataatgaagatttttgtttgtttttttttttgtaggatggagtggttcttgttcattgtaatgcaggcgtttccagggctgctgcaattgtaataggtttcctgatgaattctgaacaaacctcatttaccagtgctttttctttggtgaaaaatgcaagaccttccatatgtccaaattctggcttcatggagcagcttcgtacatatcaagagggcaaagaaagcaataagtgtgacagaatacaggagaacagttcatgagttgcattgtagcagacaatggacaactgtagtttctgaattgacttctatagccatcttttcccttttttggagagtagactagcaaaaytcccttttttctcttgccttttttatgcataaatggaggtcaatytgattgtcctgacctactgtataagtaaatttcaaatgtcattactttctctttgttattataatgtgtgattaaatgcttttttaaattgctaagggaaaataacaaagtgttagtaatcattgctttctgtagaagaaaaaggtttaaatttaaaatgtgtatttagagcatggagagaatcatttaatgaagcctatttttctgttccagcaactgtttttatgaaagaaaaacttgaaatgctacttaacttactatttcaaagggaagtatatttctttttaaagaatctttttaagattaaaaatgaataccttaaatctcccaaaagagataaccagtatctgaaggtttatacaatatttacacagtggctacaatattcacaaaattcttatgttctcttatgaaaaatatacacttttcattttgtcttcttctttttttttctttttttagatggagtttggctcttgtcacccaggctggagtgcaatggcgcaatctcagctcactgcaacctctgcctcccgggttcaagcgattctcctgccccagcctcccatatagctgggattataggtgcctgccaccatgcccagctaatttttgtgtttttagtagagatggagtctcaccacataggccaggcagtctcgaactcctgacctcaggtgatccacccaccttggcctctctaaatactgggattacaggcgtgagccactgcatccgacctcattttgtttttttcaattctgttatcggcatttctttcttttttttttttaatgtataggtgttctgtcatacgttattgtgagctttggttctttgaacaggtgatctattctcttacattttgtgctttttatcttgggtgcctagcattctgtttttttgatcctatgtcataattttttgagaaaatgtttgatactgcaagatcattgtttagtggtctgttttctacttcagtattctaccagagaacatattttttaggggagaagggttatggttttgtaagaaactttaaatatacttttaggagacccacaatcatttacagttttatctttggcctttgaataggttcttttttctttaatgtctccgtatttgmagaactgagctctgtacrttataaatttgcttaaagattttgattttttcttcagaatatggtatacttaaaattaattaattaagacagtttcttttttcttttcttttttttttttttcgagacagggtcttgctctgtcacctaggctagagtggagtggcatgaacacaacgcactgcagcctctacctcctgggctcaagcagtcctcccacctcagtctcctgagtagctgagactacagctgtgcgccaccacatctggctaattttatttttatttttgtagagacaggagtcttgccatgttgcccaggctgatctcaaactcctaggcttaagtgatcctcccgccttagcctcccaagtgctaggattacaggcatcagccaccacgcctggcctgatagtttccacatagtttttcatgacttagaagatatcattgccatgtaggttttatttttaaaagtcttgagctcttcttaaatatacattataaagagcaagcatagatggaaagtgcatattgaacacatctgtgcatttgagaaggcaggctttcatatgctgtcatgagcaaaaagtagaagtgataaatgcaagttatgttttgagattgcttacaccgtgacaagatgccatcacttgtgatgttatgaactgttataaactctttgcttctgctaagaagcagtctaaatataatcaacgtacagtgagctctttgaagccaaccaaggcaggcagaaccctcttaaatatgagactgatgtataggttctctctatggtcagtatcactggataagccttctcctttcataagaaaggatgtatttaaatacattttattttgctaaatcctgtttagttttcagccattaaatgtcacatgaagccttgatagaatttgttcataatggctcatgtattattattatttttgagatggagttttgctcttaatgatattattattatttgagacagagttttgctcttattgcccaggctggagtgcagtggcgtgatcttggctcactgcaacctctgcctcccagcttcaagcgattctcctgtatcagcctcccaagtagctgggattataggcatgtgccaccatgcccagcaaattttgtatttttttttggtagagacagggttcaaccatgttggtcaggctggtctcgaactcctgaccgcaagtgatccacacgccttggtctcccaaagtgctgggattacggtgttagccactacacctggcctggattgtgtattatttatgtctgtagtttatatgcttagttgttgcctatagtgatctgggtaagattcaaacatttatcttttgtatcttctacagaagtgctttgagcatcaaatttgttttaacgttaaattgtagtttgctgtattaaaatagatcaatgaatataattcagtcttttaggggcaccaagtaaagcataaggtcatatatactatacaatatgtttattgcacttcccatggggataaatcactctgtcattcctagttattttaaaaaaagaactttatgattacggtcctctttctcacatactgcaaacttaaaagatacatacaccaaatataggtctgttttaaaggagaggaaaaatagttcaaggagtttttgcctctttgtttttmaatagattattctgccattttttaaaggaaagggaaaatgaaaacagcatgtctttttaaacattgaaaagaaatatggaggctttaaaccgcaaactgaaaaagctgagtagaacaaaggcagtggagcatacaatacaattctatttatttgaggttaattgaagttaataatttttaaatttttttctaattttatgccttaaaataggtttctgattacataaaatttgaatagaacactcaagaagtatgtagatttttgaaaaacccaaacaatattcttcttagatttttggaggcaaaatttagaccagtatactaattcaaaagacaaatatttcagaggaagtggagtayagtatttaacattttgtttgcaattttactttttcttcccttcttccctattgaaccttgattaaaatgtatgaatacaatacttggatttttttttttcagcttagactctgataatttcagtggtagtggggaaacctgaatttgtcagcatgattatttgtaactcagattgttcaaatgtatatagaaggtccccttcaagtgttgtttctccaagtagtcataaatgtagcaagtataaatcagaatatcatcttataatcttacagagttaacctaatgagtcaatacctttataagcaaaaccatgataaatttaaaaacaacagaaatgtggcatgattacttatttatttgttccaggtgactctaaatagttgatttttctgcctgaaggatcctgaacatatttagttaccctgtagttatttaggaatttaaaccagaagactttgaagttgtatattcttgcaatrcataaaatgacattataatcaacaaacttatggtttgtttcaattgatgcacacaaaaaataacttatagttagacttttctatttcaagtaaagctttgagttacttrtttttatacatattcatcatgtaccctttattgtttctaggtgttgatatactttaataaaaatgatatgtttaatattttcccattaatatatttctttgaagctatttgttttaaaagatgtaacacttatttgctgtcaaattctgaattaaaaaatctgttggtggccaggcgcagtggctcatgcctgtaatcccaacattttgggaggccaaggagatggatcacttgaggccaggagttcaagaccagcctggccaacatggcaaaaccccatcactaaaaatacaaaaattacccgggcatggtggtgggtgcctgtaatcccagcttcttaggaggctgaggtaggagaattgcttgaccctgggaggtggaggtggcagtgagccgagatagcaccactgcacttctagttgacagagtgagactctgactcaaaaaaaaaaaaaaaatgttgggaagacacacaattttatattttaaaatgtaagttagtttagatctatgaagatttgttgttcccgtctcttcaagaaatgaaaagccggctgggtgcggtggcctgtaatctcagcattttgggaggccgaggcaagaggatcacgaggtcaggacttcaagagcagcctggccaatacggtgaaaccctgtctctactaaaaatacaaaaaaaattagctgggcrtggtggcacacgcctgtagtcccagctgcttgggaggctgaggcaggagaatcgcttgaacctgggaggcrgaggttgcagtgaactgagattgcgccactgcactccagcctgggtgacagagcgagactctgtctcaaaacacaaaagagaaaagctaaagtaagagcatataattggcatcactgtggacagattgtcaatgaaaattcaatagaataccttatttaaggtaagagaagatgctgagttactgtcagattaaattaccctacattctaactatgactgcattgagattatttgtacatagtgtggcacccacctcccacgctcatgcaaacaggctgttatatctttgtaatagttattttaaaatgtacaataaattattgttgactgtagtcaccctgttgtgctatcaaatactagatcttattctatctagctatattttaatacccattagccatcrcacttcttcccctcatgcccccactgttctttccagcttctggtaaccatcattctactgtctatctccatgtgttgaactgttttaatttttggctcccacaaaggagtgagaacatttgaagtttgtctatctgtgccagtcttatttgacttaacataatgtcctccagttctatccatgtttttccaaaggacgggatcttattcttttttatggttgaatagtactccattatatatatgtactacatgttatttatccattcatctgttgatggacacttaggttgcttctaaatcttggctattgtgaatagtgccgcaataaacatgggagtgcagatatctctttgatatatgaatttcctttcttttgggtattttatcaatgttcatcagggatgtaggccaatagttttcttttttaatgtgtccttttgattattattatacttttagttctgggatacatgtgcagaacttgggggtttgttacataggtacacatgtgccatggtggtttgctgcacccttcaacctgtcatctaggttttaagccccgcatgcgttaggtatttctcctaatgctatccctccccttaccccccacccctcgacaggctccagtgtgtgataatcccctccctgtgtccatgtgttcagctcctacttatgagtgagaacatttggtgtttggttttctgtttctgtgttagtttgctgagaatgatggtttctagcttcatccatgtccctgcaaaggacatgaactcattcttttttatggctgctagtattccatggtatatatatgccacattttctttatccagtctatcattgatgggcatttgggttggttccaagtctgctattgtaaatagtgctgcaataaacatacatgtgtatgtgtctttatagtagaatgatttataatcctttgggtatatacccagtaatgtgactgctgggtcaaatggtatttctggttctagatccttgaggaatcgccccactgtcttccacaatggtggaactaatttatactcccaccaacagtgtaaatgtgttcctatttctccacatcctctgcagcatctgttgtttcctgactttttaatgattgccattctaactggtgtgagatggtatctcatcgtggttttgatttgcatttctctaaagaccagtgatgacaagcttttttttcatgtttgttggccgcataaatgtcttcttttgagaggtgtctgttcatatcccttcacccactttttgatgaaggtttttttttgttttgtatatttgtttaagttccttgtagattctggttattaggcctttgtcagatggctagattgcaaaaattttctcccattctgtaggttgcccattcactctcatggtagtttcttttgctgtgcagaagctctttagtttaattagatcccatttgtcaattttggcttttgttgcaattgcttttggtgtttagtaatgaagtctttgcccatgcttatgtcctgaatggtattgcctaggttttcttctaggggttttatggttttaggtcttacacttaagtctttaatccattttgagttaatttttgtataaggtgtaaggaagcgatccagtttcagttttctgcatatggctagctagttttcccagcaccatttattaaatagggaatcctttccccgttgcttgtttttgtcagctttgtcgaagatcagatggttgtagatgtgtggcattatttctgaggcctctgttctgttccattggtgtatatatctgttttggtaccaggaccatgctgttttggttactgtagccttgtagtatagtttgaagtcaggtagcatgatgcctccagctttgttctttttgcttaggattatcttggctatatgggctttttttggttccatatgaaatttaaagtagtttttttctaattctgtgaagaaagtcaatggtagtttgttgggaatagcattgaatctataaattactttgagcagtatggccattttcacgatattgattcttcttatccatgagcatggaatatttttccatttgtttgtgtcctctcttatttccttgagcagtggtttgtagttctccttgaagaagtccttcacatcccttgtaagttgtattcctaggtatttccattttattttattttmttttctttgtttgtcttttattggagtataggaatgcttgtgatttttgcacattgattttgtatcctgagactttactgaagttgcttatcagcttaaggagattttgggctgagatgttggggttttctaactatacactcatgtcatcttcaaacagagacaatttggctacctctcttcctatttgaatacgcttcatttctttctcttgcctgattgccctggccataacttccaatactatgttgaataggagtggtgagaatgcatccttgtcttgtgccagttttcaaagggaatgcttccagcttttttctaatgtgtctttgtgtgattttggtatcagggtaatactaacctcatagaatacatttggaaatcttgcttcctcctctatttttcaaaatagtttgagtgggattgattttagtccttttttaaatgtttcataaaattcaggagtraagccactaggtcctggacttttctttgctggtagacttcttattatggctttgatctcattccttgttattggtctattcaggttttggatttttttatggttcattcraagtaggttgtatgtttctaggaattttttcattttttctatgttttgcaattattggcatacagttgcttatagtagtctctaatgatcctttgaatatcyggggtatcacttgtaatgtctcctccatctgtgattttgtttatttagtctctctgttattctagacacactctgggtcagaagggaactctgactcagagtgttagtctgactaaaagtttgtcaattttgtttatcttttcaaagaacaactttttattttattgatcttttgtatttgttccatttcaatttcatttatttctgcttgaatatttactatttatttttttctactaattttgtgtttggtttgctcttgcttttctagttgttacagaagcatggttaggttttttatttgaagtttttctacttttttgttgtaggtgcttattgctataaactttcctcttagtactgctttcactgtatcccataggttttggtaagttgtgtttccattttcttttatttccagaaatttttaaattatcttcttaatttcttcattggcccactggttattcaggagcatattatttaacttccaggtgtttgtgtagtttccaaagttcctcttgccattgacttccagttttataccattcctggtcagaaaaatacttgatatgatttcaatgcttttttgaattttttaagacttgttttgtggcctaacatatggtctgtcsttgagaatgatccatgtactgaggacaagaatgtgattctgcaactgttggctaaaatgtcctgtatatacctattaggtccatttggtctacagtgcagattaaatccaatgtttctttgttgattttctgtctggattatctgtccaaagctgaaagtgagtgttcaagtctccagctattattgtattgggatgtatctccctcttatctccagctattattgtattgggatgtatctccctctttagctctaataataattgtttcatgtatctgggtgctccagtgttgggtacatatacacttatgattgtaatatcctcttgttgaattgactcctttrtcattatgtggtaactttgtctctttttatatattttatcttggaatctattttgtcggatataaatatagccactactcatgctcttttttggttttgatttgcatggaatatctttccattcctttactttcagtctatgagagtctttataggtggagggtgtttctactgtggctgagctggcagccaaaccatgggacacagttcttctgtattagtctgttctcacattgccataaagaactgcccaagactgggtaatatttaaagaaaagaagtttaattgactcacagttctgcatgcgaggcctcaggaaacttaaaaccatggcggaaaacacctcttcacatggtggtaggagagaaatgaatgaataccaagcgaagcggaagccccttataaaaccatcggatctcatgagaactcactcactattatgagaacagtatgggggaaaaccgcccctgtgattcaattacctcccactgggtccctcatgcgacacatggggattatgggattacaattcaagatgagatttggttggggacacaaagtcaaaccatatcatcaccttcctactattacctctcctttgctcatgcagaagtagtcgctcctcatgaccaccactgctccaggcccacagtgagtactgcctggctactaccaggcagttcactcaaagcccaggggctcttcagtcagcttgtggtgaatgctgccaggcctgactctctccctttagggcagtgggctctcctattgcccagggtgggcccagaaatgctatccaggagccaaggcctggaatcaggaatgttaggagttcactttgcgctctacccaactgtggccatgctggtacccaagctgcaagacacagtcccctttatgctttcctcttctttccttaagcagaaggagtctctctccatggccaccacagctgggaatgtgctgtgtcattcctgaagccagcatggccctgggtttccacccaagtcccrtggtgattactgccttggtaccactgatgtttattcaaggcccaagggcttgttagtcagcaggtgataaatccttccacgactgggttcttcctttcaaggaagttggtttccttctgacccagagtgtgtctggaaatgtctaggagctaggtcctgaaatgggagcatcaggactctgcttggtgccctattttactgtggctgagctggcatctaagttgcaagacaatgtcctgtttactctcccctctcctctcctcaagtagaaggaaggaatctcttgaagctatgagctgcactgcttagggttaaaggataggtgatgcaagtattctcttgacagccccagctggtgtctcactatgtagcaccaccctaattctactggtttcgagcccaggacagcaccaggacttgccctggaatcatagtccttacgccctggatggtcttccaagtttatttaggaccccatagcactttagcccatggtggtggggctagctgaaactcaggttctgaccagtgggttggacacttcccatctggctagaccagccctagccagatgggaagtgtctcttggtgggcactaactgaatcctgccctatgttgctttctgctgtaacagagcagcactgagttccaatgcaaagttccacagtcattgtgctctctcttccccaagcacacacattctctcttgaggtgacacggccactgccaagggatgggggagaagtggtatcagcaattcaagactgtctttcctaccctttccagtgcctctttccctgatatgatgttaaaactaggtactttgatagcacacctgacttttgttttttataaagtgttttcttgtgtagatagttgttcaatttggtgtttctgtagtggggatgattgctagagagttctatttcaccatcttcctatagcaattaatactgtagaaatatttattgagaatctaactatcaatacaaatggtatttaatgtaagaatactgcatacaaatctgattttgttgatgcttgttatctatacagtgataaatccttcaaagttaaaagtaaagaacaccaataatgcaacttgccttcactctttccacttgagtatcattctacttgaatatcattctagtaggataggaagtctgtttaattgcttgcattctctaaagtctcattctcctctttccacaattcagttcttctatcaaatgtgtgaatttacttaataagagttgtcccttgaacaaggtgggtgttggaggagccaacccttccttccacagtaggaaatccatgtataacttttttcttccagggcatggggtcttgctatgttgctcaggctagactcaaactccagagctcaagcaatcctcctgtctcagccttccaagaatctgggactrtaggtatataccaccaggcacatacaaaaataacacatatattgtgtatgttatatgtattccataatcttacaataaagtaagatagagaaaaaatgttattaagaaaatcataggttgggcatggtggcccatgcttgtaatcctagcagtttgggagcctgaggtgggcagatcacttgagctcaggagtttgagaccagcctgggcaaaatgatgaagcctcatatctactaaaaatacaaaaaattagccaggcatggtggcaaatgcctgtggtcccagatacttgggaggataaggtaggaggatcactacagcccaggaagttgagggtacagtgagctatgatcatgccactgcactccaacctgggtgacagggtgagaccctgcctcaaaacaaacaaaaacccaagaacaaaacaaaaatgatgaagaaaatcataaggaagagaaaatatacttactattaattaagtggaagtggatcatataaaggtcttctttatcatctttgtggagagtaggctgaggagaaggagggagcagaggagctgacttgctgcctcagggtggcagaagtggaagaaaatctgcatgtaagtggacccacacagtttaatcccatgttgttcaagggtcaactgtagttgtaattattgctaatgcagttttatgactgtaaggagtaaatcaaaacagttaatgtctcaccacaagagatttgtttatatacagcttttataaaaagaaatggaatattttctgaaataagagtctaagctccaaagtcagattgtcaatttaaattttgacttcactgcttacttgggcaaattaactttttaagatatttcaggccgggtgcggtggctcatgcctgtaatcccagcactttgggaggccgaggcgggcggatcatgaggtcaggagatcaagaccatcctggctaacacggtgacaccccgtctctactaaaaatacaaaaaattasccgggcgaggtggcgggcgcctgtagtcccagctactcgggaggctgaggcgagagaatggcgtgaacccaggaggcggagcttgcagtgaaccgagatcgagccactgcactccagcctgggcgacagagcgagactccgtctcaaaaaaaaaaaaaaaaaaaaaaaaagatatttcatagagtacttttaaagattaaatgagataatgtggcttaatagtaggcactcagtttttttaaaagttgaagtagatttctatatcatgggtagctcaggaatgatgttttctcacaacataaaccatattcttataataacaaagactctctttcaataagtaataatatatactacaattctcattaattatagaaaaatgaagagtcataaaagctttccttaaaaaaaagtaaattaccttttcagtagagttaagaaaacgggaaatcactggtattcaattctgtggtcttttctctttcagcaaataagaacagctataccttgtccgccaccgcaagctgaagtatgtggctctttgatactgcagactcttttttttttttttctttttttttgagatggagtttcactctttttgcccaggctggagtgcaatgacacgatctcagctcactgcaacctctgcttctcaggttcaggtgactctcctgtcttaggctcctgagtagctgggattacaggcgcctgccaccacacccagctaactttttgtatttttagtagagatggggtttcaccatgttggccaggctggtcttgaactcctgrcctcaggtgatccaccctcctcggcctcccaaagtgttgggattacgggcgtgagccctgcgcctggccctgtctgtataaaacaatttgaatgacagtggatttcttatcagaagacatggaggccaaagggaagtggcatcatatttttcaaatgtttatcctacaaccagaaaaaatagtctttaggaattaagggaaaatcaatcaagacattcttgctttttggttttttgtttttttttttttcttctagataggatgtctgttgcccaggctggagtgcagtggcatgatctcagttcactgcaacctctgcctcccaggttcaagcaatcctcctgcctcagcctccaagtatctgggacaacaggtatgtgccaccatatccagctaattttttgtattttgttgttgttgttgagacagggtttcaccatgttacccagtccggtctcgaactccyggactcaagtgatcagcctgcctcagcctcccaaagtggtgggattatagttgtgagctattgtgcctgtcctcaagacattattatatgaaggaaaatgaagaaaagctgtggccggcagacctgttctaaaataatagcttaaaagaagttctctaaacagagacaaaatgatataggaaaaaaattcttggaacaagaaataactttgcaaacaaaatatgactgaatagaataagctttccatgtcaccttgagttactacattaagtttgagggtttaaaccataatggtaacagtctgatgtgtttttawctgtatgtagaggaaatatctaaaacaattatattgcaaatggggaaggataaaagggcataaaagtttccatattttatttgaaatagttaaaataacagtagtagagtgtgatcagttatgtatatatagtgtagtacctagagcaacaccaaatctactcaatcccttccagaaaacagaagaggaggaaaygatttccatttcgttttatgaagttagtattagcctgatacccaaaacaggcaaagaaagaatacagccaagatcactcttcaatacagatacaaaagtccttaacaaaatattagaaaaaagaatttagctcttccttcctgtaggagacagctttttaaaaaactcagctatttataaaaagaatgacgtagcatgaccaagtggattatgtcagagatgcaaggttgtctcaactattgaaaataaatcagtataattaaccatattaatagggaaaagaagaaaaatcacataatcatgtaaattaataccgaaaaaaacatttgacaagcttcaacaccaattcatcactctcagaaaaataagaatagagaggaaactttctcaacttgataaaaagcatttacaaaaaacctctatagctgcagacagtggctcacgcctgtaatcccagcactttgggaggcagagacaggtggatcacctgaggtcaggagttcgagaccagcctggccaatatggtgaaaccccgtctctacgaaaaatacaaaaattagccaggcatggtggcacrcacatgtagtcccagctacttgggaggctgaggcaggagaatctcttgaacccagaagttggaggttgcagkgagccragatcctaccactgcactccaacctgggtaacagagcaagactccatctcaaaaaataaaaatagccgggcacggtggctcacgcctgtaataccagcactttgggaggccaaggcgggtggatcacgaggtcaggagtttgagaccagcctgggcaacatggtgaaaccccgtctctactgaaaatacaaaaaattagccaggtgtggtggcaggcatctgtaatcccagctactcgggaggctaaggcatgagaattgcttgaatccgggaaatggaggttgcagtgagccgagactgtgccactgcactccagcctgggcaacagagtgagactccatctcaaaaaaaaaataaataaaaataaaaaacaaaataaaataaaccttatagataatatatttaatggtgaaagactaaatgcttttctcctaagatcaggaacaaagcaaggatgtgtgttctcactgctcttcttcaacatattgctgcaactcctagccagtgtaataaatcaaaacaaggaaataaaaggcaacagatcagataggaagaaataaaagagttccttttgcagactgcatagttgtttacataaaaaattccaaagaatttacaaaaaaactgaatgcaattgtacttccacatgctagcagcaaacacaaccactaagattaaaaatacaatatgatttacactcactcaaaaaaacaaaagtgaagaggccgagcgcgttggctcaggcctgcaatctcagcactttgggaggccaaggcaggcagattacctgaagtcaggagttcgagaccagcctggacaatatggtgaaaacccatgtctactaaaaatataaaaattagctgggaatggtggtgggcacctataatcccggctactctggtggctgaggcaggagaatcgcttgaacccgggaagcagaggttgcagtgagccaagattgtgccattgtactctagccagagtgagactccatctcaaaaaaaaaattaaaaaaaaaaagtgaagaaatatttaggtgtaaatttaatataacatgtacagaacttatatgccaaaagctatagaatgctaatgaagaaataaaragagatctaaataaatgtagaaaattgttaatgtattgaaaaattaagtgtagtaaaggtatcaatttacctcaaattgatacacagctttaatcaaattcctatgaaaacctcagcaagactttttacagatacagacaagattattctaaaatgtatacggaaaggcaagaaacaaaaatagctacaacaattttgaaaaagaagaataaagtaatctggtttcaagactggttatatagctacagyaracaggactgtgtagtattggcaragagacagacacttaaatcaatggaacagaacaaaaaaatccagaagtagacccatataaatatgttcaagtgatctttgacaaaggtgcaaaagcaattcaatgaaggaaaggtagcctttttaacaaatgatgctggagcaattggacatctgtatttccataggcmaaaaaaraaaaaaaagaaagaaattctatgtaatcccataccttcaacaaaaattaaccaaaaatggagtatagacttaaaaggaaaactaaaacacttttaggagaaaatcaaagaaaattggccaggtgcggtggctcatgcctgtaatcccagcactttgggaggccaaggagatcaatcacaaggtcaggagatagagaccatcctggctaacacagtgaaaccctgtctctactaaaaaaaaatacaaaaaaattagctggcgtggtggcaggtgctggtagtcccagctactcgggaggcagagacaggagaatggtgtgaacccgggagatggaggttgcagtgagccaagattgcaccactgtactccagcctgggcaacagggtgagactccatctcaaaaaaaaaaaaaaaaaaaaaaagaaggaaaatcactgggttccagggctagtcaaaatgtccttagacttgacaccaaacttgtgacccacaaaagcaaaaatttataaattggaaatttataaattggacctcatcaaaattaaaaactttgctatttgaaggaccttgttaagaagatgaaaaatggaagaacatatttgcaaaccgtgtatttgacaaaagattagcatctagaatatatttaaaaaattctcaaaattcaacagtcagaaaaaaaatcaacccaattaggaaatggacaaaatgtatgaagagacactttactgaagaggatayacagatgacaaataagcacataataaaatgttygacatcatagctactggggaagtgcaagttaaaaccrcaatgagatatcactacatacccaccagaatggctaagagataatgacacaccaaatgttggcaaggatayagagaaatggaatcacttatatgttattggtggaagtgtaaaatggtacggctactctggaaaagattttggcagtttttaaaaaagctaaatacacaactactgtgtgacccagcaactatacccctgggcattttccccagataaatgattatatatwttaatacaaaaacgtgtacatgaatgtttatagacagtttatttgtaataggcagaactggaaacaacccagatgttcttcaatgggtgaatggctgtctaaagtgtgatgcatccatgccatggaataccattcagtaataaagaggaacaaactaatgatgtgtgtgcrtcaagccgaatgaatctacaaagaattatgctgagtaaaaaagtcaatccccaaaatgttacatactgtatgattccactactataacattcttgacatgacaaaattatagaaatggagaacagaatagtgattttcaggaattaaggaaatggtggcaggagagggaagttggtggggttataaaagggcaacatggtaataataatgtcctttaacttgatgtatcactgttcaatatcctggttatgacattgtactttagttttgcaagatgtaatcattgggagaaactgggtaaggggccatgagatttctctgcattgttttttacaactgctggtgaatctataaatatctcaaaaataaagtttttaaaaggcttaatgaaaaaaacacaagtccttgacttcatggagcttataatctagttgggagggaagatatggattattttttaaagtacagaaatatataactcaaacagtaacctcatctagttatgagggaaggctttcctgacttttgagtgacatttaccatcrgttagaaaagataagtaggcgttgactaagtgagggagagtgggttgttgcaggtcttccaraactgagggaggagaataggtaaagacccagggttgggaaggagcatgacacattggagtgatggaaagagggctgaatggctggagcagtgaaccagaagtgataaggtggtgtcagatgaggctggactgttaggctacatcaagcaggggcttgtaggaagctctaggattttggccttttaaacagtgaaagaaactgaaaagttttgagataggatctcgctctgtcacccaggctggagtgcagtggcatgatcagggctcactgcagcctcaacttcccgggctcaagcaatcctcctgtcttagccacccaagcaggtgggactacctgtagcaatcccacttcagcctcccaaactgttaggattacaggtgtgactcattgcacccagcaaaatggaaaagttttaagcaggagagaaacttatgcagaatattactttaaaaagatcagtctgactgcactgtggagagtggattagggagggaaagcaagatcattaaggaagctaggtccaggtctcaggtgatgaaactgagattttgctgaagcagtaaaaattgaaaaaaaaatggatgcatttaaatggtatttaggaggtagaattcacaggacttggcattgaatttgtgttggaaagagaggttttcaacaccatccatggtttcatgctttaataactagatggctggtggtgccattccctgagataaatattcaagttttatacaaaagaccatgagtttggctttttaaatttgattttgaagtacctttgagatatccaagtcaaatagatatgtcaagtaggtaattggatacataaatttgtaccacacagaatgatctgggctggcgatatgaattgagagtcattgtaggcaatgtgcatggatgacaacatatgaggaaagagtgtagggcaargccagatcataagataaagccttgggggacaattttattattattattactatttttatagagacagggtcttgctatgttgcccaggctgstctcgaactcctgggctcaagygatcttcctgcctcagcctcccaaaatgttagaattataggtgtgagtcactggcacctggctatgggaacaatttttagtggctaggtagaggaggatgagtcaagaaaagacatggtcatatggtgagagaggcaggagggaactcaagagagtatattgccagagaaactgaaggctacaaagagagtgttcaagaactcacactgagaagttacaaaaggttagaacctaaaatgtattggatttagcytcatggtggttgtattagtctgttcttgcattgctataaacaaatacccaagactgggtaatttataagaaaagaggtttaattagctcatagttctgcaggctgtatagaaagtatagtggtatttgcttctgggaaggccccaggaagctttttactcatggtggaggggagaacaggagcaggtgcttcacatggtgaaagcaggaacaagagagtgaggtgggacatgctacacacttttaaacaaccatatctcatgagaactcactatctcaaagacagtaccaggagggatggtgctaaaccattcrtgagaaatccacccccatgatccaatcacctcccaccagaccccacctccaacactgtggattatatttcartataagatttgggtggggacacagatccaaaacatatcagaggtctttggtgactttggaaagacttgtttggcagattaatgggggaagaagccaaattagtttatcaaaggctacatcgtatgctgaatgacagataagaccattaggctaaaattyaattgttgaatatattatatttaatrtatatctatygctgggtaaataagtcaatgtattacatgaggtaggtaaaattattcacactattcagatttttaaaacagagtcttagagatgttaatgtcacatgtctattaagtatttgaagtcaagatttgcacctgtagtcaacaacacgctgattctctaaacaaaggcattatcaagcaaggaaagattcatgttttccttttttcgttttttgttttttgaagagacagggtctcattctatcacccagattggagtgcagtagtgtgatcatagctcactgcagcctcaaacttcctgggctcaagttatcctcctaccttagcctcccaagtagctgggactacatgcgtgcatcactatgcctggcaaaattttttatttttatttcttgggtccccagaagttgcccaggctggtctcaaactcctggcctcaagtgatcctcttgcctcacccttctgagtggctaggattayaggctgaggccaccatgyccagcgtttttcattgatttttttctctcatttttcacataagctgagacagaatgtatgacttttgaacactctagaatttaggcttattgatgtttttttwaaaaaagaatttaattagggaaaataacaaacatacacaaaattatagacaatagcattgagttctagcactctgaaaaaagaaaaagaaaaacaaagaatagcataatttgttaccatcaacatttattgactcatggcttttctggtttaatgtatacccctagacatcatccctcctctctttctgccctccctaccctagcaaattatttcaaggcaaatccttgatatagctcttcctaaaatccatagcattttttattcaaagttgtcaattttgcctgctatraacttcctcttttaaacatctgatcaaactacctgatagttcaaatagaagagcaggaaataaaattacacctgaaagttatgtaagttttaaagttagttttttcacttcctgcaggtgaaaggaatcatttaattgatttaacgacaacaggtgaatgaagtaaactgatgtttcttttgaagtttagctacttcctttctgccagttgtttactatagtaaaatgatcagaaaaacttcatgcattttcacatgtaatattttatttttaaatgtataaagacatggctttggtcatgattgtttatagaggtcagataatgcaaataacaagagtaaatttgtattttttttttttgagacagagtttcactcctgttgcccaggctggagtgcaattgcatgatcttgactcactgcaacctccacctgctgggttcaagcgattctcttgcctcagcctcccgagtagctggcattacaggtgcctgccaccacacccagctaatttttgtacttttttagtagagacrgggtttcmacatgttggccaggctggtctcgaactcctgacctccggtgatccacccgcttcggcctcccaaatttctgggattacaggcatgagccactgtgcccagccaaatttgtatttttttaaagatgatgtctgatttttttaaagacgaggtctcactgtgtggcccaggctgatgttaaactcctgagctcaagcaatcctcctgcttcagcctcccaaagtgctgggatcacaggcgtgagtcaccatgcccagccagatctctacattgtaaacatcacaaagggtctttggagatcacttgtccttggtatccaggaagtcatggttcctctgtgtgctttatgtgacatcattaagtgaggggtagcccatgctacaccaggtgctgaaggctgagacggtgagagcatgagtgataagatgctctctccccttgctctctttctgaagatgacaaactccatcttttttctaaagtcttactaaaggtggaaatcttttttcttcacttcaattttaaaaaattatttgtttttgttttatagaatagactgagagtgggcttttaagagtaacaagttgattttgtatttatatacaaacactgcatattgttggacacttataaataggttgatgaatattcagtatatatgatagatatacaagcagtttggtgtggatatattaaacttattgaaaaatttttaaaatgtgagattttacatatttctgactttttcaaaatttgagtttagaagaaagttgaaatatagctcagagctaattttcaggttgagctctctgtagccctaggtactccaaaccaagtatttcaagagtcacctggagttgcgatacttggcagtttrsggggcaagaacccttgtactctttctgttcctcccctcccaactgggcagttgtatttattaagcatctgcaccatcctttgttgaagaaaggsctccccacctaagtttgataatcaatggtctacaaaaatagcactatgatgaaatctgatgtcctgggaggaaggaattcagaacagaaataggaaacaggttccatttgacagtttatttagtgcgttcagaatagaaggtagagaaaaaagtattgtaatcaagataatattcatctacagaggaatatagtgaacatgcagtatttctaaaattgcagtttaacaagaaataaaaaaagtacaaatgtttctcattcaagataatccacattttgaagatctcattttacacaaaaaagggtaattagaactataaacaggtcttcattttataataagcacttaatataactaatgtgcagttatgatttttaaaattggcaaacatgcaaaattgcattaaataagttatgtcagataattatcctttgtttaatgtttatttacagcttgtaattaatgtttaatcattttgttgtcagtggtgggaatccaaattacacagcaccaaaatatgttgtcagcggcaaatccatacgggtctgcaacaacaattcttgtgtcctcaggagagaatctgactaaggggcataaggcagaagagaccaagacaagttttagagcaggagtgaaggtttgttgaaaaacttgagaggaggaatgaaaagaaagtaaagtacacttggaagagggccaagcgggcatcttggaggacaagtgccccatttgaccttggacgtagggttttacatgttggcatacttctggcatcttgcatcccttttcccttgattcctcccttggagtgagaggcctgttagcactttggaggtaagcatgcgcaatgtgtttactggagttgtacgcatgctcactrgaagtgttcttcccttaccagctgaatgtccttaggaggtcagataccagttaaactcctccattttgcctcttaatatgcatgcttgagcccactttcccaactccttggatcttatcgggaagctgccgatcaccagttttaggtgtttctatctactgggaaactgccttttcctggcactggctgcaatcaattattttagagagagagtttaacaaccgcctgacattcctggttggggtagggggcaccttctcttgctctgtttatgcctgaatagctacctactgtaaccatttatttttcaacatacatttaattgaaaaataatggaaatacaaaataggaaaagttatggtccctggcctcaagaaaatccatctagtggggctgaaaagaaaacttacaaaacaagtatcttacagcaaagtgaggtgaagagataagacgaatcagagttggcatggctggggcaggtttacatgacagaaagaggcttgagctgctacttgaaagaaacacaagactttgcaaattggggtggaaagctaagggatgctaggcagagggttgatgtgagcaagaaatacaatgtgaagagctgttcacaagagaatgagggttttcaacagggaataatgagagaattgattggagcaaaaggttaggatgaggaggtgaaggaaatttttctttttggaggggggtgggcagggaacagggtccagctctgtggcctaggctggagttcagtaacaggatcatggctcactgcagcatggaactcctgggstcaagtgatcctcccgcctcagcctcctgagtagctgggactaaaaggtacatgccaccccaccctgggattttatttttgaagccaaggatctcagttaccccagggtgaaagtagggtaacaatgtgtattgcctttaggggttcctatggaagtctcttaaagagatgcttctaccctcccaccatgagagattctgattttttccttctttgctgtccaggtgacaatwtataatgaaggatgttactaaatgacatgtgctgcacacctgagtcttgtggaggctgaagaaaaggaggcttctgtagaaaataggaactcagtgagtgttttcagacagctgggtaatgtgtatgaagaagaaagctttgggccaggcacggtggctcatgcctgtaatcccaacactttgggaggccaaatctgacagatcacttgaggtcaggagttcgagaccagcctggccaacgtggcaaaaccctgtctctactaaaaatacaaaaagtagccgggtgtggcggtgtacacctgtaatcccagctactcgggagcctgaggcaggagaatttcttgaacacgggaggcagatgttgcagtaacctgagatcgctccactgtactccagcctggatgacagagtgagactccgtctcaaaaaaaaaaaaaaaaaagaaagttttggctactggtgtgttaggcttggtgggagaaactgaaggcagggagatgtaaggagttgactgcaattgtataggaattgaagaggcagaaagaatatctsaatgtttgatggtagagaaggtgaatgtcagaaaaaacaaagyggagcagacactgtactaagaataaccatttttcaaagtaggtattgtttctattttacaaacaatataatctagaaatcaaatacaaatccaagttatataggttttagtgagagagttgggctctgaattgaggttcgtctgactctaaattctgctaatgcactatgaattcaattttgagtttctaagagatggaaagaaaaagacaaaagatgagcttgcttttgaggtttgatgtacgggkaggttgtscagcaagcatctggaaaagtggcatttggctttagagatgttgggtatagattattaaaaattatttgcacagggtgacaatgataaggattccaagggagaccactaagagttgaaaaagaaaggagagagcaaaggcttgaacatcaataatattcccaggttagaaaaaaaatgggatcaattattgaaaaaccagaaaaggagtaggaagttatgagaaataggaagtgtagcatcaccaaaaataaagaaaacacttgtacttaggaaaagattgtcaaagctgttggatactgcagatgtcaaggaggcaggtctaatttggcaattagaaaaaaaaaatagttggggtcagtagttttatttyggaagagcattacacaggagccaatctgyaattaattaaaaatcaaaatagtaaagatagggaaacagataatttactaaaatctatagacacttcttttgagattttgaaaaaatgaaatgagagagaaattagcacatggtaggtaggtggaggagcaaggcctagggagggtttcaattctgggcttctttatagcttggtaaggaaagagcctgttgaaagggtaaaagattgaaatgcaggtaaagaaaagaaaataaatgtcttaatggaaaaaagtttttaatttaaaaagtaaagaaaatagggctgggcgcggtggctcacacctgtaatcccagctctttgggaggctgaggcaggtggatcatgaggtcaggagatcgagaccatcctggccaacatggtaaaaccctgtctgtactaaaattcaaaaaaaaaaatkagttgggtgtggtggcatgcgcctgtactcccagctactcgggagactgaggcaggggaatcagtggaggttgcagtggagtgccagagctgagatcgtgtcactgcactccagcctggtgacagagcgagactacatctcaaaataaataaataaataaataaaatagcaataacacctgtcatcaaccacaaaattgtataaaataagttaaaggccattctttttattattattattattatatttaaactttaagttctagggtacatgtgcacaacgtgcaggtttgttacatatgtatacatgtgtaaaggccattcttaaatcctccaatttacaaacccttttctactttactgttaatagtttggtgcaaatctttttctttttcttttcttttttttttttggagacagagtctcgctctgtcgccaggctggagtgcagtggcatggtcttggctcactgcaacctccacctcctgggttcaagcgattctcctgcctcagcctcccaagtagctgggattacaggcatgtgccaccatgcccggataatttttgtattttttagtagagwtggggtttcaccatgttggccaggctggtctggaactcctgacctcgtgatccgcccgccttggcctcccaaagtgctgggattacaggcatgagccaccatgcccggctggtgcaaatctttttcaacatcttcttttatttaaagaagtatcactcttttctctttctctgcatctgttcctaaataaacccgttattaaataaaaatggtgccrtatatgcatgcatgttttcaaattactttttttcattatatctatcacagaggtctttctaggttaatatttacactcatatcaaatccatctaattcattttagttgttgtatagtgttcttttgtttggctagatcataatttgtatagaaatttcttttttattttgtagagaagtggggtctcactawctcaaactcctggactcaagtgatcaacccctcagcctcccaaggtgctgggattgcaggtgtgagccaccacatctagcctcaatgtgtgtagaaatttatacattgatatacctttcttggtagcttaattctaaaaagtggattgccctgtgttgtgggctgactactccccaaagatatccatacactaagctttagaatctgtgaatgttaccttatatggcaaaaggtattttgaagatgtgattattaacttaatcacctctactgaatattgaaatagtaagattatcctggattacctgggtgggtcctaaatgtcatcacaaggctatgtgatggcagaagctgaacaaagcagtgtcagacagaccaaagatgctacatcgttggctttgaaaaagcaggaaggtggcacaagctaagaaatataagtggcttctagaagcttgaaaaagcaaggtaatagattctcccctggagcctccagaagaaaatagtccttctggtactttgattttagccctacaatactcattttggatttttggcctccagaactgtaagagatacatttgtgctggtttagttaaccgagcttgtggtactccaatgtgactttatctgaactttattacatctgcaaagacccgatttccaaataaggtcatattcataagtatgagggttaggacttgaacataaatttttgagggacacaattcaattcacacacccattttcaaaaagtcaattcgatctgtgagtggttttaaaatttgatttctgtgaacctaccatttaattctggaattgttactgcctcattccaaagacaaaattcttcctccatttgagattttaggaagtcctagaagaaatagctgagcatgggtggatattttggaaataatcctcatggtatggagcagagaacgtccccagttatacatatgtagcacattattttataaagttagtatttgagcaaaactaaacaatatatttttacacacacatatgcagaatatgtgtatgtgatttacgtatgactatgccctaaagaaaagcagcaaagtgaggggasgtggacggcagggatggcacatgcagaagcacgcaagattccgcggtgtggagggttcgtgggtgcgtataattatcttccattatttacatgtgtactttatgcgytcgttagctatatttttgtatgttttaatatgcaacaaaacrgcgtatgagttacgctttaatgtaaaattgtctacataacacaaaatttaaaagaaatggcatacggatagtagaaaacatgctttgaggaaaaagcgtcatgtactaagtccagaaatcgacattgcaaagaggcaccaactgttttcatcaagctgacttttccaggtgctactcagaaaagctgaccgatgatagagcactgggtcaactcacgctaattatgaaaccgtgagtaaaataatctgtgcttctatgtaayttaagtacccacaaatcaggaagcattcccggatgaaaagcattcacagaaccatacgctggttcgccaccttcccggtgsaaaaaccytttcctcggaaattctcagckcaaagactttgccctattccaaaatggctccggcgcctacaacttaagcatagcgcaggtccggaagttacgcaaccccataaggtagcacgccgttacccgtggggagcgtttccgccatttttgaaaattaattgggaaggtactggttttaagtgtagttgccgacgcaatggcagcctttgcagtggaacctcaggggcccgcgttaggtgagtgaaatattgcttttccttgctggcactgccatccatgctctgggcctggaggcgggcaagactgaaaggcagtmgtcaggctctcgtctgctggtttcagtcgcggagagggaatccttgggtgcccccaagttcatagtcggtcccctactcgacgcgtcgcctccatactgctacaaaggtggcgccgggaagctgagggccctgggagggtgaagaaaaggccgtctggcggtgactgagctgtgtttgtgcccccacacgccagccacgttagactggcccataccttaacctccttctgatacccgagacgcgatgctggttgctggattcccagctggttgctggtccccagaagcatccctgggaggaactgaccgcggtacacgtgggtgggcggtgycctgaagtgtgtgggtgcagtccactgcttcttgatcacckgtgcttccagttcctgttttgactcctctctcccgggctttgccaaaggaatcttgttattaatggaagcttgaatcgtgcaacatttaatcaaccgtgtggttggtaatcattgagatattgaccttaacagcaagctaggagttcgcacgatatttcccgcctttatttggggaaagtgactyttaagtattgtaggaggtatttttctctagtaagtcacgatctgaatttttttaaagattcattcccattattcattgcggagcctcgttgaaatatgtcgtctttgaaaaaaatctaccactttaacagcacgcggatttctttttttcctgctgagttttgcgacttgtgagaatcgtcgaaaattttagaacggaaaataaaccgtcttactgtcatagagacttacctgaaaagttaggttataactttctgagcttggaaaagagagcaaatgtaatatatatggtgtrgaaagagtctttagatttgaagggtatgtaatgcttgccatgtttggtgtaaaataagttctttttgagaatagagtaacttgaactactttagtctgtcataaaaaaactaaatgcataatgtcaataaygcagatactctgcattaaaatttatatatagatgtcgtcttggtatttatttttaatgtattttagagatcaaaaactcttcatttccagttccaaatttttctattcaacaaaaacattttggagtgcatatttattggggttacaaatgtgagtaaaccaatccctgtatattgccttgccagaaatctgacattagccagtattaatgtttaagtccacattttgcagatattccaggtgcccactggtgtagtaaaactaagggttgacttcaacaaactgctagctgagtacgtatcttttgggagcacagaatatgaaatggaattgaggacatgcagcatcttttccttaagtttgctttaagtgaaatttagcctgaggggtggttggtgacagtcctgattaagagcccattgtgccctccttcctgtctggtgctttcttttttcttttccttccttcttccctctctccctccctcscttcctcttttttgacacagccrtgtcacctgggctggagtgcagtcgtgcartctcagctcactgcaacctccscctscgggctcaagcaatcctcccacctcagcctcccaggggctgggaccacagtgtgccgccactcccagctacttattgtatttttggtagagacaaggtttcgccattttgtccagactggtctcgaactgagctcgagcgatccacctgcctcggcctcccaaaatcctgggattagaggcttgmgccttctrctgtgtctgtatgtatccagatacatcagaacttttcttaagccaattcttactttattttgctataatttttttttcttttagggagggggagtgaatgtagtgaatgttaccaaaaactttgcgtttaatatggtattytgaatatctgttaagaatatgcttttgttyagacttttggtttgattttagtggatcttcttacgaaatatttctayagtgccatgtaacatagtaactagcactttataaaataattacaatgtaattagagtttttcacaccttgttttagcatttgctttatccatttattgaatttgtttttttttttgtcttttatacacttgtattgttaatatctaggcctaatataatgggaaataagaggaagactaaatagttggcagctttcggatattaagaaacagattgttaaggccatctagaagttaagtaatagttaataaaaaaccatacaaataacatagcaaacatttgacccttctgagtgcaatgagtcacactcaggcttgtcacctagttgaaaattattttcataagcagagattgcaaattctacatttatactttactcagtttttgctattataaaatatttgtagaaaataataattcgtatttattgagcacctgtgtatcaggtaccaggtcaagctatacttgctataattctaacaaaagctctgttagtggatgctagctatgcttattcccttttactgagagaacttgaacccacatctttgactccatagcccattgttttccttattctgctattttgctctgaaattagaattatatagctcactcatcttcataagggaaataatatctactctatagattgtgaggatttattttgtatcaattgtgasgtttcagttctctaagttggctttatattagggggatatttaatgatgattctttaatttttttttttttttaaataaaaaagatgagatctcagtgtgttgcccaggctggtcttgaactcctgagctcaagtgatcctcctgccttggcctcccaaagtgctaggattgcaggcgtgagtcaccatgcccagctgtgattattcttgacttaaactaatgattaagaaaaaagatacaaaaataagttttcgactcttttcaacatgtttctgagttagggtgctagttatcactgttattttgtaagtgctctaatatatgcatggttacggttttatcacaataatgatgaactttttatggggaagaaaaagaaacaatttagcaagcttaacccattgtgtttgatatgctaagctttgtatgtataagtagtgcagcctgtccttgtttttggttgttacatagtccaaactgattcggaaatggaaagaagttattagtgtgatttttaaacccctgaaataatgtaaacaaaaatagctgtcacagataaatattgtgctgccaggtgtactggcttcacacctttaatctcagcactttgggaggccaaggctggtggatcacctgagctcaggagctccagagcagtctgggcagcatggtgaaaccccatttctgcaaaaaaatacaaaaattagytgggcgtggtggtgcaggcctgtagacttagctactgagaggctgaggagggaggatcgcttgagcctaggaggtgaaggttgcagtgagctgagattgcgccactgcactccagcctggtgacagagtgagactcggactcagaaaaaaaaaaaaagtgaatacaagataactttacatttttctagaaatattttttgttggcttttaaaataataaattcaactatggttctattatatctaaaagttttgattaaatttgcaaaattatgttagattcttgcatgtttttgtcatcaacatgtaacagaaactgtaacagaaaagtccttaatttattttttgattcatgtaggatctgaaccaatgatgctgggttcacccacatctccaaagccaggagttaatgcccagttcttacctggrtttttaatgggggatttgccagctccggtgactccacaacctcgatcaattagtggcccttcagtaggagtaatggaaatgagatcacctttacttgcaggtaggtgaattgcttaaaataattttatagacatgctagatacagggrtgtccaattttttggcttccctgaaccacattggaagaagaattgacttgggccayacataaaatacagtaactctaataatagctgatgagctaaaaaaaaaaaaaaatgcaaaaaaaatcttaaaatgttttaagaaagtttaccaatttgtgttgggcaacattcaaagccatcctgggcttcatgcggtgttcaagccatgggtgggacaagcttgtgctagaattttwaaaagtgtagtggtgcagcattcaccctcatcaatacattaattaaaaaaaattaagcaatgtgtctattataaagcaaagcttttaaggctcttggaatagaggtgtaagaagtataagctataatttctagagccactaaaatgtattctatgtttttttcattctaagatgcctttgaattggcttttaagtaccrctaggaaagataaccctaaatatgacacaatgctaagatgccattttttgtaaaatttctgtgtcggagatgtcagagtgtggtgggggaagagtgcctcacagagttgatgaaataccatcatttagcttcaactgaattcatttaaagtaattcatcttaagatacaagaataggaaataatcggtcaaaagaagtgtaacttgaagatgtagatacgaattctgcctttagtcttagtgaattgagattctcacatatagcgtgtttaaggaaacttgggggggaggttttatacacagaatttgtgattgtcagggcaaagtattgtaaatgcagcctgtrtttattacagaactcctttagcaaagaaatactttaaaaaatgacttcgaagttttaactgagtagtgagaattagatacagaagtgttgaattctaattgtgagctaatatcctttagtagtagttcaagtgaaaactctttttaccttaattgccctttaaagtatttttgctttaaaatggtttattatttaggatttatcagggagaattataaattatatttgaagtaattcatttaacattaaacattaaatttcaaatgtgttattttattatggtagccaacgtatattgattgcttatgagcctggcagtatgctaatcattattttgtcaatcttaaagggtaggtaatagtatccccatctttaaaaagagaaaactgaggctaaatgcaataagtaatttgctgaagctcacttgctagtaagtgagcgagygctataaacctcaggttagtcttattccatagactgtgctctaaatagcttaagctgtacagtccaggctcagacattagtcttaccgatggcctgggctgcatcactatttgacattgcatgttctctgatcgataaagacatctttatgtcacagaacttggtccttttactacatctttattatgtacttaaatatatttctactgtgagaaacatgaatgggatctacttaatctagatagtcaaactctacatagggaattgtatttattcaggaatctacagactggagctgtttagtacctactttcaagtgagaaatgggatcaagttttgtatttaaatgttaagcgttttgtagagtgagcaaaagttacatgtgttttctgaaaactaagattttcattaactacttactctgaatccttttattcagagtgcagtctatggatcagcagcattggcatyacctgggagcttattagaastgtataatctcaggcttcaccctacaccttctgaatcagagtctgaattttaacaaggtccccaggtgactgttcagcatattaaagtttgaaaagaacyaacagacaagattttaagtcagtatttcaaaaatataaatttaaaaaatcttaccaaaaagaagaatccctttwttttttttttttttgtacactgtaggtgggtcaccaccacaaccagttgtaccagctcataaagataaaagtggcgctccaccagttagaagtatatatgatgacatttctagcccaggacttggatcaacacctttaacttcaagaagacaggtaatataaatacccttttgatccccaatgaacaacatcatggttttatgtgtctgttcagtgagagtcaatactttgaaatgtttccctgaagtctgttttaatgtaactgtgttgcacagaataaacattaaacacatcatagaatctacttaaattgtgttgatgatgaactgtacttaacagtgtagaactctagattttctctcataggtaattctcaggtgtttataggtatgccttatccacctgcccatagctcyaacctacttaatatacatgtagaatgtgactatggtttaaatcattctgattgtttaagaagtttaatatttaatatttaaaaattatgtgaaagaacaaatgaaaatttagagtttcatctagatctagggcactcgtcagctgagaagtagtatggacttgtctttattttcttctttttttagggtccccaacagggtcctgmtcagttgcccaggctagagtgcagcggcacagtcataactctgcagccttgaactcctgggttcaaccaatcctcctgcctcaactgtcctattgggatataggcacgtgctgctatgcctggctaattgtatttttttttgtagagatgaggtcttgccggattcaggtgatccttgcaccttgacctctcaaagcgctagattataaatgtgagccactgtgcctggccgacttttcttttaagtagaaaatttagtagcttcatagacacaagtgttgtttcctattattattgtgcttagtaggacatataaacaaagtttatcagttaagttgrtaagttctttatataaagatatgtctgctgtttgctttagatatatgttttatgcctttccctaaattgtatttagtgaagttgagagttcaagaatattagaaagcatttttcagtggattcgtgctatttataggcttgatatgtctggcatactaggcttacttgtcaagtaaagcaaaattcattcactgtggtaaacagattactgtttcttcccaacacttctagacctgccttcctgtccaacaggagccactagctaagtgtggctattgatactaaagatatagctagtctttattgagatacactttaagtataaaatacacaccagagtttgaagacttagaaagaatgtaaggtatcttatttttttatgttgattacatattgaaatgataatgttttggrtgtgtttggctaaatattactaaatttcacctgtttgtacttttaaaatgtgcctactagaaatggtaaaattacacgtatggaatttattgttcctaatggatagatatcctggtctgggatggttttctaaaggttgataagtaaagcttatgattagtttggtatgaaggctgggcgtgttggtgcatgcctgtaatcccagcactttgggaggccgaggtgggcggattgcttgatttttatgtatttttatttattattattattttttgagacagggtcttgctctatcacccagactagagtgcagtgaaatggtcatgccccactgtagcctcgacatcctgggctcaagtgatcctcccacctcttctccctagtagcagggactacagatgtggaccaccatgcctggctaacttttgtattttttgtagagatgggatttgtcctgttgcccagggtggtcttgaactcctgagctcaagtaatccaccttccttggccttcaaaagtgctgggattacaggtgtgacccactgtgctgggctttgggcagattgcttgaacccatgagtttgagatcagcttgggctacatggcgaaactcttgtctctactgaaaatacaaaaaaaaaaaggctagatgtggtggtgtgtacctatagtcccaggtactcagaaggctgaggtgggacgattgcttgagcctgggaagctcaggctacagtgggctgtgatcgtgttactgcactcagcctgggtgacagagtgagaccctgtctcaaaaataaaataataaaaactaaaaaattaaaaaattgtttgttgcaagaaccactggcttctaaatttgtgcaaggttttattacttctctgatgatacagacaaaggcttacagatattgctgtattcaaaatgtttgaaagactcgtgggtcataatttatagagaatgtttttgatttgaaagttggtaagaatattattgctagattagagcccaaattagttatgccccctggaatttgctcagtttgctttctaatcatgaaagaattggcattaataattgaggaataaattttatatctctcccaacattctctcagcatttagttctggttgctaaatgaagctatttgagatttccttagtttaattagaatctgttttaaaaaatctttattgagttctagagagattctgttctcatttattgattggatattgtctttgttttagaaggattttaaactattttaatccttaattttcttatatttaaaggaactaaaatggataatttaccagttttggaactttctactggtagtggtagggatatgctgtcttttattgtttagactgatttgaatctatagtgtttcrtggtttctaagtatctgttgaaaatcaaattttgtcacccttctgtttttctgtatgaacctggtcattttaaaaattaccattatctctgttatttcaaatattgtacattagaaactaaaaacaaatagttaacatgtcaccttttacagaagatagtcttttttttttttttaacataatatgacttttcttattttaaacaaatactaagggatctagtaaattttaggttaatactgtttaacttatggggaaaaaagagtgcctttgtactttgagctaattagaggcatctctagcacatgataaaaattcagttatccattgaatgaagccttttaayacttactgtatttatgttttgcatttttaccataacactttcttctgtttgtgtagccaaacatttcagtaatgcagagtcctcttgttggagttacatctactcctggaacaggtaagtgattctttcttttttttttttttttwaaagacagggtctggctctgctacccacgctggagtgcagtggtgtgatcacggagtaaacaactctgacaccaaatacttctctattcttygaatgaatttaatataaaatgtttgttggtaactgccaaaattttttattttatatttcaaacttggagattttccaaaatctataacttctttcaggaaggaaatactttgtatattgattattttctgaatcaaatcaccctaaaggtatggtrgggtgaatattcagaatgtctttttaagaaattgtatacttaatagatgtttgaagtatctccttagttattaaaacttgtcaataaaaaagccattggaattgggatgaaaaggaatagttaagacactgaataataaaggtgttttgagagatgttaatgcatagttataaatctaaatgccrttgaatagaagcaaccactgattatatacctagtttttctttaagattaatggctttttaataatcatcattatgcttagcacagttcttcatatgtcgtcatatgtgtataatcccatcaaatgtttattcagcaaatatttgagcacctaactgtgtactctgggaaatagtaaacaaaatagatattccctgcctttatggaacttacatttatttgcagaatttacatttataaacaaaacaagtaaattataacatttgttagaaggtattacattttgtggaggaaaaaattaagcagcaaagsgggggagggggtagagacttagagttttaaatagggtaatgtattagttttctgttgctgccataacaaactaccacaaacataaaagtggcttaaacaatacacattcattatctttcatttctggaggtcggaagtttgaaatgggtcttgrtgggctaaaatctagacattggtagggctgtgttcatttatggaggttctagacaaaaatctatttttctttttttttttgagatggagtcttggtctgtcgcccaggttagagtgcagtggcaccatctcggctcactgcaacctccacctcctgggttcaagtgattstcctgcctcagcctcccgggtagctgggattacaggtgctcgccactgcgcctggctaatttttttttttttttgtatttttggtagagatggggtgtcaccgtcttggccaggctggtctcgaactcctgaccttgtgatctacccacctcggcctcccaaagtgctgggattaaaggcttgagccaccgcrcccagctggcaataatctattttcttgccttttccatttctagaggctacttaatgtttcttggcttatggttcccttcctccatcttcacagtcagcaactttgtaactctttgaccattcttctgtagtcatatctccctctctcttttaaagacccttgtgaatacattgggcccttctagataatctaggataatctttgtattttaaggtcagttgattagcagsgttaattccacctgcaaccttaattccctttgccatgtaatgtaacattcacaggttccagggattaggtcatggacatcatttggggacctacccagcttattccacctaccactgatagttagggggcaagtaaactttactcaaaagtctgtaagtgagggaggtagggaatagtattctagacggagggaacagtgtgtctggggtgttcaaggaagaataaggggatggtgactgaaatggagtaagtgagggggagaatagtrgaaaatgaggtcagagaggagagrtaatgggggcagatgtattacatggccctgtaggttattgtcacaattggtctttacccagaaaaggtggaagacaataaggatgagactgttgctgggttcaactagtttgggagtaaaagttagcttagaagcaaggagacaagttaggaggctacttgtagcaatctaggtgagagatgatagtgatagaaaaagtaggcaggcaagaagggaaataatacaataacagggaaagatggaacataagaaacaatagcaagacagtagattttaaactaagcaaatcaggcatgtgcctgtagttccagctactcggaaggctgaggcaggaggattgcttgagcccaggaattcgaggttgcaagggagctgattttgtcactgcactccagcttgggtgacagaacaagaccctatctcaagaaaaaagtaaataaaaattwaaaaaaaaaagcacgcaaaaaaactaaccaaattaacaatgatgtaaaatgtattaaacactctggttaaggcaggtattgtcagaatggataacaaaaggaacacccaatacaaattggatcctttgaatcctccaagtctgaatttcttgaggcagtctgtgagcactcattggccgtgtctttaaagtctacatttctagtaaaatgttcttcaaggaaacttagtcattttctatcacgatgctcagaattcttccagcctctacccactgcctgatttctaaagccatttccacatttttacttgggtgttaacagcagcacctgacttgttccaaaatctgtactagttttctgtagttgccataacaaattacgacaaacttagtggtttaaaacaatacacgtattatcttctggtttctagaggtcagatatctgggctgttggttagagctcagatgycaacagggctgtgtttctgtctggaggctttgggtatgaatctgcttccaagctccttcaagttgttggcagaatttagttctgtgtggttataggaatgaatgaggtccctctccttgctggctgttaccttaagatgttaacttctagaggctgccctcactccttggctcatggctctccatcttccatcttcagatatagcaatggcagatcaagtcctttgttatgcttcatatatctctaactttacttttctgccttctgctggtgrttagagctcattcgattttatcaggcccatgaggataatctgagatagttccttattctaaagtcagctgagtagtraccctaagttcatctgccaagttccttcacggcagtacctggattggttgattggattaccaatcagtcaaaccaggggacagaaatcttggaggcctctttaggctgggcrcagtggttcatgccagtaatcccagcactttaggaggctgaggagtgcagctcacttgaggccaggagtttgagaccaggctggccaatatggggaaaccctgtctctagtaaaaatataaaaattagccaggcatggtggtgcacgcttgtaatcccagctacttgggagrctgaggtgggaggatcacttgaacctgggaggcagaggttggagtgagctgagatcgagccactgcactccagcctgggtgayagagcgagactttgtctccaaaaaaaagaaatcttggaggcctttttagaagtcygtctactgtgtatgtcatgatcaaacatctagaatgtcaccctagtcttttcagccatgtaactgaggttgaatgtctaggaaaattagtkctgaacagccttaagctgatcaaactgtaacaaataggtggatgatgatgctttgttacacrcagaaatagtgattattcagttatttgagtcatgccaggtgccactggctcatgcctgtaatcccgaggcaggtggatcacttgagtccaggagttttgagaccagcctgggcaacatagtgagatgcctgtctgtacaaaaaaaaattttttaaattagcctggcatggtggcacacacctgtagtcccagccacctcggatgctggggttaggaggatcacttgagcctgggaagtcaaggctgtagtgaacagtgatcacaccactgcattccaacctgggtgacagagtgagaccttgtttcaaagaaataattgagtcagtaagtgatcccagggacattgaaaatccaaaaacagggctgagtgtggcatggtggcacatgcctataattccagcgctatgggaggtcaaggtgggaagaccgcttgagccggggagtttaaggctgtaggcarctatgattgcaccactgcacgcgagcctgggtgacagggagacctcaaagaaaaaaaaaaaggcaaaaacacataatgttaagtaatgttttacattttagyggctctcttagttgactgraaagcatacattttaattttcctacygttgtcaagtagaaaagcgcatgattaatgttaataaatatctttttgttaacttatttttttctaatatagtaacttctgtgaggttttgtaattgtagaaactatatatgaaaatacaagagctgtgataggaaaaatacctatcatgaattggccactgggagccactgctgcttctactttgactttaaggaatttacacatagaaagtcttaatggggtataagtgacaaagaatatttttgaaaagatgacaasgtgtggagacctatcatgcatggccaatgataggcaagaaatagaaaaagagaattgacaggaaaattgaggggaaaacctagatttttcatttagagctatatatatatatatatatatttttttttttttttttagctcctgtatttagtgttaagtgaagtttttttggatgattagtaaatcttagctttctgagattggcaasttttataaagagatgtcatgggatataatggcatgactgccactttatgcttaggttgttttttgcatccaataaagaggttggtgggtttattttattttgtaaacattctgtaactgatgttaagatcttttttagaatattatttctggtgcaggaaaacattggtcataagtcaaaataggaaatctggattaaagaatataagaaactcttagtcatggtatattactgcccctggtaaagaacattgaatgtgttttttctactttccccatcctcatccctgaatatttttttctgctgcaatttaagttttcttctgcttttcttcttcctttatattttttattactttttttcttgagaagttctttcacttatatattagctctcttccaaaatggtaggtcactcgttaattaactagaatcwtttgtgttagcatattgttaacaggttaagcgtgatattaagtgatagtagcactttatggctgcttttgttgatgcaaggacctcagagttttgatartgttcctggaagtgggggccaaaagggactcttctttttctggtttgggttaggtactccttacatgtgttccttttaaagctctctgtttggctctcatctgtctttattacctgattatgaactccttcaagacagagatttttcctgtgtcttcagtgtttacccatctcagagctgggtacaaaggacctaacattaatcctgtgcttttccacttgacaacaataagaaaattaaaatgtatgcttttcagtagactaagagagccgctaaagtgtaaaactttacttaacattatggttttgcatttctttctttttttttttttttttgagaaaagatctcgctgtcacccaggctggagtgcagtggtgcagtcatagctccctgcagccttaaactcccaggctcaagcagtcctcccacctcgacctcccatagtgctggaattataggcatgtgccaccatgccatacccagccctttgtaaatgtttgttgactgaatatattgatggatataagctgtagagagttgaatggtggcctccatacaatatgtccacatcctaatcactggaacctgtgactgttaacttacatatgattgagttaaggattttcagaggggagactctgaaggagagtttaaagagttaaggagggaaggggacagaatcctggattgcctggatggtgcctaaatccagtcacaagggtccttgtaggtaagaggcagaaagaaatttgaaactgaagaggaagagaaacatatagaggagagagaaggtgatgttcagaagggggcagagattagagtgttgtttccaaagcatgccataagtcaccaaaaggtggaggaggcaagcggcaagcagtggatccttccttagagtctgcagcaggcatgccaccttgccaacaacataattttggacttygggcctccakaatttgtgagagaataaatttctgttttaagccatccagtttgtggtaatttgttacagcagccacaggtaactaatatatgtaaatattgttttgagacaatgacattccaacaccagtatccactaccaaataagaggattggtgtatttgcatccaacttggcaaggcatgatttttctttaataatactgaataaaaactatccttattctagactatgtagcttcttattgctgctgaaccatattatcacaaattaatatcttaaaacaacacaaatttattgtgttacagttatggaggtcagaagtctgaagtaggcctcagtggactaaaatcaagatgttagcaggactgcattcctttctggaggccctagaggagaattttttttttcttttctaagttgtagaggctgtccacattctttggtttatgtccccctaccatcttcagaacccccagtgtccagtgagtgtttctacattattattttcctttcctcttccccttttaaggaccttattggttatattgggcctatttggataatctaggataatcttatttttaattagtcaccaaaattttatttactctcatrtcagattaactatgctaccattgagtggtctctagttatggtggtggcaatgtttatgttttagtcaaaataataaattcrgatggttttagaaaattaaatagaacttactgtaatcccagcaatttgggaggccaaggcrggtagatcacctgaggtcaggagttcaagatcatcytggccaacatggtgaaaccccatctctacaaaaactacaagaaattagccaagcatggtggtggacacctgtaatcccagctactcaggaggctgaggcaggagaatcagttgaactggggaggtggaagtggcagtgagccgagatcgcaccactgcactccagcctgggcaacgagagcaaaactccattcaaaaaaaaaaaaaaaaaaaggaaaattaaatagaactttaatacaacaaaatgcaatratctttaaccttattatgaactagccagtccagatcttagagctattctttttggaatttactatgtccaaattagatgctatattagtttactcttgccattgtaacaaattaccacaaatgtattggcttaaaacactttacatttattctcatttatcccaaagtcagtttcactgggctaaagtcaaggggttgataggattacctctggagattctatggacaatcagcttccttgtttttttttttwtcctcagcatctagctggattctcctttatgcctttttcctccatcttcaaagcatatcattccattccctgcttccataatcacatagccttccctgaagtaaaatctcctacttccctcttgtaaggatacttgtggttacatatagggcccacctggataatctycccatctgaggatctgtaatcacatctgcaagatcccttttgccacatagatagcatttgcagatttcagggattagaatgttgttatcttggagggctgtcatttagccagccacgtcatcatattgctaattcttaattttcagtttttaattttgctatatttctcttaaagtaattgaagatattgtattttcccctcatattatctgaatatagttacatctaactttattcctttgtcagtgtttgtactgtgactatgtaaatactgctcagtgctgaaccaattaatatgattattctttctgtaaaactcttgattctccaatagttaataattgttttttttctattaagtctaattttctatgtgccgtttgttccctttattttaagcaaacattctgctgctatggtacatacctattttagtatactcacttttcaagcacatttttctttgttttaaattgagaatttctctctcttagcctctgtcttgatttcttgttttggcatggtgtatgacaatcatcctaggacttgcatgtttgtagtgttgagttctttttcctagaaagcatgcctccctctttatgtcctgattttggtgaagaacatatttaagtagctttctaaaaaagcttgcttaagaagtaaaaatttaaaacctcatgtcagaaatgctttttttagtcttcacacttgattgatagtgtaggtgggtaggttggaattttggaggcatcattccattgtcttctgccttccagtgttctgtggaagccatttgtgatgatgattcctgagtatttttacgtgacctgttttccagaatttatgatatttctatggttggtattctcaattttgcaaatgtgtcttggtgtggaactttttcatttgttttgctggggaattgatggatcctttgcatcaagatgcttatatttattcttcagttctgggaaacttccctgtattatttgtttgataattgctttctctctgctttctcttttccgttttttggaattgcttgtttgtgtgttgcattactgcagagatttctaattattgtttcccttttatgttatcatttatatctgtatgctactttctgagagattttctcaaattttgtgtgttttctttttttttttggtggggggtggtgggcacttttgtttttgttttgagatggagttttgctttgttgcccaggctggagtgtagtggcacaatctyggctcactgcaacctgcctccccaggttcaagtgattcttctgcctcagcctcccaagtagctgggactacagatgtgcaccacatgctgggctactttttgtatttttagtagagacagggtttcaccatgttggccaggctggtcttgaactcctgacctcaagtgatccacctgcatcagcctcccaaagtgctgggactacaggtgtgagccaccatgccccaccatctcagttttttattttctctgtcattttaattccaggaacctttttgttgttgtcctttgaatgtacttagaaatatagcattctcttctctcagctgggcacggtggctcacgcctgtaatcccagcactttgggaggccgaggtgggtgggtcacgagatcaggagatcgagaccgtcctagctaacaaggtgaaacaccgtctctactaaaaatacaaaaaattagctgggcgtggttgcaggcgcctgtagtcccagctactcgggaggctgaggcaggagaatggcctgaacccgggaggcggagcttgcagtgagctgagatcgagccactgcactccagcctgggtgacagagcgagactccatctcaaaaaaaaaaaaaaagaaaagaaatacagcattctgttctttcataggtaaaatgtcctagcagtgaggttaatagcagtcttttttattcttgctcttattgtctcgtctcttctagttcttggtatttttttttttacccctctatcattgctggtgagcaaatatttatcaaatgaggcactaaaagctatttggaataagtgtgtgcataggattcggtattggcagcagggtagaattgatggagaggagctgttttatatcttactgggcttcacttttaagtgttcccaaagaagaatcttttaatactcagccttatgcctaagctggtgttctgaatatgggcaggggcaaatctccttttcaatgtgcagattttcacttaatctccttacagttgtcttctgctgtcagactcattgagttttgagctgtttaggttccttttctccagagacaaaatctttggtcttttgagggtggattgggaaagtgagagttatctagctgcctgggataaggagaggcctggtctgtaagcccttattatatactttacactagttttccttaagttcagtcaggagtttctcacagtatcattggtccccaaaacctgacacttttttagagtgtctgtcagtaggggtttgcaagggattataagtgaatacagggttcagttcaccatgcttgattggacattgtaccattcaatatgctttttcggtataatgtgtgtgccatactgcaaagtctgattaaatagtccttataagattatccttacttcagatactagctgttaagtttgggatgatcactttagaccagctgtctataaattaagaggttaccaaggctgcttgtaatgtttggtagtttactagaaagactcacaacctcactgaaagtgctgtgctcatggttacagttttattacagcaaaaagaaacaaattagagccagccaaaggaagacacatagggtgacgttggaaagggttccaaatgtgaagcttcctttccattgtcttcagggagatgtgttatcctcccagcgtcaatgtatggcaatatacatggagtactaccaactagggaagctcactggagcatctatgtccacagtttttattggagtttcattacataggcatgattgaattaccaatcaggtggttgagttcagtctccagtcttcctcctcttgttgagcagagaccaaatcccttattacatattgtgctactttgtttcatgataagaagttaacaccgccaggaacctcttttttccaagtttcatttggctcgtatctatttaaaatttactagtcttttaatctcttttgttttcatttaggttagtggtctattttgaaataattgaatctttcttttaattgaagacattttcataaagggtaataaggtcttttgccctctgctttaatccagtcttaggaagaatgtttgaatagtgatttactcagggagacacattgcagtccgatttgatgtggtttgataggcacactttattttcatcttacaaagcatggcatgtgggcatcagaagtctgattgaaaggaagtaaaattagtggagcaattaaacattaactaggtggggggcaattakgctaaagttatgtaaatagttttagattatgtataagtaattatatttttcagagtagttgacagggcaaaaattagattgcttattcgtttgagacttatttttgatttgttttatttttaaaggttgtaacggttgtcacarttcgaaccttcatttaatttcttgcttgaagattattacatgatgtagcataactaaattttatcttcttaatggtaatacttgtagactgtagaaaatttggattggcttcagattaaatgccttttactgtcttcagtttgttaatggaatgtctttgtagtaactaaaattagttaagagtatcttttgtataaatatatgcttccacttactaaagcaatagttggtaacttagttgataagtagattcttaaaaatataacagcacttgtcaaagtgggatgtttcattctaaatcagacttattttagaaatgtattgaacaggttgaatatcccttagcagaactgcttaggaccagaagagtttcagattttggaatatttgcattatacttatcagttgagcattgaaaatctgaaatttcctttgagtgttatgctggtgctccaaaagttacacgttttggaacattttggattttgtatttacagatttgggatactcagcctatacctattaaatgcttctgtggtgatgagggaagtaaattgttaaatgtattataggatgatgtactttagtattcctccacatgtaccccatacatttgtacaaataaaaagctatccagtatagttgaagattacctgaaagagaatttttaaaagtttaataaatattacttagttattacatctataatgaaccttaacacaagacttaggtgttactccaacaataaaatgggacaatagacaagaactttaaaaagttaactgttgttagtaatacataacttcaattacagcacaaatattaatttataaagtcaagtctaacagacttctaggaatgatgtccatgtcttgcctccaaatgatatcaaaacaaaactacagcctggacaggatcaaaagagttatcaagtaaaaactacaatgcaataatatcattctaactgaaaagaaaaaatataatcacttaagaatttcaaaaatctgctgtgcatggtagctcacgcttggaattgcagcactttgggaggccaaggcaggtggatcacctgaggtcaggagttcgagaccagcctggccaacctggtgaaacctcgtctctattaaaaatacaaaaattaactgggtgtggtggcacacacctgtaatcccaactactccagaagctgagacaggagaaacgcttgaacccaggaggcggaggttgcagtgggctgagatcgtgccactgcactccagcctgggcaatagagtgagactctgtctcaaaaaaaaaagtatttcaaaaatcttacttctttagggttgctaaacaatttgagttcctagactcctttgaattcaaatttagaaactagaactaatctaatttaacctattaatgtacactttcctttaggaaaaatatttttcagatcacctcacatctattaagcttattgaagaatatattttatccagaacactattctagaccttactagacaacaagatgttcaaatagtactgctattttgagttctacaaatctccaaaccgctttctgttgaggctgaactaatttacactcccaccaacagcatataagggttccctctgcagccttatcaacattcttacattcttattttttgacctttttttttttaagttggagtctcactgtcacccaggctggagtgaagtggcacgatgttggctcactgcaacctctactccccgggtttgagcgattctcttgtctcagcttcccgagtagctgggactacaggcacccgccaccatgcccggctagtttttgtatttttagtagagatggggtttcgccatgttgtccaggcttgtctcgaactcgtgacctcaggtgatccaaacgccttggcctcccaaagtgctaggattcagatgtgagccactgcgcttggcctattttttgactttttaatagtagccattttgattggtgtgaaatggaatcacattgtggttttgaattgcagtctctctgttgattagtgacattgaacattttttcatgtttgttggtcacctgcatgtcttcttttgagaagtgcctgttcatgtcctttgcccactttttaatgttttttttcttgttaagttctttacagatgcctttgttggatgcatactttgcacatgttttctcctattctgtaggttgtcgatttattcttttgatagtttcttttgtgtgcaggaagtcattagtttaattaggtccaacttgtcaatctttgtttttgttgtatttgcttttgcgatatgagttgtaaagtctttgcctaggccaatgtccagaagaggtttttcaaggttttcttttagaatttttgtagtttgaggtcttacatttaagtcttcaattcatcttggttaattttttttatatggtgagaggcaggctgcatatggttagctagttttccttgcaccatctattgagtaaggcatcctttatccattttttatttttgccaactttgtcaaagatccattgtttgtaggtgtgtgactttgtttctgggttctccattctgtttcattggtctgtgtacctatttttgtaccagtaccatactgttttggttactgtagtcccatagtttgaagtcaggtaatatgatgctgctggctttgttctttttgcttaggattgctttggctatttgggctcttcttgcttccctgtgaattttagaatagttttttataattctgtgaaaaatgatgttggttatttgataggaattgtgttgaattcctttgggcaatatggtcattttaatgatgctgattcttctaatctatgagcgtggaatgtttttcca

SEQ ID NO: 93832 - DNA, 47933 bp, Homo sapiens
  misc_feature (1)...(47933): n = A,T,C or G
caatcttggctcactgcaagctccgcctcccgggttcaccccattctcctgcctcagtctcccaagtagctgggactacaggtgcctgccaccacacccggctaattttttgtatttttagtagagacgaggtttcactgtgttagccaggatggtctcgatctcctgacctcgtgatctgcccacctcagcctcccaaagtgctgggattacaggcgttagccaccacgcccagcctgaatgttttcttaaattaaacacttactaatcttccagatatcaccttttgtcaaaactcaagcgttatgaatggaccttaccataacgaggccttctgactgagctcctctctaccttgaatgcaagagaccctcacagttaggcaggaatatcattgcctcattcagcctgaagaagttagagaatatggatctttgcccctctacaacccttagaattaagggttctcttataaaagggaggggggaaatgtcagaggcgtgtgaaccagagcaattccatcttaaataagagctgggtaaaatgaggctgaatcctactgtgctgcattcccagacacttaaggcattctaagttacaggatgagataggaggtcagcacaaaatacaggtcataaaggccttgctgatcaaacagtttgcagtaaaggagctagccaaaacccaccaaaaccaaaatggtgaccagagtgacctctggtcattctcactgctacactcccaccagtgccatgacagtttacaaatgccatggcaacatcaggaagttaccctatatggtctaaaaaggggagatatgaataatctaccccttgtttagcatatcatgaagaaataactataaaaatgggcaaccagcagccctcggggctgctgtgtttatggagtagccattcttttattcctttactttcttaataaacttgctttcactttgccctgtggacttgccctgaattctttcttgcatgagatctaagaaccctctcttgggatctggatcaggaccactgtcttgtaacaagtccacaaagctggaacttctgggggagtaggagagacagagcaagacagcaagagtgcatgtcagagcaaggatgcaaactggtggcaagatgcagctaaatggtatgttttggcgagcggggatgtttcttgtagcccacggaggctgaaaggttctcatatgcctgagaagagcccagagagagctgacagaatcagagcaaaacaggccttcaaagtaggagtaaatgatgatgcagcagtagcttggaccacagctaaggaccagatagaaggatgtatgtatcaggagatgccagcacagacagaagacaaagtactccttacactacatccacctcaccctagcatcactccaggaatttagacaaaactctggtgaaaggaaaagaatctgacattctggtagaatggggggtcacaaaaaatcaaggtaagatatagaactataattgcttttcaacataaggagccaaaatttatcgaataggcagaaaactccaaatcttggtcaactcttctcccttctgctctgactggattccacacatgagggactataatgaatttatttcgttaaaaacaatgcaaatgaaaaaaaygcaaatgagagactttgctccaacagattgaaactcattacttagctcagtcttgtcaagattcttggttgcagaaaagataccccctggagctgctactctacacaccagccacccagactgctgagtctcctgactccgcacatatctctaattgtccctgtttattcacacattagtgagaacatggaagggtggggtagggggaagggatatatgtatatgcttgaatacacacacaaaaaacgctctggaaggatacacaagaaactggatagtactggcttccctttgggagaaccaggtggtggggagactagaaggaagatttctcactgcttatattttaatacttattgtaccttttgaattttcatccacggtaataaattacctatttcaaaaaccaacaactaaaggttccatccaatccaattaaaaacttcaaacttatacctaatttaaagctcctccctccctcccaggtctggcatgatctgtggctccacaacctgcagctgggaaggaaggggctgaggtctgtctccccctcttcttttactcctcctcccttcacacccttgctgtatgttcctgcagtagtggggtttggtttggatacaatctcttagatggtattatttgtggttctctcctgatgttctattctctctttggaatgctggctctttctgagcacttcatggatttttcagaaactcctcccccactcccctgcacagtatcctgacgtgagttaggtactctttggctggcctccttgtaactcttcctgccttcctcctccctctgggggttttctacagtcttttatgctagggttccttgcctcagaggatggcatgtctctcagggggaggttcaactttctttcttggtatgcattttactcacaggaatattaacacatcttgatacaccaaatattgccctgcctgctgatgaggactgctccagctagcttcctgccattgcaattctctaggaaggaggcagacatagccttaacagttaggcctgccttccaaattcaggtttcctcaagcattctctgaccaagacctatctagctaactaaggtggactcatgaatttctgcagttctatagggatttatcctgagatttaataccagtaatgttttggtaagaagccctcacccacaaacttggctgggagtggaaggaaacaagaacattaaactgccaactgtagactcagaagcatcagtccccttgttaatccaaaatatctgagacaggtctcagtcaatttagaaaatttattttgccaaggttaaggatgcactcgtgactcaggaagtctggatgacaggtgcccaaggtggttgggggtacagcttgcttttatacattttaggaaggcatgacatatcaatcaatatttgtaagatgtacattggtccatccagtaaggcagggacttcctggttagaagtagataagagacaaaaggttgcattcttttgagtccttgatcagccttccactgaatacacaatttagtctggctcagtgaatctgcatttttacataaacaatagggcagagggagcaatcagatatgcatctgtctcaggtgagcctcagagtgatgactgagttctgcctgtcctttatccaccaggaatttcctgtgggcaaattgtgagggaggtatgtagcttattatctttgtagctatattatttaggaataaaatgggaggtaggtttgcctcaggcagttcccagctggacttttctcttggcttgatgactttggggtcccgagatttattttcctttcacaccctcatacagtgaattctagtcttttgcttatctgagccggctgggatgtgggggtgagaattcaaagacaagtttggccacttcctatcaaacttcagagagaagtagctcctagactgccctccttatggatgtggaggtaaggcttgttgtcttcagctttagagctttagacaaagttttgagacaaatagaaatatcctattctaatttggttactcactttagttaaaacctttaaaacatgatcctgccatgtaaaaaagacagttctttaatgataataactaccattatcgactatttggtacaaggtgacagtagctttatatactaaatgtattaaatgttcacaacactcttatgaaatagggagtttcatacccatctcagtaataaaacctgaaacccagaggtcatgtagccagtggcagagttggaatttgaacccagacctgtctgatttccaaactcaatctgcatacaaagatgagtggtgtggtattgactagtgtggttgtcccctacctatgagctacagaattgaggtaggggtgttcccggaccaaactgagggttgggctgctattttttgtggcccaataatgagatgtagatgaactggggaggaagagagtttttatttctgcaaccgattacagggagaaggcctggaaattatcatcagaccaacttaaaattacagttttccagagcttatataccttctaagctatatgtttacttgtaagtgtgcatttatctaaagacataagtgattaacttcttttaatctataactaaggtctgagtactgaagaccatcctctgaagcctcaataaatttacttaatctacatgggtttaggtgctggggtgattacccttatcttatcccctgctaaatcacagaggtttggagagttctttcagacctccaataaacttgtttgtggaggcctggggagtttcttcggacctccaataaaacttgtttaatcctaaatgggtcctgttaagaatttcttcattaatttgtcatgcttcaaggcccaggaaaggcctaggcaaaacccttggtgggtttctgttacatctcagcctttgtataagggcactggcttttaatatttaacttaaccactcagtcagcactgaaacattgttatggaggcctgcgttagtgagacctggtctgccacaggggtgcagttattacaagaggttgaaatatcctaagtccatcaaacattgcctgtggatccaaaaaataatctatatactactatttctcctatatatatcaattcaattcaacgatgagttatttgtgtaaggcattgttctaggtgctggggatactccaggatacaaaacaaacaaaaatccccgtcttcatggaaatacaaattttcattaaaagtgtactgaaattatattttttgtcatcatgcattttatcaattaaatgaaactaaacatataacttatcaagcgacagctcaggaataattttgctatttaaaatagcaagggattttctatttatttgccataaaaatgtccattttgttataatggatatatctggaaaccactgatactatttaactctgaggaatttagttatcacaagaacatgatccatgagggaggagtttatttgcagtgaagtccaacctgttaatgacaatatttggatcataaaggaagtattgggcaatctcctggggtaatcccactcatccatcccacagctcagtgccaattataatgactacctaagtaaattaggattgcaattttattgacaattctgatgaggaatctcaggagcacgattttcggcagagacgcagattacttcatctcttgtttaccttttgactctgggactctctgaggttccttctaaagctgttacagaagagggaactgtttgtccaatcagggagcaaagtcacatttgacctcgaatttcagcccttaggatcctcagggaataaacactcatgcacttagtgctagtcaaagactgcatgattatttaactaaaaaaattcacattccaagaagttaactgtcagtaagacaggttttggtctttctcatcacatctttcccttcacaggccaccagtgccagttcgaattcccgtccccagcggcaacccttccgggtccaggcacaggtacgcggtgagaaatattattctctctaatagcaaacgaggaaaacgaagggggaaggagatgggcctgggatacaaagttctggcactgctcttcgcacctcacctcgctgtttcttccctcctagtcttcaagtcccttgtctccccggtctcactgccgctcttccctcgctcccttcccgccgcctcactcaaaagctacgaaccagtcgcggccgtcagactacattgcccacaatgccacgcgctggccagtctcgcgtggggttttccctcagctgctgttataattaatgttaatcaaacccacatttctaggaaggagccgagttattatctgcctctccgataggatgcctctttgtcttcacytgccattcccgctgtttcgtgaagaatcctctgtaaagggaaatttgttcaggcgactgctgtggccaccctctgcctcctccggcctctgcccctgggaggtccccgggggcctgggagtgtcattggcgtatgaccgcaacccttgccgctgccgctgacatcgctaccatggtctccggcagcagcggcctcgccgccgcccgtctcctgtcgcgcagcttcctccgtgagtccagccagtactgtcttcctggcgcccgcgggttattggccccgccggacccarcctcctggcccaggccgcggctgggccctcagggctggacctcggcgggggcctgrgagccgcttgggattccggcttcgagtcggggacccctacggtggaaggagctttgctggatacgtggggcggggggcatgacttaggccgctggcagatggagatattgggtggctgagccaggattcgggtccgggagccctgcaaatttgggagcttgctctcggccccgcggtgacaaatgacaggatgggggtggcgtctagactggccttatttggagttggggatgaagaggtccaaggtgaacttggtggggaaggtaagggtctgggttgagaggtagaggargagtgtctcagtaggaagttgggggatgaggctgtccctagtacggaaaggtcctgcacttcgaattccccctctgcaggattgtatgtcagggaaagatggtttctgcacacggagtggggtcggcatagccgcatagactactagaagcttatggttggctgggacctaaaccagcttatttgcagtgtctccaccaggcgatttgtggacacatccgttcccgaaaacttagtacccaaggttgctagtctttgagacacgctgactatggaaaattcttgccatattcaaagtctctgtgcttgtcaggtaggttatagtagaaagaaactttggaatcagccacatcagggtttgaagtctggctagtcccttttcagtctgtgtaataaccctggacacttaatctgtttttcagtgtttccaatcacatgaaaatattaacacattttaaggggcctgaagcaccatcacttgtaaggtggaccattattttgtttaccactaacaatgaagaacgattgcttattaaaactgtgacacaccagtggttgtcacatgtatcctggttttttaaaaagtgaaaaaaaatgtgcattttagcaatgatgatgtacaggatgatctgggttcactgcagaataagtggagcaatttatataaagcatctcgtatgtaacaaacactcaaagttagttttctttttccgctttgctcttaattctgcttgtactgaatattttatgagacttaattcctttcttgagaagattacattctgaaagtgtacattgatgagtgtgcactcaatagctaacacttagttgccaatcacttgaggacaaaggtctggctagataacgttagcaagtatgaaatggtttgtttggtaaagctttctggagattcttgagagtgttgtaggcagaaggacaaaaagaattcattatacccagtaatcactcakgtcaataaagtttgagcaccaagaatgaagtatattggatatggttttaaaccagcttaatttgaatagatagtgggttagaatgtagaagatcagatgtgcagcacagccactgtggtgggaaaccctaggaagaagttgcccacctgtgtctttcgcttctgtggtcttgctagtctgaggttctgaaagatcctagcctcaggtaggtctgctgtctagaaaaatctagagaataaaggaagagtgtctaaaagatctagttccttactccacccttagcagtcctctcaatcctcttcccacagaactggaagtgtgttcttcctagactcccaggatcatttggccctagagtgaccatctggtttagttttgttactggagtgggcttgaattattcaagtcatgtgattaacttgttattacgggtctgagatttaaaccaagatgtattctatattaagaggggttacagacaacaatgcttaatgtgtaaacacctctaaattcacaaaactctaactcctctttcccatgccacatttccgagcccattttcactcccactagaaaaatagcagctacaacatcaccttgcaaactttttttttaaaaagggaccagaaattatttagtctgtgaagctaatagagctacagatgttagggaattttgttccctctgttaagtttcaacttatggtacattacttgctgaaggtcatagtgttgcaatattgattagagttaacagccacagaaaaaactcaagtgaacactggtagatgccttccggagccctgttttatagcttatgaaaaaaggaaaagtggcctggcacggtggctcatgcctgtaatcccagcactttgggaggcctgaggcgggtagatcacaaggtcaggagttcaagacccgcctggccaagagggtgaaaccccgtctctactaaaaatacaaaaattagccaggtgtggtggcaggcgcctgtaatcccagctactcaggaggctaaggcaggagaattgcttgaacccgggaggtggagcttgcagtgagctgagatcgtgccactgtactccagcctgggcaacagagtgagactctgtctcagaaaaagagaaaaaaggaaaaggatccagttgaagtggagagagaaaatacaatgaaaaatgaggaagagttcttccatgagaaagtttaaggatttcataagcacccttgaagttgaaatagtgaagttttaagagaagcataaagtaatgcaaggtctttttaaaactggtcagtagtttctgtaacttgaatcttttagaataaatagggaataaaagccagtatttttgaacctcagaattttggtattttaatgccagaaagtaaaccttaaaacccaactggtcccatacctttgtacggcagatgaggaaatcccaaaagtttccagtgagtatcagaagtgatactagcacccaggtcttctgactctgcagtatcctttccrccagcatgtaccatgtgataacttaagcttttttcgaagctctgatttttttttggcagtcttagtgatgtgttgagaaggtgactatcctgctcaaaggtgttgccttccttttccccgtgtttgccaagtgcgtaggcctgtttttcgaatcagagatgcatttaaagtgtagtttggaaaatgagatcctcaacagtgatgttgtggatattagcatctgttgccattgcatgtaataaccaaatctttatttcagaaatacaaaatagccttgattcagatgtaccagtgtagccatgagaaagtgatttgattttctgacatcaaatttgtttctccatagaaatgtaattgggaatattaaaaataatttaagtacagggcaacaatttcatttcatcaggggactggcataccatagacccacatttttttttttttttttttgttttgagacggagtcttgctctgtcgcccaggctggagtgcagtggcgtgatctctgctcactgcaagctccgcctcccaggttcaagccgttctcctgcctcagcctccccagtagctgggactacaggcacccgccaccacacctggctaatttttttgtatttttagtagagatggggtttcactgtgttagccaggatggtctcgatctcctgacatygtgatccgcccacctcagcctcccaaagtgctgggattacaggcgtsatagacccacatttttttacattataacatttcttacattaggwtgtgtcttattactgatatatatgtttttttttgagacagagttttgctcttattgctcaggctggagtgcaatggcacaatctcagctcaccgcatcctctgcctcctgggctcaagccattctcctgcctcagcctcccgactagctgggattacaggcatgtgccaccatgtccggctaattttgtatttttagtagagacggggtttctccatgttggtcaggctggtctcaaactcctgacctcaggtgatccgcccgcctcattttttcttttttaccagtaattaatagtacttcttaaaaatcaatggtgttttatatttgatgaaatatggtacttacagcttattaaacttcactcgtaagtcaatattaaatgaatatataatttaacatttgaatagtgggttgtttggagtttaggggtaagtggctgctagctactctgctgtattataaggtcctgtaggtgtagactgcagtagcctgtgtcttacatatgcataatacatatggttaataagtgtacatttgttaaattcatgagtacgtgcacgaataaatgtttaccagggacacagtttgagaggtgagttgaaggagtattgagtatttcatgaatagagccttgggttattggttaggagcatggtactggtcatacaaggcccatggtttgagtctctcctgggcaggtgctctttgaccatagattgcatcattcatcccaccagccattttataaatgatgtgttactatctgtggtaaagaggaccagtatgtggctgacaggtacaaatctatcacccctgttgaaaacacatctctctcagattactcagcctctttccttcattgtctttattacagtttgtactgttggtagttttgtttttttttgtgcaatgtttagctcttttacagggcaggaaacttcatgtgggtagggcctgagcctgtcttgttcacctgtgaatccctagcacctgacagatagcctgtcacagtcaacatctcaaagcagtttggtctgctcattctgcatcggtaataataacgctaataaaaagctcttagggatataacacttgctgtatctgttttaaatgctttatatattactaactcatttaattctcacatcagcctatgaaggagatactattattgtccgtgttttacagtgagggctgcgcctttacaaatgtattatatgttaaaaacttagaggtatatttgtgcatactgcacattatatgcagacatggattagtatgtttataaataaacatataagatgtacacaaggacatgtagaaaacatttttggctagacttatttgattttaaaatatgaactattttttctctctttttagggatagatttgcctttgtgttcatgtagggttgtaaacccagttttgggagtgtaccagagactgtgctacctggtgccaatttaaggagtaatttcatattaatatcacagcctcccaggggcagctgttattccacttctagatgggaagactaaggctaagggagatcaaaaggtatgctctgggttacatggctgctggaaggcagagcataaactcaagaccaggcctgtctgattcctgcgatgatgttctcagctgctcctgggacgcagtcccaaggttaagctggacaatttctaagaatctggaaagaaggaggtggcctaggatgtggcaactacagcattcgccatcagaaatttttcctggtggccaacctcacctttcctgctctaatatttaatttaaaatacttattttcggctgggcatggtggctcctgcctgtaatcccagcactttgggaggccaaggcaggcggatcacttgaggtcaggagtttgagaccagcctggccaacatggtgaaaccccgtctctactaaaagtacaaaaaaattagctgggtgtagtgatgtgggcctatagtcccagatactcaggaggctgaggcaggagaattgcttgaacccgagaggtggaggttgcagtgagccgggatcgtgccactgcactccagcctgggctgcagagtaaaacaacgtctcaaaaaaaaaaaataataatacttattttcttcttattagtaaagctaggcatctcatcatatatggatttgcagtttgtcatccattgtgtttcttgttcatggcctttatcagtttttctcttaggctttgggctccactttttgttggctcttcatgttgctcacgttaattccttgtctgttaaatgttaggaaaacactcccctggtctgtcattgcctttaactctgcctatggtgtgtttcactctgtctgaatgcttgcttttttcatgtaggtaaagattcaatttgtattattgcttttgggttttatttatttaaaaaaatgtcagcatggcgtttgtactagattaatgtagctttggggaccgccagaagcattttagggccgaacttccatgcagtctctatatgaattttagggaaacctatgatctttatatgtacaaaaatagatatagggttcttttccctctttgctgatacgtgggagttcaagattgactttttccaactcaccgaaaaagagacgaaccttatggtgtttagcttggtagaagtgtttcttttggagaccctgtttcttgtcctggaattcagtgaaatgtttcccatagacctactgtgtgtaaggcactgaccatataccataggagacaagatgagtaagacatggtcctgacactcatggagtttacagttagcagtgggaaaagtatttagatggtacttgaaatagtcttgaaataaatttaagcttagataatttcacttaaaaataacatgatgaaaagagtaagaatatgtgtgcactcagtaatgtagtgtgtgatggtgtttattgtatacccacatgaaagcgtttgtagcttctattcttcttaatctcagatcccttttaaagtcccccagtatactcataaatcatgtatatcgtgtgaagatataggaattcttgactgtgtaatgttttatttaaatgttaatttatatggatcaatgtaagtgaaattctcagaaagttgaggacattaaatctttaattgaaaggtaagagatatttgcaagatggtttggccaccaatgtatgccttgtgttctaaatttcactttaggaagtcacttactgtagtaatttggtggctttgtcaccctccccacctcttacacattcatagacttctctaccttgaataggtgtggggagtttatccaccccaaatgcccaaggcttttttttttttttattatagtacttcacacaccacgcagttatggcccacttttatatgagttcagatagattgtgaattatttgagggctgagacactgtcattcatcactttatccttgacacctgacattatggcttggtatgggtgctcctcaaatgttgattgaatcaatgaacgaactcacatttcagtaccagatgataaccttgtctggcatcatacaggtttattgtcaggatggaatgtgatcaggaatttcacttccttgccattgaatacatttcttggatttgcctgtaagacgataatagtctgttagttccagcttatctagaagtgggtctgtatgagcccaggcctggtgtgtagatggggagatcacacatgcatgagcgcacacacatctacacctgtgcattagaggtttcccaagatttagttaattagatgctgcaggctctcaggggcattgcacaggctgagtaacactaaaaggctaggggattgggaggtaagctgctgtttatcacacttctgatacactttttatgagcaccaaagatctgatgttgtaaaatcttgagctccatagaattgatccaggagatctggagttactacgagaaagcagagatcttcgttggtctgttattggagctgtgctttagggacacagacagacctgccttttctcagggtgacttctgctcctgtggaaggagaagtgaattgtctgatctttgttaagttagtgagtataagagtacttgtgcagaaccaaactttacctacaaaaagtattttatgttaacaagtagggactccagatatcctgatcataacatctgatcttataatcaaatcttctaccttctggtctgaaaacatatggtatgatatgatatgatatgatatgagcatttgttgaagatgcaatgggagggactggtaaagccaattccactagtcagaaattgtagcagggtaggaaagggtgtagcttctacacaaataccatggttgtaggtgttcagctgggagaagtggaagccaagggcaagaatgggtctcgaatgcagcactggcaagggtgggctgtgctgcacagctcagtagggacagggtctcaggccataaatccctgctgtgtccactggcctagagtcagatgcttagctgtgactgatgtgccagaacttgacctgcaaagcccatggccccttgttgagcacagtctagtatgagaaagctgcctgttacgtagcagttctttgtgtgtaccaaatattatccaggtggtaagggctaaatctgggcctgtcttctccctagaggtgtaagggattccatatacttcctccagaagcagatgttgttgctctttcagttatgtaatgtgaggtcaggacttaggtgggtatgaggcagtgatttaaggcagaaagcatggagtggactctgggcaaatatgtgacaggtgttctttttttgttgttcaatagagattactccttatgttcttttcttgggctagcttcatgggctaccacaatgataggtagaaggcctggctactttgaaagggccagggatgggccacagagaagtcaggttgttagtattaatggacatttagaaggtagcccaaaattttaagtcatctatgttcctcctactgtgttttgaaatgtggggagctggttgtagtaactatttagatttctcaatttctcttttaggtaggttgctgcaataacctagggtttttttttttttttttycctaacaagctttttcctgtcttgtctactttcctatttgttttattttccctgtgtcttttatacatgagttcatatcagaagagattaagtgattttgtattatattttagataagttttatcctatgacttaacatttaatatgttgttcttactagagaatgagttgctgagtgatttttacttgtattcctgacaaagtttgcctcttagcttacctatttaaaggtattaggctttaaaaatttgggtcaagtggggaaacgtggctgtttagtaaacattgttaataggggtgacattttgttttcagtccctggatttaattttaaccatttatctttgagccccagtttttttctaggaaataaaaatgataaacattgctttttttyccctcagttcaggaaaaaactacaagatcgtggttcttgataaagagaggatcctggagaatggaacaatgtcttgtctgtttttcttatttctgtggtcactgtgtcttatttaaaaggtggcatttaggtttgccgtgatcacaggatagcgcgtgcattaaagaattttttttttgtgatcaagttgaattattgttcaaaagtttagaaaaattataatgtgtctttttttttttttttttttttttaacctcttagtgccgcagaatggaattcggcattgttcctacacagcttctcggcaacatctctatgttgataaaaatacaaagattatttgccagggtttcactggcaaacaggtatgtatatctagatttttattttcaaatgtagactagagatataacaaattaactatttttttatttttaatatctcaaaaataacacatgattgttgcagaaaaatatactgtacagcaatggggttgtatctcaggaggaggttagttgctattgtcagcctataacataaaaattgtgtttaaacttaccttgcaaaggagtatattgtatgcttactaggagtatattgttttggaggcccatacactttctttcagcaaatacaacactaatgattttcctccagtgttgaaagagatcaccgtttctttgactaagcactaggtcaactagattcttgtgtttaggttttgtacaaacagacaaaaaaccgtattgttaaacacagaatccatattcagtgtggagaaatgctcaaacccagagaggctcatggatactgagacaagggaagaacccgcccactgacttttttcatcttatactttctctgggatgatggcctgggactagcaggcagaattgcctgaagtgttttaatttgttgtcatttatttatattcattctctcatactctttcctgttcttttcatagattttgtgtaagtgtaaataaatatatctgtgatgcaattctataataaaatgccacataagaatcttctttcctttttcctacctttctactccccaggaactccttctgttaacaagttggcatgtatcctttcagatatttttcttgtgcatgcaaacatatttatataatatgtgttttgtagtatttattatatagaattatatatatttatataacgttatccagcatataatatatatacaatccatatttytataaaatagatacctaaaagtaaaattggatgttatatggtctgtgtatttacaattttaatagctactgctaaattgaactttaaaacattggaacagatttattcttccmccatagtagatgcacagaatttttttaaaagggaatactatcaaatcaattagagtataaccacgtgtyttaacccaaagtatccctttttttattattaaaggagatatggcaagataaaagcagtcaattttttttttttttttttttttttggtaatttaaggttaatgatttttctgtaattaaaagaattgtcatgtcaattcttcagtattttggtaatctagagcagaggtcagtaaacatattctgcaaaaggccagattgtaaacatattaggtttagtgggtcatacagtctgtgttacaactactcaaaagtattttaacagcaaaagcagccatagaaaatattgtcaatgaatgggcctgggtgcgttccaataaaacttaatttacaaaaccaggtagtgggccaaatcctatagactgcagttagcagattgtttcatgtaaaatggtccttttgctttttgttttttgttttttgtttttttttttttctgaaataactgagcacacgaatgtgttgcagtggaccttctttttcttcttccattcctctattactgtaaaaaaaaaaatccaatatcaaaaaatgaaacacccataaaaccatgaaactttgttccttgtaaaaatggcaggatgtggtagcccacacctgtaatcctagcactttagggagccagagcagcaggattgctagaacccaggagtttgagaccagcctgggcaacatggtgggattccatctctacaaaaaaaacagaaaaattagctgggtgtggtggtgcatgcctgtggtcccagctactcaggaggctgaggtggaaggatcacttgagtccaggaggttgaggctgcagtgagtcatgattgaaccacttactccagcttgggtgacagagtgagaccctgtctcaaaaaaaaatgtttattctgatagctaaataatcttatgtatgccacttcccttatatacattctaaggaaagtagatcttcatccaagatttgaagtgcattctattatccccttcccagttgatgttatatccagcctgttttttgttatatattaatatgattagcatataatcaaatgtttgattaacccaaattctccacataaatttattatatataattttttctgtttgccaaatattatatgattatgtgacattttaagctgtgagcttttttgtaagaaccattgcccatggtgtaagcactattcagaactgtctctatattctaaataaggtgatagtttgcctaaatatttaaatccagaggtagttacagtgtttttcagttacctgcagttaacattgtttctcattcactctccttttttttgttgttgtttttaaagtaagtgagagtgttaattgcctcaggtttgttgattcagattcattttagagataatggtgaggtctgaagtttagaacttacttccacagtaaatctgcatattgtctcattagtttgttttctcagtacacacattgttccacatatgaattaaaaatccttgcatttttagagtatgtttcagcaatgcagttttccagtgggtgtcatcttgtttcttttactgggtttataagctgctaaaatgattactgttcctaacattgtactggctggtgatgatggtaaaactaagaaacataagcttattttgaatagatgtgttattcctgtttagcactactttaggattaaaatttggtacttctgaatttacctggcagtgtagtctagggcagtgcttctcagtgtctgtagcaaaaaaccagtgtaggtgcttgtttttaattttcagtctaatgtagatcaatatttttataaaatacagtaaaagctgtagcaatgtcatacaaacatttttacttttttaaattgcaaacatttttacttttttaaaaattagattttccccctccctctctcccttccttccttcctttttttgttgtttttctttttcctcttatctcattgcagagcagcaagagtctccaaactatactttgaatagcactgctttaagagagagagagcactggcctgtggttctttcaaaaccctgcccctgactttagacaaattaattaacatgcttggggccaagtttcctattttgaaaaagaatttgaatcagaaaatttctgaggtccttcttaaggccctgatttttattcctttaacagaacgtgaatagttgggaccacattttgaaggtccttgaaatgatcacatagattcgttcatttttcaacagctatttattgaatgcctactgtatattgatttaggtgtcatattgcaatgaacaaagtggacataaatcactgtcttcatggaatttacattttagtggttggtggggaatatatcaacaaaatcaatgagtatattatgtggtatgttacgaagtataattgctatggaagaaataagccggggaaaggaggagtgtgtgtagtcctggtggttaggatggaggagagggtgattttatatcaggtggtcagrggaagtctgatctctgaactaagatgttaaggagatgtaggagtgaaccaagtggatatcttagggaaggatattccatgcagagggcacagtgaggccatgaggcaggcatgtgcctgctgtgtggaagccacaaggccagcgtggctggagtgtaataagtaggcaggtacgggattctgatgtggggagacagcttgtaaattgacttgtaggccagtatatggagtttggcttttacttgactgaaatctaagacaatcagagtgtttgattagaggagtgccgtgatcttcattatgttttgaccagatcactcgggctgctgtggggattagattgaaggggagcaagggcaataacccgtcaagagttgaagtgacttagaccaaggtgatagcagtagaagggggaggagttgtcaattatactttgaagatagagaaataagctctactaatggatctaatatgggacatatgagaaagagaataatcaaggatggcttcagtatttttggtctgattatctgtaaggcgtgaagttgtctttaactgagatggggtagatggaggggagtgattgggaactcagttttggacatgttgagtttgagatgcctgctagttctcaaagtggaggtgtcaggtaggcagttgacaatgtgaatatggagttcaaggcttagatatgtggggtgtatgtgtctttgtgtatgtgggaggggtcaccatatggatgatatgtattgccatgataagggatgacaycaccaagggcatgaatttagatgaaaaagagaagtctaaggtgttgcgggaagtcaggaaccctgaacggagggaccggctgaagccacggcagaagaacataaattgtgaagatttcatagacatttattagttccccaaattaatacttttataatttcttacgcctgtctttactgcaatctctgaacataaattgtgatgatttcatggacacttatcacttccccaatcaatatccttgtgatttcctatgcctgtctttactttaatctcttagtcccatcatctttgtgagctgaggaggatgtatgtcgcctcaggaccctgtgatgattgcattaactgcacaaattgtttgtagagcatgtgtgtttgaacaatatgaaatctgggcaccatgaaaaaggaacaggataacagcaatgttcagggaacaagagagataaccttaaactctgaccaccggtgagccgggcggaacagagccatattttttcaaaagcaaatgggagaaatatctctgaattctttttctcagcaaggaacatccctgagaaagagaatgcatccctgagggtaggcctctaaaatggccacttcggggggcggccatcttttgtggttgcagctgtagggatgaaataagccccagtctcccrtagtgctcccaggcttattaggatgagaaaattcccgcctaataatttttggtcagaccggttgtctgctctcaaagcctgtctcctgataagatattatcaatgcaatgcgtgctggaaacttcattagcaattttaatttcgccccggtcctgtggtcctgtggtcctgtgatctcaccctgcctccatttgccttgtgatattctattaccttgtgaagcacatgatctctgtgacccacaccctatttgtacactccctccccttttgaaaatcactaataaaaacttgctggttttacggcttagggggcatcatggaacctgccgacatgtgatgtcttccccggacacccagctttaaaatttctctcttttgtactctgtccctttatttctcagaccagctgacacttagggaatatggaaaagaacctaagtgaaatatcgggggtgaattttgcccaatatctggctgaatttcccccaatactaaggagagagaaagagaagaggaaaaccaggggaagtcaagccccagaagcctagtgaaaatgaatcagtccttggagctgtttttggttgtcattaactggatggaattatgagagttaggagggtgtgctactggcatctaatgagtggagcccatggatgctgctaaatgtcccactaggcactggatgacctctcataagaaagaatcatcctgtccaaaatgtcaataatgctgaggttgaggaggaaaagtgaatggatagagaaatacaggttggtgggtgggcagtattgaaggcttacttaaggtgagtgatcattaatttaaaatgagaccagttgacatgtttttttgtttttttttcccttagccactttttggctgcacatgtataggcttagaagtaggggaaaaattggatttgacccaggttgtggttttgccagatatttaagttgaagtgagagaaagccaagattgttgtgggagggtaatgatctaccatgaattttaaactgaggagtgtgagcacatgaggagttgagaaacagggagtttctggttatcagccaagtttgaaaacagggaatcaaagaggccttgtttatagctattttggcttttcagaggcttgttttgcttcaagattcaaagctatgtttagtaaatatatgttattgtctgggaatagttaacctatttgtttttcttttcctaagttgctaagattscttttgcttctcttgggcttaccagtctgctgtttctcatggatcttgtgctttttcccctcagggcacctttcacagccagcaggcattggaatatggcaccaaactcgttggaggaaccactccagggaaaggaggccagacacatctgggyttacctgtctttaatactgtgaaggaggtaattagtggtacctgagtttggcaagacaagaaaagcaagggaagagcgagcattctttgggtagagatcttaattatgtttttttggtagagtcacttgctatytgaaaattcagtaacctagagaaatttgaattgccatcaaaaccagtgtgttatttttgtttctaggtatgaatcagctattaagggaggaagtactgtggccaggcttctgttgggctttttacgctttccttacctttcttcttccagtatgttagtagtacaaatgtcagcaaccaccccttaattcttcctgagtggggactatgcagtaggcactgtgctaggtgtttcattcaaattgccctgttcaggcctcactacaaccctcggaggtaggtgctgttatcatcctcattttaaagataacgatgttactagtgcaaagaggttagagatcttgcccatggtctcacaactgattaagtggcaggcttaggatggcttggagtagagtggtcccgtgtgaagaaactaaattgtagagtcagatttacaaatcacagtgtcctagattctccgcaaactgctgatttcttaatagttaccttttaaaatgatttttaaattaaattttattatttgttacaaaactgataggtactttttgtaaaaattcagacgatacaaaaagtaagtaaagttaaattttacagtgttttcgaaatctcagattttgcctctgtagggagctaatttaagctcagtgtgtagtctttcattctcttttgactcttatatgaatatatacaaaactaatagtatttaaaagaaactatagtgtaaattcttgggtatttaattttaaaaatctaggaaataaacttagttctttgggatgatgtgttgatcagccttaaatgtattcttcctctcttcttttgcatatttttaaggtatgttttaaagcattacattttttaaagcacaaatttaaagtccttcctgccttaaattctattatggctgattttataacctcaaaatatagagaggagatgtttttttacaattcctctaggttgacttttcttttgtcatgagcctctttttgctttttttttttttttaaagaaagttcttcttgctaagcaatccatttataatttatagtgacacaaatagttgtgacatttggaatattctataagttttttgacagatattgtttatttttcacccgttctgctcttacaaagggctttttgaatgagtagggttggtacctttcatccatatgacgtcccagcacaatatttgctgttgtcacagtatagcttctggcagtatttgtagactttagaggtagaaaactatgtaatgtaggtacttttcattaaagtacctacatccccatgatgtgactttttttgattccatactagttttaatgttttttgtgtctccccctctgttatcatcttgaacagagttttaaaaaattatttttaacccccggcatcatttgtggatgatatgttggcattctttgactctgttcactgtcaggctgctttcagatttactgacatgccatagagagtgagatgtcacagaagctttcaattcacagtggcattcaaatgggctgagaaagggctatgcttgattctgttctactctgacagtgtagcaaatttgagaatgggaagaakgctatgtctctgggtagtgtccttttcttaccccaagacattattaaaatgatggtattgaatttattttacaatgtttatgatttaacaaataataaggtgcttcgtcgttaatgtttcaggccaaagaacagacaggagcaacggcttctgtcatttatgttcctccgccttttgctgctgctgccattaatgaagctattgaggcagaaattcccttggttgtgtgtatcactgaaggaattccccagcaggacatggtacgagtcaagcacaaactgctgcgccaggaaaagacaaggctaattgggcccaactgccctggagtcatcaatgtgagtgcaaaaaaacaaaaagaaactcagattaagcctctcacaaggctaaacagctttgagtgaatgcgagtgtatttgtgtgtatgacctgtgagtgacttttttttttaacatttctgaaaactatgattactttcagcctggagaatgtaaaattggcatcatgcctggccatattcacaaaaaaggaaggattggtgagtttgtttgttrcrttcttatagattaaaacgttatttgccttaaaccctcaaaactcacaaagaatttttgactttgcaaatcaagtttaattaatttgacttgagtagaatttaccagggaagttttgtagtctatcaattctgtatcttgaatataatgagtttatttgagaagccgttacaattctgcagaatcagtgaagatttttttggtggtgggagtttaaagatttttttctgctcagcactctgtggattactccatgtgtttgcatatatcagtagttaatttcattaactattataacttagttattgctaaggagtattctgttgtataattataccacagtttgtttattcattctcccattaatgaacatttgggttgttttcatgtttgagccttacaaacaaggcttaggtcaacatttgtgtacaggtctttttgtggaaacattttcgtttctcttgggcaaaatgtgtaggaatggaattgctaagtcatgttcatatgaacrtaagtcaagtatatttaactttataagaaactgccaaataattctgcaaagtggctatatcattttatattttcaccattaatgtaggagagttccagttgctccatatcttcacaaagatttggtattgttagtcttcatttttttgagacagagttttgctctgtcgcccaggctggagtgcaatggctcgatctcggcttacccccacctccgcctcccaggttcaagtgattctcctgccttagcctcccgagtagctgggattacaggcatgcgccaccacgcccagctaattttgtatttttagtagagacgggtttctccatgttggtcaggctggcctcgaactcccgacctcaggtgatctgctggcctcggcctctcaaagtgctgggattacaggcgtgagctaccatgcccggctattagcctttttaaatgtagccattctactgagagtaaaatggtatctcttgtggttttgagtgtccctgatgactaataatgtagagcaccttttcatgtgcttataaggccattcacatacctgctcaataattaccttgttcttttagatatcacaaactttctcaaaatgttttaggtttgtaggcaccttagaaagcagggcagtgatcagaaaggcaactcagatggcctgtcaggaaaattgccctgctacttggttagttccttgaggaaatagccaaagtaacatttcaaagttagccacattaggcttgtgtttaggctttacaccaaaatttctctaaactatactgtttttcagtcatgaaagatgattgaccatatttttctctatctataaaccatggctactaataagggtaattaattgtcacagtgggtgtcggctgtgcagtttacagaattgggttaaagatcatgatttttctttattaccaatgtctcttggagctgtcagccctgctgccagtggcagtacttgataatttcatttacaagagagatttcagggagctccataggccatctgagttccagtggggccagatccatgtatcactgatgctcttgtacatatttgaatatttcttatattcttgggtctgttttgaaggctgtggtcttaaggtgagcatggaaggaatgctctgtgctgagttgcctttctgatcactgctctgctttctaaggtgagcataaacctaaaaaatgaaaatcaagagaagttcagggaagtcctttagaccttgcctttgtgaatggtcataacccattgatgagacagtcgtctgggagactgcttttaattcctttgaaaaaggactttttttttttttttaaaaaaaagaagaaaatatgtgacactgtgtccagagttggttccttccagtgggttcttggtctcgctgacttcaatgaagccgcggaccttcgcagtgagtgttacagctcttaaaggtggcatggacctgaagagtgagcagcagcaagatttattgtgaagagtgaaagagcaaaccttccatggcatggaacaggacctgagtgggttgcagctgctgactggagtggccagcttttattcccttatttgtcccctgcccgtgtcctgctgattggtccattttacaaacctctagctacagagcgctgattggtgggtttttatagagcactggttagtgcattttacaaacttctagctagctacagagcgctgattggtgcgttttacaatcctagctacagagtgctgattggtgcattttataatcctcttgtaagacagaaaatttctccaagtccccactcaacccaggaagtccagctggcttcactttcaacactacaagatttttgagggggtgaggagagaaagatggttatttgtgccaactcttcctattttggtaccattgctaatagtctcaatagcctccttgacttcagatccttaggttgagagttaagggaaaggaaggacttttcagtcccttggatatttctgaatggaatataatgtaatgtaatagcagtataatagtgtaatggatttccagtttttgttaataacagctaatataattgcatatctgctaattgagtgttatcgaagaaagtgattggattccaaattgatgatatttaactgcaccatgttatttatttctcttatgatagacagtttgttactctcaaccacatgtcacatacttgactcttctggcctcttttaaaattttaaactgcctatattgagataactataaattcatgtgtagttgtaagaaataatacagacagatcaccctttatccagttagcccaatggttaacatcttgcaaaactgtagtataatttcataaacaggatattgacattgatacagtcaatatagagaacttttctataaccacaagtatccttcatgttacccttttctagtcacgtgcctcctgcttccacccccttctcagttcctgacaaccagtaatctactctccaattgtataattttgtcatgtcaagaatgttatataagtggaatcatacagaatgtagccttctgggattgcctatttatagtcagaataagtctctagagattcatccagcttgttgtgtatcaatggtttgtttctttttattactgaggagtattcatggtatgaatgtacttcagtttgtttaaccattcacctgttgaragacatctgggttgttttcagtttggcctattacaattacagctgctataaacatttgtatactggtttttgtgtgaacattgtcttcatttttttggaataaatgtccaggagcatggttgctgggttgtatgatacttgcatgttagttttttaagaaactgctgaattgctatccagtttaagaaactgctaaattgctatccagtgtagctgtgccattttccatgtctaccagcaatgtatgatccagtttctctacagccttgccagcatttggtggtgtcactgtgtttttattttagccattctggtaagtgtttagtgatagctcactgtagttttaatttgtattcgcctaatggctaatgatattgattatctttttatagatttttaaaataaatttatttgccatttgttatctttttcagtgaaatgcccctccttgggttttgcccatgttctaattggattgtttacatttttayggtttattttttacagttctttgtatgttctagatactaatactttgctggatatgcagtttactttttcatatttatttaaaagtatcttgtttgtatctataaaaactcttcttgggattttgataggaatacaccattacataagtaggtaggcattatccacctaatcttctcaatgatgaaatgtcccatagaggggagggaccgtgttgaagacagaggatgtggatgggacaaaggcactgagaataggggaaaagtgataaatgagacatacgtggggtggaagttgtggtggttgtcatttgttatgcattagggttcagtaagtgaataatcttaaaactattaaaattaaatttcacttaagagggtggtcttactccattgatgagttttcagtttcaactcacttagtaaacatatatgtttaccttctgtgcctggaactgtgctttaagctgggaatataggggttgtgaagactcttatttattgacccattgaaaattatagtctagtgaagaaggtagctgctatagaatctcaagcaccattggtggtcttttactgaaccaggtggtaggagaacattgttcttaattggagaatcagtgtgtggtcargatattcaaatttcaggctggttgatcaagcctgactatgaatttattttgccaagccaagattattagataaaaattaaaacttgaaatttatccttcccttttttccttatggaccttttacagatggatcattccattttactgtgtcagcagtaggaggccatgttatgtggcagattcgagggcagggctcaggccagcaggtagtctccttagagatgttaagctgttgatcggaggcactgtcttgccttctgaataaaaagtttgtgttcgttccatcccaaggcagtctttctgtaaggcaaatataaatatctgcctgttaaagctaggtagaatcagtattttagatcagcttttcaggatttctgctcttgataaaatttttgttttttaaaaagcattattatgattttaatataattcttaacagtgctgaaagttagcattacctaaaagtgacctcaaacttagtagtgtttgctgtaacactagaaaaaaataattacctgtaggttgctgtaggccattcagtgttctcttcttgatcctccctctgtcctcagtatttgccatcagtacctgccttgacctcaggagcaagaagagttgacaagaaatgagccctcttgttaccggaaggtactggaattgtactgcaagaactgctgttcttgttttcttagaagaaaaaattcaaccaagagatgcacaacaagggttaagtagcagagtttattgaaggaagataaaatgcattcaaagagaggaacggctgactggctggctgacctcctggaaaacagtagtggcagtgtttatttaaagagacagcacaccctgagagatgattcagaacaggctgctggaaagagaggatgagcyagcagcagctaatgctgggggaccctctttatgagaatattgcatgattattcatgaggggggcatgagagggtatcagttgcaaccatgttttaagcagtctccttgtgtgtacatgctacatgctctgtagttgtacatgctagtatacacctcgcatgtctcattagcatttaaaatctccacacagggatgtggtttttactattataatgaacaaaagcctactgtgtagtcattgccttcttgcagayggtcagcaggcagcgcctccaggacttttcccagggctcccctgcttgcttgtttctggccatctgcctaacattcttacgtgtcttatggtaacattagggctaatagtgaaccattcaatgaatgacgttgtttctaccccagaaatactctcacagtggtagggaagatataacttctgcttatttcttagtaatgagggcagtaggaaatatgaaagcattgaggagatttagagaaggaaattatatctcacttctctttgggggtgatcaggaaagacctcaaagagaaagtagcatttaatgtggaccttgaagratgattagaagttttgtcagatggtggaggtgaaacactccatcttaagcagaacaaatatgaaaagataggagagcatgaaatatcaatgaggaataacccagtttcactaggtagggaaatagtaagaaacaagtctggagagggaagctgggactctgctgggctggcgagttagagcagagttccacgtgaagtgaggcatcgtcgaggatttagttgtcactgtctagtgaaatgcatctaaaagagcaatctgacagtgttctgtagggtctgcttagcaatgactaagttacgtacacaccattctttgaatttgactttgaatttggtatgtagaacctgaagttattgtgtgcccaaattcatagtgagaagatgtgtttatgcataggtcacacacttagtaygcattagtatacaataatggtgacatagcactttgtttaagagtgtaaacatgtagcacggaagttgaggtaacttatagttatggtttttgtctcaggttgacaagaattctacctgccctggtagggtgatcatattgttagaaaagggtcttctgagttcttcagagttgctccaaggcaggagtttaaggaaagtaaaccatggacaccctggattaatttttttgtttgtctaaagtattacatagattgtggctttgaataaattacctttctggaagctcagccaagcatagtaaactacaagagaagacatctaactgtcactcctccctggcccccactggctctcctccctcggygcacacctaatccagatgtgaaattaagtgctttcacacaggtccatttataaaggaaattaggtgggagacttgattccagagggatcttgaccttattccccagttttctttatattgattttaaagcctatatattggttgaaaatcattgggaaaatagttgtggagaagataggtagtattttaaaatgtgactaatgctagttttgatggtttaatagtttgggtactgtattattctgttttatattgctacaaaggaatatctgagcctggatgatttataagtaaaagagatttgtttggcttatgattctgcaggctatacatgcatggtgctagcatctgttcagcttctggtgaggcctcaggaatcttttactcatggcagaaggtgaagggggagtagacgtgtcacatggtgagagagggaatgagagaggccaggatcttttcaagaaccagctctcatgtaaaggaacagagtgagaactcactcattaccatggagaggtcactaagccattcatgaaggatctatccccatgacccaaacacctcccaccgggccccacctccaacactgggcatcacatttcaacctgagatttggaggggacaaatacccagactacataaggtagtataagtctaatctattacattctgccactgtaggtatgattagtacctaccaaatttatattgatactagcttcttcataaagattctcagaagaggtaatttaagtctttcttgcattgtttttatagtcataaaataaccttaactaataatatactttctcctttgtctaaattaaaaaacccccctgcttgaatttaagcctttccttttcatttcatcgtttgaagatactattgattttgatggcaaatcatggaatgaattttatacctatgttagtcactcgaagtgtttggtaatttagtttaccatgttttagtctaayatagaaacacaatctaatatttttgaattctctttcgttaaggcattgtgtccagatctggcaccctgacttatgaagcagttcaccaaacarcgcaagttggattggggcagtctttgtgcgttggtgagggacttttgctaaaatcattttattggagtgtggtgtcttcattggatgagtataataataattattgattttattatttgcaaaagattttgatactcttatgaaaaggatgttacgatctcaaatttaatttgcttaagtgtaaagttattctgtagttgtttcaagattcatggtccaagatttcatttctaggttgaagaactaacatcttggaacacgtggctccngaagcaccttggtgcctgaaaacatcacttggtttgattgctctgaagaaatggttccttatattaggacttttgttatcattgccattatgttcatcagtgctttatagttactgaattctttgccattcagtgtctcattcttgagggaagcctctcaggtgcctctgagctggaaaattgtactgttagagccttattggtgagaaagtcaaggttgaggaaggttcatttcctcagaacctctctttttatcacactatactgcctcccatttgaaaaagtaaaaattacaaatttttacattttaaaataatttcattatttgttgccaaaagccaaggcaaattcctccttttcatattaataaatattctttcaagttcttagaatacctgttaatgttttagaattatctttacgaaaaagtaacatatagctctggagtgtttttattaagattcaaattcataaattaaatattgaaaacattaattgagcatttgtacatgcaaagcacaatataagtggaagatactttttagtgtgacagagaataagaaaaggtttgaaacaggcttaccgattccttcttttccagcttcagttttgaatttgtaagtggaggataataatgcctatctcacagagaagttgagaaaattaggaaatgacagatctaacgtgtgccaaagcataggacttgacacacggttggcacttaataaatgccggttctcttcttccactccatttttcagagatgcagtgaaaagaaagaaatcaatcctgccctcagtaagtttgtaatttaaaaataaaaaacggcagcctgtctgtagggaacatttactttaaccctgtccatgaatttgttcttaaatgtggtgtgtagtatggctctgatatgcakgctctgtcatcatccactctggatccagaacacgagcagtcagggtactcactgtcactcactggcacttgtgtcttaaaacttgtgggtgatttatctgcagcatacttcatcaaatagtttctttactcaaagaaatttgttaaatgtttattctttcctctggtgtaacatcagcatgcaacacagatacacattttcttaaaatgttcatttctaaggagttatctgggaataattttgtgggacagaagaggcttgataaaggagctaaaacaaaaagagggttgtcttcgttacagccctagaatattcctagaatatcaggaaccaaccaccatttagcatttatataatattaccaacagaaataaatgtagcattttgtgattttttaaatattaaatgcaagagcaatgatacatttaaaaatataagagagaagggtaagaaaaatgacaaactagttaaaaacatttattgacctaaattccatggttcacccttaaatttccagctattgatatttttcaactttttcaggcattggaggtgatccttttaatggaacagattttattgactgcctcgaaatctttttgaacgattctgccacagaaggcatcatattgattggtgaaattggtggtaatgcagaagagaatgctgcagaatttttgaagcaacataattcagtaagtttgggtttggaaaaacatagctctttgctcttaatatcagaggcttgtttcagaagttatttttattttttcaaaggtgaattttttgagaaaacatgaaagataaaactttctgagcagggccttctatactggacactcagacaattctgtattatttctgggttgattctctgcttctctattctgaactctcctccccaggcatcaccccacactttgtggtaggtaagtcgttctcctgctgaacagatacattcaggccatcagcccgagagcccgcacttgacctgcagacttggttttcacctgtgaccagtattctttctcccgatctcagagggaaataagtggttttttctctttttcaaggctgacctaaagatcctatcccttgtgctttttttcaggctctggcttccttccagttttagactttccttgtggaatggcacttcccttcagagatcaagtagaaaagctttactgtctatgtcctggggaggctttccttgttgcttctcacttagaattaaatgtaaaggagtagtgttgagttatgtcatcatttcattcagcttgagggagttaagccctgttcctgtggtgaaaggagagatgggggtgcggtagtgactgaagcagtgtggtggccaccagcccccactcagtgaatttgtgctgtggccattgttgtgtcagagaactgtgggaaaaaaatcaagcaactgattttcagaatttctcttatactgaggaatgagtgaaaatttttcttcaggggaccaggcaagagagtggagatcactttctctctatatgtatgaaaaaaatccaccagtgaatgaattaaatgccacataaaataatactggagagttaaaggaaccaataatatcatgtacagggtggtttacacaaaacaaggcatatttatttgtgttttaaggaattttcaagggctattttgaatatacttgattttcttttgtggtgattttaagccctaactcccatattagatatgactcaggtttaccctcattctctcattctctttccttacttttcattcattcttgaatcctcagcaatcaggctcctgtctgtcacttagaagctatatgaccttgggaatgcttaatctctcgttgcctcaggttccttattggaaaaatgacratatagtagtgcctgcctcctagagttattgtaaggactrcgaagtttaaatgacttagtaacgtatagcaaagtagtgcccggcacttagtaagcactcttactgagccactggctgctgtggaatcttcttactctcctgacattgtgtttgcacagaggtcaccagtggccttgattcattcgtcatcctctccatcctcttggtttctttctggttttcctcctctttatcattccctggatctattttctgtgcctatttctatggcagaaacctgagaactaacttttatttctctcttatcctgtttctactcagttaccaagatctgtctctgagacatcagaggtttgtctggattcagagccttgtctgtacttagtccatctactttggtttgggtcctcatcccatctcatctggaccatctcagtggtttccttcttgatctctcttattttctccaaccacccccctttactcttaggccattctgtttatggccacccaaattatctgcccttctgaaacatgggtattggtgctgtttgtccttggttcacatcagacagtgtttcccatgtaatgtttcccattacatgtcagctaaaggcagatttagcatggtattccagtccttcacataccatccaaaccttcccttttagatcagttttccatctgacatgccagttttcattctcacttgcctttgcttgttccttctgcaaggaatgcttagtatctgactttcactctagactgtgttatggactgcagggaactgttaacttcagtgccctgcccagtcccctggcacagtgggcaccaatacaggtcatgtaaatggaagagtagattgttaaggattggagtaaaatgttagattcccttgtgttcagaaagttgtacagtttgaaatataagtaaaaactgacttctttaaaaaaaaaagtttcggttaatacagcattgtgctgtgttaaattgaatttaaaatgtatttgggcccaattctgaatccctggaatagcctagtatttagtgggaaaaatgaaacatagacattttgtttcatttggcaacatgtttcctattcctggttagttgttatggaattaatttttattgagaacctaatgtgtacaagattgtaagttaagcagttcagatgctgcattatataaaatgcctagtgtaatacttggtgtaaacactcrataaacatgatctgctgctgcctttcttgttatcattacaatgatgataattatttgcaaacgttctggtgtttaacttttatcctgatgctttgrtaagttgtttttgttctttctttatgaatgagaaaactggtacaggaagattagtaacttgacaatggtaggtatacagcaaacgaactggggtgagattcatacccaggtttgtctgacttctccatttcaccatggaaggatgaggtgtcagattgaaggagttaaggacaaagagtcatcaatcctgggcataggctcagactacactgatagcattctaactggcctttctgtttttagacatacctttcatcatttttgtgtcctattttcagactacacttccccatagtcttttagttgtagttctctccacttaaaaaacaaaaacaaataagcctccaatggctctttgttaatgggacagatgcaaatttgtttgccattctaggctcaacaaagtcttgatcctttctagtgcaacaatattcccactttttggggaacaggggagtggaatcaaatacaaattaatgccactcaaacatgagattctcatattctatgtagatcttatgagtgaatgagtaaataatttgtggagtcttttctttttaattctataccataggtactacagtaggtgccaggcataccgaagttagtgaaaatataacctctgtgttcagggaattcatagtttagtagaagaacacacggggaataggttatagccagtgtgctgaatttaatagtagaagggtgtaaaaggcacaacagggtcactgatgagatgatcacctatgagggcatttgtggggagggtgggagggagagatagaaaaggcttatggggaagaggaagctagagtcagatcttaaaagttaagtaggagtttgccaagcatccaaggagggtggagagcattctcagcaaaggcacagagctagagcattctggggttactggaagataaggagaaagggaggaaaggtggcagatgaggcaggagtaagcagtgtctgaccatgtagctccttgcatgctgcatcttagtgggaatcagggcagtcagtcgaaccagagtagcagtcattcactgccatgtactactcacagtgcaaagaraaaaaaagccagtttcacttatgagtgtccttgatgaagcaatgcaaattattaattttattaaattatgaccctggagtcagtattttgtgataaaatgggaagtaaagcattgtcacaattgagttgtgagctgaactagctgcccttttcatgggacaccaattttacttgaaagaatgactggcagacgaactggtaattcagacagatctcttctcaataatgaacaaagtaaacctgctgtgtcaagggaaacagttgatagtatttgttgctaataataacatttgaactttcaagtgaatatttaaaattttagaaaatttgcatctgcaactgtgagcttgacagcttcctcctacctagaggcttttctaatgagcttgatggtgatactgataactgatttgttgttattaaatgatgaaacatgtcagcatttggaagatctgcataactcagtgaacccatacatatttcctaactgaggaatgcatgttacaaaatcactgtggttaaaagatcactcaaagtgcaagacagattaatgagttttaaattaacaagggacagaaagttcactgctatggtttcagattccaacattgcacctaacctgtaagaaattaccacttgagagatttggttagtatcaaagaagaatactcccaattatctgtaaggcagtcatttaaaatacttctgccttttccagttacatatctgtgtgaggctggattttccttttatacttcagcttaaataacacactacaacagattgaatgcaaaagcatttatcagaatccatttgtctttcattaagttaaacattcaagagttgaaaatataagtggtaaaataacgcaactcttctcactagaatggtttttaaagtgttaaaatgttatttttaagtgaattaacaaatatttataaaatttgttttaatttctaatatactaaatatcattagatataatacatatcaacaaaagctctttgagatcgtcaataattcttttaagtataagggatccctagaccaaatgatctgagaactgctggtctaggggaagatgatggtacctaagtgaaagctctcaggttccacttgtgctcaagttctgccttttcagtcctctctgttttacctggttccttattatctctggacttctgttatgaacatgatattaccattaattatgaaacttaatcatatattcatatattagtttatggtatcttttttttttttaagacagagtcttgctctgtcgccaggctggagtgcggtggcatgatctcagctcactgcaacctccgcctcccgggttcaagcgattctcctgcctcagcctcccgagtagctgggactacaggcgcgagccaccatgcccagctaatttttgtatttttagtagagatggrgtttcaccatgttggccaggatggtctcgatctcttgacctcgtgatctgcccgcctcggcctcccaaartgctgggattacaggcctgagccaccatgcctggcctatggtatctcttaatggattgaggtwtatacatattttatattatttcttcaactactttgcatgtctagagtacagacatttttatattttctttttttttttttttaaacctcagaatctagtatatagagattgtacattagaatggatttttgctgaataaaaccaattctgatcttccctcttagacacagaattccagagtggaaagggcttttgggcatcaatccagtttggccatttcatttcatagatgaggaagcagaagtctggttctcaagaagccttgtccaaggtcgtgcagcttttgttactagaaaattaagtcctaggtcctttccagtatacttcccacctcatctttttcttttagcacatttattaagggtgaactaataatgaattaaggcataatattaggttgaagtaaagcaacccagtcttgtgtcttaaattattattatcgcaaatcatattttccagtatgctcttttacttttcaaatgatagcgtcatgtgtatttgtgaagtggaagttttatattgaacagatacggacattggcacagtgttgtattcctgagtttgtatggaaagttaactcaaaggagaatgcagtggtttcaatcatggtttaatatttrtgttggttttcctaagatgaatggtgggctttcccctgcccaagccatttaccatttaccagcagagtcatgaatttgaggtcccgttttgattgacttcttcattagagcatttaaaatattactttctttctagggtccaaattccaagcctgtagtgtccttcattgctggtttaactgctcctcctgggagaagaatgggtcatgccggggcaattattgctggaggaaaaggtggagctaaagagaagatctctgcccttcagagtgcaggagttgtggtcagtatgtctcctgcacagctgggaaccacgatctacaaggtgagctccaacagtggcccaggtgctctgaggttgcaggctttctctgtgtgtggccacactggatacctggaaatcatggcctttgcttctgggacttaattggttttctgatgtgcagcttaatagtttgtatcaactctattgatgtcctagtgccctaattaggcatgaccaggaataatgttcttattttaaagctttcttctttaaacattgggatttttatttttgtaagtggcaagatacaacatacacaaaaagcatcttgaagatcgtaagtgtcatgatttccattttgagagtttggaaggtagctgtgcagagaactgctttatgttttgttacttgttttttcctttgggatatagccaccctgaccccatgggtttctgtttctagggagaggaggttggaggctgagtaacaagaaatggaaattggatgaagaaggagtttgggtggagggagatctaaagaggatggggagattggccctggctatgttgtgataccattgttaaccatttttttggtttgtttttggttttttgtttgtttgttttgcttttccttttttaataggacattatgggtttaaatattctaagtaatttgatgtcttttgtaatctctttgcactgattttcagcttgtctctttgagtgatcatttaaggctctctctccctcattatttttatgatggtatacccctgccacacacacacaaaaagcaaaaaacaacaaaaaatctcctcttaagcatgctgaaaataggtaccagttggtttcctagaagggaacagcattcagagagaatttcaaaatcctgatttggtggtcttctttgcccttgtcttagagataaataaagtggactcctttttttattgatctttgcatgatcctgctcttggaatataacactatgtgccaaagtgtttgaaagaaatctaggtgcttagtgagagtgagaaataattttatttgaaggtggggtaaggagaaaagcaaatgcttaaattcacattggagatgtgtgttaccattttcttccagtaagtggcagcagggatctacacattttatcctaattgttacaatctagaaaaatatgatttttggtattgtttccttaaacactactttgcttaagatatttgtttgtttcaggtatttctaaggttcttgacattttgttcaaatccttgtaacaatctgtctttagctttattctctgagaaactgagcaaacctgtttccattgccttcttagaagggttcatgtatatagcactacagaagcataatgaagtttctcagctcccaaaattattgttattatactgctgtgaaaaaataaatattattcaaaacctccctctctgcttctggatttaggaaatgtaaagttgaagctctgcatctgtttygtgaaattcaggctgacacagactgattttgaaagctgttattctgtgttcaaacaccctcatcctggtacatttttcttctgtaatttgattgttcaggggatcctaaagataataggtttcaaaatcattttgatcctaaatgtgatttggatcttttatctttattcattccatctctcttctctctctcttctgtttctgaaggaatttgaaaagaggaagatgctatgaaagaaaaaaaaaattcctaaaactgtggaatggatcacgtagacatgtaacccagcagcagtttgcttctgttgtccactgattaatcagcctatgtgcctgacactggtcttgcagtacaactggaagccaaaacaaggtggaagatgtcctgaattaagaygttttcaccacattgtattacagagacagccaataaatctactatttgatttcaatatggttttggaggcttattattgttccagtgtgaaggatgaggagagtgggagaaatggaggtgtatttatgtgtgtgtatgttttaatatgttctttttgtttgtttgtttgtttgtttgtttttcttggagacagagtcttgttctgtcacccaggctggagtgcagtagtgtgatcttggctcactgcaacctcygcttcccggggttcaaacagttctctctgcctcagcttcccgagtagccgggattacaggcacctgccgccacacccggctaatatattttttttgtatttttagtagagacggggtttcaccaagttggccaggctggtcttgaactcctgaccttgtgatccacctgcctcrgcctcccaaggtgctgggattacaggcatgaggcaccgcgctgggcctttaatgggttctttagagaacattgtaaccgaaacctctgggagaatgaggctgtaacagtgtcaacgtgacatttgtctatcttagacatagaatgacttcaggtatcttttgaattatagttttctaatgtatgtatatatctccatcatgcagggtagttcaaagggttggagataatgtgtgaagtccctggcatgtaataaggcaacttaattgtcatcagtgcctctatcatcactaccatccccaccacaccatcatcattatcatcatcaggattagaggcagaagctcatttatatttcagtttctgcctcattgggaaatggagaatcttcaccaatgccatgcttttctgtggttctgcagagggcccatccagagcccacattctttgaggtttaagacatttcactgcaagaaaactggaaagctgttagccatcctgttttgtgtttaaaagaacttcttaacaagaagtaatcccagtgggtaattcccactaaacaagacagaggtggtgcctgtcatcaggaacttacattctggaacaaaatattatcagatagtgtaactgtcctgaaggaaacaagtaagagcttcaaaaaaaaaaaaataatattagggagaagcccctgaagaaacgcagacgggaattctccctggggaggggatgtgagttgggacctgaggactgagaaggtaccagccatgcaaaaagggagtgtgaacactcaggtaagggaacagcctgtgcaaagtcagggagggggaagggctcattttgaggaggtgaaggaatactgggggatttgagatgggtttggggaggtttgatgggcctgaggaactgtgttttgggagctcgcatggccatgcccaggctgctgctgagaacacaaaaagcaggtgttaagtgtcacagaccaaggaattctgcccagaccaagggacacatggtgattgactttcagatcaagtagactttagtttctgcttgtttcctcagcttgaaaatgtggataatggcttccatgccagagggtacctgggtatacgttatgtggtgtgtgagggtgctcatcacagggcaggcttggctagggcttggcatttctccataaacttgagtgtactctgctcttgtgcttaggacatccagggtgacactactggcccaggaaggaaggcatttcctctttcctctaaaccaaggaccctatagggaaaatgtcttagttgaactcaatggggttttgtgacagggacacaactcagatgataggtaggtgacctgtcttagctcagactgctataacaaaataccataaaccagatggcttaaacgtttatttctcacagttccagaggctgggaagtccactatcaaggtccagcagggttgggttcttggtaagggtctcaccctggtctacagacagcaatgttgtatcctcacaaggtggaaagagctagctagcttgctggtcatttataagggcattaatcccattcaggagggctccaccctcatgacaattacatcctaaaagccccacctcacaataccatcacattctgattagggtttcaacacgcaaatttgggggacataaacattcagtccactgcacgaccctaacagaaggtatccttttcagggtccaccctgacccaggactgctctgggattgcctcagcaccctgccctgtcctctgagcatgtgtcccaagactacatctctcttttcactcctctgctcctgttgcctaaaccagggagctcagtgtccccatgactctttcatcttcttccaccaccacctccattttcccattccctttcatcttccttttcccacccaccctctccactcctcctaggatcctgtgagtccaccttctcctaaccacctctctcacctctcttccctcctacaacaccatcactacctctgatctgagagctcagacagcagtggttggaattttaggttgtggtgtttcctatttcagttttattaacaaaaaagtgaaagggctactcacaactccagtaaatttgaaaaactttggttatgcaaactttaagacatttacaaaagaattgtgatagcataatgtactcccatgtacccatcacctagctttgaaaattatcaacattctaccattattgtatgatcggtaagtaatctccaatccacgtcccatagcagtgatgttgttaaaagagttcttttgttaaggtaaattttacatactttgaaatgcataaatctcagccatatacattagagaaatggatgaacccatgtaacaacatcttcctcgtaatatagaccatttcattatctcagaaagttccatcatatcctacctaattgcatcctctctataggttacctgtattctttttcacctgaaattagttttgtctgttttagaaatatatatgaagggaatcatatagtatgtcgtcttttagatctggcttctttcactcagcataatatctgtgatgttcacccatgtcattgtgtaagtagttcattcctttttattgctgagtactattccattgtgcggatactccacgttatgtctttccattctccagttgttggcttttttgttgtttccagcttttggctgttagtaaataaagctgctatgatccttgtgtgtaaatctttttgtgaacatacattttttttcttagacatacggaggaatagaatagctagatgtaatagcatgtgtacatttaactgtcttttttccagagtgattgtactattcatattctatcccaagaaaatatgagtgtctgtttttccctaccttctctgagatttggtatttttgttcttgttaatttcattctagtggggatgtcagtgatatctcatgcttaaattagtatttccctgaataataattgcgcagagaggctgagagctttttttttttttttagagatggggtcttgctgtgttgcccaggctggcctcaaactcctggcctcaagctgcccttccacctcagcctcccaagttgctgggatttaagccatcaggtccagcctaaagttgagcactttcaagtgtgctttttggtctttggtatttttttccttgagaagtgcctttgcctatcttttatttctttgtctttttaggactgaagttccaacaattcttcctatattctgaatacaagacctttctcagatctatattttaagaacattttctcacaatctatgccttgccccattcattttcttactggtgtcttttggtgaactaagattttaaattttgataaagagcaactgatcatttttttttcttttttgtttactgctttctcctcctaagaaatggttttctaccccaagttcatgacgctattctgctttcttgtaaaacctatattattcattatttaattcttatatcaactttgaattagtttttgtttattgagtgaagtagaggtcaagattgagttctttctttatggatattcaagtgggtctggcaatatctgttgaaaaatctgatctttggccattaactgctttcatttatagtagaaaggtccattgaccatgtatatatgggtctgtttctggactgtattaggccttttgtaatttaatataaattttagaataagttcatcaatttctatggaattatgattgtgattgagttgaattctgtatattattttgagaaaaattttcatttaacaatagttttccgtgttcttttttgctgcagaaatacacaaatatgcattgatttttacattgaatctaaagctttgctaatagcatttattagatctaatagttttaaaaattagattccctagggtattttttatatagaaatttgtcatctatgaatagggtaagttttacttattttccaatcttcatgcctgttttgaagattgctagaagctgctagcttaaagatgttcatagatgtcctttaacatgtgaggtaaatccccctttattctaagttaactaaatgtccttgttgttgttgtggggcttttttgttgttgtttccttttctttttcttttttatggggaaggggtttcactatgcttcccaggctagtcccaaactcctggctcaagtgatcctcctaccttggcctccgaaagtacaggcatgagccactatgcacagccttgtttacttttaaaatcatgaatggctgatgaattttttccagtgatttttctgagtctattgagatgaccatgtatagtttttactttattttgttaatatggtcaatttaaatgtttgatttttaaatgttagcttgcattcctgtttgtaattgccacttggtcatgatcttatccttgtcgtacattgatggatcaacttgctaatagtttgttaagaatttttatgaacatgatcatgaggggtattgatctttatcttcttgtaataaatttcatacacgtccttgccaagtttggtatcagggttttattggctttatacaataatttgggaagtgttcttttttcttctgctttctgaaagagttggtgtaaggttgatagtttcttccttagatttaatagaattcgctagtaaaaccatctgagcttgaaatttactttgtgaaagcttttgattataaattcaatttctttgatagataaagggcctttcagatttcctatttgaccttgtaccaatttttggtttttactacctactgcttattggagaaggcctttaagtgaaaagctacaaactcagaaatctcacccattgtggtgccccctgcacaggtaatctccttcactgcctgcatgatttggtcactccacaatgctttcaggtaattgttgtcttataaataatttgtccagatttaataattgctatctgcaggaaggttaaggatggatcaaactattccatcattgccagaagctggaactctactgcatcttttaacagaaatgaaaagcccctcttcttggccagcactgctactcccctggaatgagtagcagtgaacagggcaaggcatgtcattctcacatgtaatcagatttttcaagttatttcactgagggtgtcagatttcaccctgtcctgtgaaagtcacatgcaatggctttcagatacatccacatcatggatgaagtccaagaccaatattttaatagatttctgtagtctaaagctctcttggtcacttcttgtctggtgttatattgctactgctttactgctttgaatatctcacacattttccatctccctaggtctacacttccccagcgcagaatgtagccccttcttgaattctccacaacccattctagaagcttagtttgtggtcgagttttgtcaagagaagcagcagggtgtgctcaagctgggagtatcagtcatacctttcttgagtcataccaaggccacagagagatcctttccaggaactcttctcctgcagctcctgttgcaagccttctcctgtctcagcctccccaagctcccctgccacagctctgcatctcc

SEQ ID NO: 93833 - DNA, 15877 bp, Homo sapiens
caaggcatttgtccttccttccttccttccttccttctttctttctttccttctttctttttttttattgagacagagccatgctctgtagcccaggctggagtgcagtggcatgatatcggctcactgcaacctctgcctcccgagttcaagtgattttcctgcttcagcctcctgagtagcggggaattacaggcttgtgccaccacacccgcctaatttttgtatttttagtagagacagggtttcaccatgttggtcaggctggtctcagactcctgacctcgcaatccacccgcctcgtcccaatgtgctaggattacaggtatgagccaccacgcttggccaaggccattcttttattatttttcttcctttctttttcctttttttgagatgttttctcactcagtcacccaggttggagcgyggtggtgcaatctcggttcactgcaacctctgcagcccaggcttaaaccaaccttccacctctgcctcaggagtagctggtaccacaggcacacgccacaatgcctggctaattctttgtatttttttatataattgggattctgccatattgcccaggctggtcttgaactcctgagctcaggtgatccacccacctcggcctcccaaagtgctgcggttacaggcttgagccaccgtgcacagcctgcttgtattatttcttactattacgtgtgaatctacagtttgtcaaaaattccaaaaggaaactcgggccaggcagggtggctcaggcctgtgatctcagcactttgggaggccgaggtgggcagatcacgacatcgggagtttgagaccagcctggccaacattgtgaaaccccgtttctactaaaaatacaaaaattagccaggcatggtggtgcccgcctgtaatcccagctactcaggaggctgaggcaggagaatcatttgaacccaagagccggaggttgcagtgagctgagatcatgccactgcactcccgcctgggcaactgagcgagactcagtgtcaaaaaaacaaaaacaaaaacaaatacgaaactcggctgggtgcggtggccattgtctgtaatcccatccatttgggaggctgaggcgggcagatcacatgaggccaggagtttgagaccagcctggccagcatggtaaaaccccatctctactaaaaatacaaaaattagccgggcatggtggcgggaacctgtaatcccagctacttgggaggctgaggcgggagactcacttggacctgggaggtggagattgcagtgagccaagattgtgccactgcactccagccttggcaacagagtgagactccatctaaaacaaagtaaataaaaatttaaaaaatttaaaagaaattagccgggcgtggtggtgcacacctgtaaccccacctactcgggaggctgaggtgggaaaatcatttgaacctgggaggcagagtgtgcggaagatggcgccactgcactccagccagggcgagagagtgagacaccgtctcaaaaaaaaaaaaaaacaccgaacaaaatacaaaacaaaacaaaaccaaacctcaggatggctgggaaagctcctgactggctttgcctttggagtgaatcaatcaatcaattaagggcgtgcctgttagtgagtctcctctgacctttagccaagaatgttccgaactcagcaagatgaagcaggaggtagagggaactaagggggcaacaagcaggagacaggaagggcccatgagggtgacatcttccctgagaggtccaggacaaccagcaggaagtcaggcgggtgcaggcaggaggacccaggaaagctcggcctgagggaggccctaggtgtggtggggagtggggtagggcaggcagaggctgggcagcaggtgaggtcccctggattctgggggccaagcctggggcttgaggtaaacaggcctgagtggagaaggggctgctgtggttgggctggggtgggtggagctggaggagccttttcttcttggaccaaattttgaattgtgctacataacatggtacatcagagttacctccttcaccattttcaagtgttcagtacacacacattgttgtgcagctgatttccagaacgttctcatcctgcaaccctgaagttctgtccctattaaactccaactctaaccctaacccgaaccctaccctaaccctaatccattgccccctcccccagtcccaggtaacctccattccacttctgtctctatgaatttgactcctctagggacctcagagaagtgtgttcatatgcatttgccctttttgttattgtttttaagaatcttattttacaggagacggtatttgtccttttgtgactttcatatttcactaggtgtaatgtcctaaccgtccattcacgttgtaacagagtcttctccagggcctccttcaaggctgcatgatatttcgttgggtggatgaccccatttggtttcttctaccttttgggtatatatatatatgcacatatataacccaggctggcctggaactcatgagctcaaacaattctctgacttggactcccaaagactgggattacaggtgtgaaccaccacgcccagccatccttttggttattctggttttcaaattttttcccaattttattaagactgtgataaaccagccaggcatggtggctcatggctgtaatcccagcactttgggaggccaaggcgggcagatgccttgaggtcaggagttcaagaccagcctggtcaacatgatgaaaccctgtctctattaaaaatacaaaaaattagctgggtgtggtggcttgcacctgtagtcccagctacttgggaggctgaggcaggagcatcacttgaacctgggaggcagaggttgcagtgagccgagatcacaccactgcactccagcttgggtgacagagtgaaacactgaaaaaatgtctttcgaaaatgaaaaaaaaaaaatactgttataaacccttggattgaaaaagtttataatgataacttctacagtgtaaaaaataaaaaagtaaaaagagttaaaaaataaaaataaataaataaaattatcaatgaaccctaatcagaataaatataaagttgaaaaacacactaaacaaatcactatatcattcaggaaaacatgcatatgtggtaaaaagcaatcaacagcaaagtcaagattaaccaaaatacaggatagtcattacctctggggagaaaggtgggagactcaaaggctttaaatctttttctcaaaaagatttatccctacagagtaaataagggtttatttttgttattcatctttaaatggaacagatggaaaacatttttttgcatgaccacaacaaatggaaaatatattaatgaagttcagtcactcttctgttttactcataataacagaagccagaaacctgggagttacctttgaccactccctcaccaaccaagtccaattaattttcacttctaatcacacctataataccagcacttcgagtggcggaggcgggcagatcacttgagaccaggagtttgagaccagcctggccttgatggtgaaaccccatctctactaaaaatacaaaaattagccgggcatagtggctcatgcctgtaatcccagctactcaagaggctcaggcagaactgcttgaatcccggaagcggaagttgctgtgagccgggatcacaccattgcactccagccagggtaacagaccaagactcagtctcaaaaaaaaaaaaaaaaaagatcactttctattcttccccacccacaacaccaaaccctggccccagccactttgattctcaccaggaacccaaatccctccctcttccttaacacccccgctctaatccaatctccacacagcagccaaagccaacactttaaacatgattaactctgtctgtcttcaacttgaatctccctcactaccctccttttctatcagaagcaacagagagacaagtaaattgcccaaggccacacagcaggacatggcagagacaggattcagaatctactagttttgacagtccacatgtctcacccacccactatcccattttgggtgatcccagaaaagggtcagccactgccctaacacagggtaatctcagacaaggacagaggatttctcctccaatcaccacttcccttcctttatcagcctaactcccagttatccctaattctcagctcaaaccacacttcctctattttttttttttttttttttgagacagagtcttgctctgtcggccaagctggagtgcagtggcgcgatcttggctcactgcaagctccacctccgggttcacaccattctcctgcctcagcctcccgagtagctgggaccacaggtgcctgccaccacgcccggctaattttttgtatttttagtagagacagggtttcaccgtgttagccaggatggtctcgatctcctgaccttgtgatccacccgcctcggcctcccaaagtgctgggattacaggcgtgaaccactgtgcccggccttcaaaccacattttctaggaaaggccttcctaggccccttgtcctattccagcaactccccacaatttgatggccagcactttgtacatctctaaaaacattcctcttccactagattgtgccctccacaagggcagaggtctgttttgcccacgattgtggcacatgtcacacacccttgagcactctggttcctctccaaatccatttctcctgaatgtgggcccagattggtggctcaagtctggaaccctagcagtgttgaaggatcgcctgagcccaggagtgcaagaccagcacgggtaacagaaagagatcctgactctacacaaatttttgaaaattagcttcacataatggaagatacacgggaggctgatgtgggaggatcgcttgagcctaggaggtgtggcgtgaatgcaccactgcactccaacttgggtgacagagccagcccctgtctcaaaaaaataaataaataataataataaaacagaaagaaaaaaatgatggcaaggtatctgaactgcagaaatactttttaactcagcctgaggctatcaaaacatctgatccccatgtgaaaggctacagttctgggcatgctcagggcccaccgaaaacagagtccgcccaggcaccctctgcctgtgcaagggaacaggtgtcacaatcaagtgcacaagctgctctggaagacccagcccaggcctgtctggccgagggcactggactctcccccactgcgtcgtccaaacattagtgcgagtgcacccacacaaacacatacacaatcaaacacaacatgtaagcaatgggcaggactggcccggccccactcagtgttgtcaccattggccccacagatgcccacagccctggagctctgggcctagattcctgccagccccacctgtccaggccaaggccagatgttggagcaagggggtgccagagcggcaaagccccccatgtgcccctttcccaccgggcccaggctcctggcatcagaaagctgaacccagtatctggcccgggctgtgtgcttccagcctcccctcctctcgacaccagaacagagcctggcccccagctcccaggaaatacagaaaaaaaaaatggtggatgaacgagtgacagggtgtcttgttccacacaagacacagtgagcaggggttgggggaggggcccctggcggcaggatgcacactgcactatacccaaaatcccacccttccctgggggacacctggtcccaccctaagctgcctttctcaggaccccagccccagcccagcccagccacaccctgccactcccttcagccagtgtggcttcaggtcaagaggctgggcggggtcaaggtggtaacaaggggaggggccaggacacagttttccctgatttaaacccaggcagcctggagtgcagctcatactccatacctgggatttcygcctcgccgctctccgactgcttccagacatgcwggggccctgggtgctgctyctgctgggcctgaggctacagctctccctgggcatcatcccaggtaatgaggctcccccagctgcccctacacacacacacacacacagggcaccccccagcccaggctgacctgatctttgctctccccctggccagttgaggaggagaacccggacttctggaaccgccaggcagccgaggccctgggtgccgccaagaagctgcagcctgcacagacagcygccaagaacctcatcatcttcctgggtgacggtgagtgagccaggccttccagccccgcagccctcacagccccggcgcccggaccctcagtggttccaggacagccctggggagcaagcctcacacacttctgctccttcagggatgggggtgtctacggtgacagctgccaggatcctaaaagggcagaagaaggacaaactggggcctgagaccttcctggccatggaccgcttcccgtacgtggctctgtccaaggtaagtgctgggctaccttagagtcctccaagcasagaaggggaatcctgrctatggagtgtggtaggagggagggaccctaaacagctggggctccaataaggagctggaggcagttggaatcccagaggacagagatcagggtcttgtttgtctgccccagagaagagctcagagtgtctctgtccccagacatacagtgtagacaagcatgtgccagacagtggagccacagccacggcctacctgtgcggggtcaagggcaacttccagaccattggcttgagtgcagccgcccgctttaaccagtgcaacacgacacgcggcaacgaggtcatctccgtgatgaatcgggccaagmaagcaggtgagctggggcccgctgtggggtcaggrccaggtgacagacctctatckcatatcctgacctctatcaccctcaggaaagtcagtgggagtggtaaccaccacacgggtgcagcatgcctcgccagccggcgcctacgcccacacggtgaaccgcaactggtactcggatgccgacgtgcctgcctcggcccgccaggaggggtgccaggacatcgcyacgcagctcatctccaacatggacattgatgtgcgacccccgggccaagggctggggctgggcagagagtagcagggagggggcaccagctcagacccaggcaaccaaaagccttatctgggccagcagggtctggaggtggggttgggggcgtagaaggcgcagcccaggctgggccattcccacagccttggggaggggagtcaggggctgtgcatgaggaggggrcacggggccagccaggcccccaaatccacctgccccatcctctgttcccaggtgatcctaggtggaggccgaaagtacatgtttcccatggggaccccagaccctgagtacccagatgactacagccaaggtgggaccaggctggacgggaagaatctggtgcaggaatggctggcgaagcaccaggtgatgggggctggygggtgtgctgggcacagcagggggagggcagaggtgtggggctcggggctgtgggctgaggcctggctctctccctccccrcagggtgcccggtacgtgtggaaccgcactgagctcctgcaggcttccctggacccgtctgtgacccatctcatgggtaatgacccccttcctgccctggcatccctcagatggcctcagatggcaccttctgagcctgtgtgcacatccgccagcaccctcccacccccagcctgccagtcaccacaggaccccttgtcccacaggtctctttgagcctggagacatgaaatacgagatccaccgagactccacactggacccctccctgatggagatgacagaggctgccctgcgcctgctgagcaggaacccccgcggcttcttcctcttcgtggagggtgcgtggtggcccctggggagtgggggttgggggttggagcagggcaggctcagcatctcccccctctggccttcctgcaggtggtcgcatcgaccatggtcatcatgaaagcagggcttaccgggcactgactgagacgatcatgttcgacgacgccattgagagggcgggccagctcaccagcgaggaggacacgctgagcctcgtcactgccgaccactcccacgtcttctccttcggaggctaccccctgcgagggagctccatcttcggtaggcctggggagagtggcaggtgctgctgcagcaattaagtgggtgaaatctgagcctcagtctcctcctctgtcaaatgggagtaatgctggcaccagccctgtagggtctcctgcggactaagcccctgaccaggcaaaacgtggcggtgcctagcacgtgggagacactccacagctgtgttcagctcaaccacagggacccctctctctgcagggctggcccctggcaaggcccgggacaggaaggcctacacggtcctcctatacggaaacggtccaggctatgtgctcaaggacggcgcccggccggatgttacsgagagcgagagcggtgagtgccgyggggtggccccctgagggggaccagggtgccaaggatggggggctggcgggaaggggtcacctcttgtctgcctggaactgaaacttcctactgaaactgaaccctccaaccagggagccccgagtatcggcagcagtcagcagtgcccctggacggagagacccacgcaggcgaggacgtggcggtgttcgcgcgcggcccgcaggcgcacctggttcacggcgtgcaggagcagaccttcatagcgcacgtcatggccttcgccgcctgcctggagccctacaccgcctgcgacctggcgcccmscgccggcaccaccgacgccgcgcacccggggcsgtccgtggtccccgcgttgcttcctctgctggcmgggaccytgctgctgctggrgacggccactgctccctgagtgtcccgtccctggggctcctgcttccccatcccggagttcycctgctccccrcctccwgtcgtcctgccggacctccacctsgagctgtcayccccggagtcgccayacagasgtcctgccatggaaccttcccctcccggtgcaccctggggaccgagcccttgacaccacgccctttgctttatcttgctcttgaaattttggccccaactccagggactggggatttgtgcctggcagctgcctgcatttcaggaaaagaggaggctcagaccatccagcccccgcccatatsctgaggtggatcaggcaggctctctccccggggacatgaggcacccatacctaggaccccctgcgccttttttagcttcagtcatggcagcacctgagggacacaaggacttgggtgcatcaggacgccttggagaagcgtggcttcctgccaccctgcaacccaccctcccagccaaggaggctgctgtggtggggatccccaggggggctttgacacagtcctctgctgtccctccactgggctaattctacacccctgtgcccctcctaggggcccatgagtcagagaggcttgccccaagtcacagccactcagatgttcgacgccccctaaggtccattccagcacccacctgagttccgaggagcacctgggaagctctgggtgcaggatagcagtccagagtccatggccccgcctaggccatctgggtgctgggcatggatttctcagcaaggaagactcattaccttccctccctgggcctccattcttctgggaaacacaaagcaataataaaaggaagtgttagacaatgtaatgccagtactacttcctagcataaaaatcatgactgaatgtggacacagtggctggaggggtggataacacaggccaggaggggctgctgaggagcagatgactgagcaggagacctgaacagagtcggggcttgagcaaggtggcacagcagcacaaaggccctggggcagtgtcagcaggctgtctgggaggccaggggctggatcagagggtgggtagatggggtaaagcttgaggggtcaggagggtgggggacatgggggaccgtgaagtctaggtagaggggtgtggtcggaggtctttgaggagggctgtgacctgccctggctgggaaatgagcactctggctgctgccaggagaagggtctggtcttttggatagagggtgggggtggtggagggtagaggtgagagctggggaaggagctgactccaggtgtttctgacctccctccgaaagcattctggagcacccatcccaatacagccatacttagtatcacacttgccccaagagaacattgaaaagaattaaatgaaggtgaaatcaaccacattttccaggaaagtttacattattacagatttatttgtacatttacaatggtacaaggagcactttgtcaacatggtgaaattctgtctctacaaaaaatacaaaaattagccaagcttggttgcccatgtctgtggtcccagctactcaggaggctgaggtgggaggattgtctggggcctgggagggtggaggctgcagtgaggtgcgatcacgtcactacacttcagcctgggtgacagagcaaggccctgtctcaagaagaaaacaaaacaaaaagactttgtactcactagaaatactagaatgattgaatacttctttatgaaaattgaattaacattgtaagacgtctatttgccaggcatggtggttcaatgcctgcaatcccagcactttgggaggaaaagaggttaggattgcttgagttcaggagttgcagaccagcctgggcaaatggtgagacctcacctctacacgttttcgtttagtgttgaggcagagtctcactctgtctcccaggctgaagtgcagtggcaggatctaggctcactgcaaactccacctcctggattcaagtgaatctcccgccccagcctcccatgtagctgggattacaggcgcctgccaccatgccaggcaaatttttgaatttttagtagagatggggtttcactatgttggccaggctggtctcaatcctgaccttaaacgatccgctcgccttggcctcagaaagtgctgagattacaggcatgagccaccatgcctagccccagatttttaaaaaatttagccaggccaggtggcacgtgcctgtcatcccaactacttgggaggctgaggcgggaggatcacctgagcccagggtagttgaggctgcagtgagctgagattttgccactgcactctagtctgagtgacagaccaagaccctgtctcaaaacaaaacaaaacaaaacaaaacatgtatttgagaacctgggtttcaggacagttttttcaattctgggtttcagtggctgtcacagaaatatgggaggtgaacagaagatagactcaaatagctggccttactaaattatcacactcattgttaaattccatccatcaagtatgcaaaggtttctggtaaaatccagctagtatatttctatcttcccagttgtcagtcagttcctctttctaaccaatgtggaggtgctgcatgattatattttacatgagtgctcacacccacggacttctattatttaaaactggacaaattttaaaatagattgttctgctattagattattctgttgtctaggtttttgttttttgttttatgtttttgtttttcatgtgtaggtataagggcttatcggtcagctatgttattgaccacaaaatcaagtgtcatgaaaatattttcaaacttctattcaaaaatatgcactttccttagcatgagttttcattgaaagataattaccttctcattttgtcattgaaatgacatctttacctgaaggacacacaggaagtatatttatattttcaatcttttcatggtacgcctaaaatggagagcttttcagttcaaagtcagcaaactggattgtaagaaggagggagggagagttaggaagaaagagagggagaactcaggacaggtgggttcagtactttgtcattctgcgactcattctatgtggccagaaagtttccacccactccccttaccaagtatcttaaagtttctatttatgtttaagtttctattatgcggctatctaaactttacaaaatcaaccccactgccttctgcaacatctcatgtacacgctgggcttctttcctgcgctgattagacggggggtgagccaatgagtgaggggtaagggtgaacctacctctgcacactgatttgtatccggaatgctttttttgaaaaaacccttcctgagtagctattccatctgtggttgcatttccaccatttcctcataacattgtttttatttaaaaaggcatttgctgttggcaatatatcttgtctgctatatctaccttttagtgggacatgaaaaaaaatgaaagaagtggtttgtgtatttccctattggaacagcacctggcaaataccttcagctgagccatgttgggaacatctgtgctttcagctcattgcaaagcaaacctcccacactgggtactttgctctaacacgagtttcttccaatcttcggcagtgttttctccacatcttccgacggtgtttgctgacaaagaagtctttcggtttgtcgacagatcatttactgctcattgtttctgccatttttcctgcaacagaaagaattaagtttctccctggtggtaggtgtttttagtctcatggtatcatgcaagaaactttaaaagagctttccaaatatctgtcattgcgtatggaaatatcaagaagtactgggttgaactgcacctaaatttaaacattgatgggaaaaaattgcactctttcttcagttccggaagcttagtttggccaggcacagtggctcacgcctgtaatcccagcactttggaaggcagaggcaggtggatcacctgaggtcaggagttcaagaccagcctggccaacatggtgaaaccttgtctctactaaaaaatacaaaattagccaggcatggtgatgcatgcctgtagtcccagctacttaggaggctgaggagggagaatcacttgaacccaggaggcggaggttgcagtgagctaagatcttgccactgcactcaagcctgggcgacagagcgacgttctgtctcagaaaaaacaaaaagcttagttttagacaccttgccaaccatgaggatttcacactgctcataagtaattaagtaatacctccaggaacaaggcacccggggcaaacttcagcagtaatcagagtgggggaaattcaaagagttttgtttgctgattttttattattaggggtaacgtctggtcaggtccgtaccccgggtgacgtgcgctctgccaggagtaataaggaattctcagctcccccttctgctgtggttcatctgctctggatttctgttgttagttgcagattctttacaggaatcttgtgtgagcctcttggcccttttggaggattaggtcggttaaaactagatcatataaggctgcgcgcagtggctcacgcctgtaatcccagcactttgggaggccgaggcaggcagatcatgaggtcaggagatcaagaccatcctggctaacacggtgaaacccccgtctctactaaaaatacaaaaaaaaaaaaaaaattagccaggtatggtggtgggcgcctgtagtcccagctactcgggagactgaggcaggagaatgacatgaacccgggaggcggagcttgcagtgagccgagatcgcaccactgcactccagcctgggtgaaagagtgagactccgtctcaaaaaaaaaaaaaaaaaaaaagaaaactagatcatataatctgtcaatctacttaggcagacacactaatactccacaatttgctgaaagcttgtgatctggagggcgtactgtgtcaacccctggcctgaggcacccaattcccttcctccggggcacccgggaaccacatggggtgggtgcctgcatgaagggtgaaggcaccagcattcagctcaatattaaacatgagctcttgggtcgctcactgcccagggctgtgctgaggcatgtgatgagcccagcaaacagtaagcactcaggagggcctgatgttcctttaaccaaaccccaaggtccaggttagtcttgaggtgcttgcagcctgggcaggccattcaaattgagcaactccttgtgagcaggggcgtctcactccctgcaaaattcagaccccagatggcaccacaagttcagtccccaccagatccgaggccccctgcccattgagtgcccgtgagcccctacacagttccagtgattggcacaggaagcctcatgatcggggaagaggagtatgctccctgcagcctctcaggactcaagggggatcccagctgtgccctyctgctgggtgctgatgttgcatctgatgatgccctggtcccactggttctaggaacaggcctccccaccgggttagcatctgcataamtggcctttgcccccatcccaagggggtcccaagatgtctacagtgtgtgggacttactatgtgggacttgtaattgtaccctctgagctaaggcggccccaggacctactgactccctccgaccagagcttccccctttgctaccaggccacacactggaccccaacaccaagaagcagctgaagttcctcttgatagaagcttgccacctaggatgccaccgggcatgcattggccagagtatgttatgtcttgatcactgaagtcaggtcatagagcctggactgcaggacattctgtggttacactatagggagggtgtggtcaagtgggagacccacctatatatggacccaataggtatagaaacacaccccaaacccatctggttcttgctgcgtagatagaaggcaatgagcrcctgtcgggggaacaaccacctctgtaraaaggtcacagagcccggactgcaggacattcctggcagcccagccacacccatctcctgacaatgcatcttctgtgccacctctgggctgggccaccaccttcccggctactgcctcatgaccctcctctgacaccccagctctgggccaggcacccacatggacttgtccatctcctgcccagtcttcttgactgagagctggatgctgaagcagatgctgttcaakatgttcttgtaataggtcttcccatggaccttaaactatgaggggcatgggcagcactcagccgcagaccagggcaaggctgcagatagcgccacaaccgggccatgcaggccacctgccctcccaggtgccattagcagagaggctgtggtcaggctgggcaggcagggacacagtcccacctcatactccttgtccacagacccagtttgaaaaggaagtctgggtagccgaccatcaccaccatgtactgaagttgcgggccggagggctggtgaggtggcacagggcctcagggcacagcatccttgcccaccccctgcccaccaaggaaaggagcactaggccagcctaggagtgggcttcacggtgggggaggcaggcctgctcaactccacgaagtcctctttgtcccttttattctctttcactggcatacagtaggtgctcagtcaatgtgcatgggaccaacagatggcactgggggcccctcaccacggccccagtagctgttctggtctccatgcagtccagctcctccaggcgctggcccaggatgtacttggtgtcttccaccagctgccacacatgcagggtcaggggtcagg

SEQ ID NO: 93834 - DNA, 659349 bp, Homo sapiens
  misc_feature (1)...(659349): n = A,T,C or G
ccaacaaatgtcttctacattcttgctactcaaagcatggtccacgaatggcagatttttagaaaagcagagtctcgccaggagcagtggctcacgcctataatcccagcactttgggaggccgaggcaggcggatcatctgaggtcaggagttagagatcagcctggccaacgtggcgaaaccccgactatactaaaaatacaaaaattagctgggcgtggtggcaggtgcctgtaatcccaggtactcaggaggctgaggcaggagaatcacttaaacctgggaggtggaggttgcagtgagccgagattgcgccactgcactccagccgggcgacagagcgagaccctgtctcaaaacaaacaaacaaaaaaacaaaaaacaaaagaaaagcagaatctcaggcctcaccccaaacctacataaccaggatctgcattttaacaagattccccaggtgatctggctacacagtaaactttgagatgttctgcctcatagctcttttaaacagagggaggagaaaacagaaactgataaaaacacaccctttaaacagggcttcacactaaagagctccaaaaggtatatgtcataatgtttcatttcaggactctggtgcttttaccaatgtttaaattttttgttttcatttttgtcttgaggatcttatggcccactagcttgagctcccctttccttgagaagaaaagctccctttgtcctttgagttgacctctttggcactgatttttttctttctgtctctagaggggctttgactccccagttcagcattttatcataaggtggtcagagagccaatacctgacaaagtcctactctgacggactttcacagctggcgagtgaataaaccctctctcctaaaagacaatgggattctctatctacagccaaatttgttctaattagctggctctcagctttgcaggggcaagtcttctggaggttaataatgctattttgagcatacctgtatctcgcctgttaatgaacatgatgatgtcagcataaaatagtttcattccacaaagaaagactttatccccattccctgtctcatgtctccattctggacttgcttgtttttacttaaattatgttcaaatcacacttccattagtgttaatttggtggcttttgcaatgttttttcattctttacctaacaggtgatttcttctttgcttagcccggatggagacatttgttttgttcagcaatgtcttttgattattggcctaaataaaagagcaatgtttcatgcccggtgcttaaatttttgcttgaagtgtgtcaggacagagcatctttggcagatatttatctagcattggtttaaggaaaactaggctttttcaaacctgtgctatctgaatgctgtttgattcttgactctcataaaggacatcttaactttacctactggtaagatatggaaaaaatactatgtgactgctaaggatctggaagccatgaaaatttaattgctagttaaaaattttaggcagctttctgtaggatcagacccgacatttagatgttttgataaatataacattaattaagatactgcaatccttccatactggctaagtagcccttggagtaatcacccctccactaccactggctgccattcccactataccctgtctcctcacccctgctgcaggaaccactccttcctcccaacatcaacaccaccatttcaccagaacccagcactaaagaataaatgtctggcctagcagaagccttcaggactcagctctaatgctagtgcccctgtggctggcttgacttcaattaagttggcaggtgggtgccctgctgtacaggttgcttaatcttttaaatatcctctttgtgagaattcaatcgtcttgttatgtagctcttgaagaatgtgcaaaacattcagaaaacagtyctcaaatctttgaaagaacgtcctgtttggaatggcaaacataattgtgccgactttgagacagttaagagtatttggtaaccctcctctcaaggatacaatatttcctttcttggaggtgagaaaagagttgagaaactaaattgacttaggagtcaaaattggactcaggtcatttattacataaaactagatttgcctccaaactttgcactatgtttttgtttgtttgttttgagatggagttttgcttttgtcgcccaggctggagtgcgatctcggctcactgcaacctccgcctccccggttgaagcaattctcctgcctcagcctcctgagtagctgggattacaggcgcccaccaacacgcccggaacattttaccatttttagtagagtcggggtttcgccatgttggccaggctggtctctaacttctgacttcatgtgatccgcccgcctcagcctcccaaagtgctgggactacagtgcactgtgttcttaacgtgcctttagattccccagttcctaatatcaggcacacagaaaaacggaggtgagagtgtttcctggcttcctctttgagatgcctttagggccccctagtggctgctttaagacctcaggtttcttaggattcggtctccttgaccctaataaaaaataagagacctttccgaatctcttcagtgacaggtacaataactgtgtggagataaacagataacagttggtttagatagctcattttttttttcatttttcagttctcagcaaaagctgcgctcattctttacaaataacagatatatcactttacatattttattctgcattctcatactatatcgtagcggaaatccttttaagacatttgtatcttggttgtgtcaaaaggctataattcctggtaactacatcctacttcagggtttccatgtatatgtatatacatatttagttgcttggactggggagttgaggagctttacaattttccaacgtaatactttaaacctggggcttgatgtactaaccagaggactcagtatgtggcacatttcagtctgacaacattaatatcatttagagcattagctatgccactgactgcaggcacttgcaaccttgatttgataaaacaaagcttttccacatttaaggtgcttgttgaccaatgcaagtacactttgtgaaatccactaataaggcattatgtcttcaacgtgccttactgaccagcgtgaacattgctagctcccacaccatggtcacatttttctttcttagattccatctagagaatgtactacacttgagtcattataatggagatgtttctttcccggaagcttatcttttagtttctgatgttattcaactatttctccttcgcttgtaaatttcaggtcttttcctttcctcagtcacgttacctttattaatatgctaatgtgctgtaataatgcattttacaccactaatgaagtgaagcaaagcaaaacgtaaaaagaaagtacaaattctccctttaactttacccggttccggggagggggtaggggtgagagaggaggaagagagtaggaaggaaggacattcgggcggcaaaaaaataaaaatgatccccttgttttcagcgcgttctggaacagagctgcacgtcagaggaagaactgagcagccttcgagctaaaagacttggcattaaactttgacactttaatggtctctaggatattagatagtattttttcatataatgttcttctccgacacggtaatggcatcagaaacagaatctgctatgcctgccaacgtgcacggtgaggctcatcgccgcagaggtaagacagcaggaccccagcttcgcagttaacttatcccgaagctccaaagcaaacgtcttttacttcttcgccggggacgctgctgtaccaccgctgcctccctttcgcattctgctgggctcggtcagccgctgagattaggtaaacagcgctccggagccggggcaaagcgggcgctgctgctgctggtgggggtcgttgtttcacgaggctggagggaagggggatgggagaagggtcccagctcggtaaagccaaaggccgagagtgtggttaccgaggcgggagccaggtccggagccaagcaggggccaagcctccgaagcccttgccgccccacccccccagcccgacctcgaggagtggggtcagctgggcaacccaagctcggcggccctttcccgcgcgccccctccccagcccatccttcccctgccccttccaagaactagggtgggcttcccgctgcctcgctcgagtcctggagagcggagaggcgcgcagagggaaggcaaagacccggcggcccgcccggctggcgagaggtggagacccggggggaaggggaccccagaagccctgggaccgagctgcggaaaaacccgggagctggatcgcgcgcccggagctccggtctccgagtccgagttgtgcagctctcggcgtcctctttctctccctgcctctctgctttcgcctcctctgggtcttctctcgagggcatcctccttccatccattctcacacccccgctcctgtgccccgacccatttcacccacttctcctgtggctcgggaggactctccgtacccccaccctggtccctagaactgggaggctggaagtccattcaagggatgttgcgcgccgggttcttatgccaagagggaaagagcgagaataaaatcagcaggggaggggcgtgttgtgcgtgcatggggtgtgtgtttggggtggaggaaaaagaaatgtagtttcctcagaggaagaggaagccttggacaggattcttggataccgatcccagaaagatgccgtcagagcccttcggcggggctcctcacagactccggctgccccacagcatgcccacctccgagagaagctgcgacccgaggcggggaaacttcctacttctcacgacggctgttttgtgcaatttggggagcaggctgcatggtcctgcaagcctgcgagcctctctaccacggcagctgcgggcccgtcccgcttcccttccccctttttccgcgaggcacgccaagcccgaggcggccgggagccgccggggttgggggaagaagggcggggagctcccagcttgcaccctttcatcccgacccggcccgggatcccggctccgggtgttgcttccgcctgcctgccagccagcgagctgaagaagcaccggggcggagtctcgccggggggcggagcctgtgcgggggcgaactctcggtccgcgcggctgcggcgcttgccattggccggccgctcggtcacggggtcgggggcgggcgccgacgcgggcgccggccccgcccccgctcggaacccagccccggctcgcggtcccccccggctgcacagacatgacacagacacacagtcactgcagctgctgagcgagtccggcgctctgggcacgcggaggcggcggggccagcccggagcccggaccccagcgcccgcccctgccggttcccgcgcggcggcccactcctggccgggcgcgggaggcggggatcgcgcgccggctccggccagcggcgcccggctgcccgcggcggctgcagcggccgcccagctccgagcgccgggcgctccgggaagccggcgcatctcggaggcggcggcggcggccaaggccggcgagcgctcccggcggcgggggccgcccgcctcggctccccgcacccaccgcgccgcgatccactcgccgcgcctccgctcccgtgaccttcccggggcgcctcccctagccccgcgcccccggccccgcgccccaggccggggcgaggccttttccggcgcttctttcccgcggagccgcgggcgggcggcgcaggccctgggggagagcgcgccgcggccggttgcagccccccccgcgccgccgcgttcggcgcccggcccggccagtctgctcctgccccgccgccgcgccggagcccgggcgcccgaagctgggggcgcggccgcgctcgtctcgccgggctgttcgcgggcaggccctgccctgaagggacgaatcggcttggagcgcgggaggtggagtcggccccggcggtcgctccctggacccaacccgaggctgacccaggcccctgcccatgcggggcgcccctggctcggaagagtcccccgggccgggagcagctccaggcagcggccccggaggaagaggaagaagggacagtgctcagcttgggggacccggaccctcgccgcggcatttggagccgggggcagtcccgaactctgtgcttggcaccgccgctccgagtagggcagcgcctgccgggacyctgacccggaccccctgcgcctcgtaggcggcggcgccgccgcgccaccctgttcttccgtgtctccctctgcctggcggcagtcacggccaaggtaagagccccggagcgcgagagtcgccgcgggggcgccgtggtgtgtagcgccggacaagttctccgaacctgtggctggtaccccctgtactcgggatgccggcggggaggccgggcacaccctctgctgccccggccgggagccctggagaggctggaggtggaagcccccagtctccgaagtccccaggaccccctcagggcctgctcggcttctgggcacacaggctgctggcagggagcgagccaggaggagtttctggttaacaccacgagggcatgtgaccgatacccgcacccccggccctcttgttagcggtgagcacctgtggttcgcggagcctgccgtgtttggagagggccctgttgggcggtacgcaactacctttcgtggtgtgatgctrtgaataacttttcttgttccttcttgcagacagtcctgcgcaatttgggggcgagcagccacagcttgcgagtccctctttaggacagagtggttggtkggcattgctatctgtaggggggaagcccagccagcatgtccttcctgttagtcamagctgcttgtgaggagtgatcagtgtatagctatccagacattcttgtaaatgtcactgcttttgaagttttggagtgaggactccaaagtttgtgtatcctcaagttattttgttcattgccttatcstcttttaaatgttcctcttaaggaacctcagttgtacaagcctgtccttgcctgtttgaaatttattaaacctgtgagcttcccccagaacaatctgattttaaatgggtcacttcggagggaacagattgtctcttgcacactgaatccatcccttgggtgaccctgtttaatggggttggactcttttttttttttttttcgtctctgtgctgatgtgcctcggttgagcaggtttctgctgaattcagaatccgtgaattttgtcactcagtccattaaaatgatctcctgagggagcaaaatagcagcttacatttttcgtgaatgtcactggaagttttacagggtcttatgtaagtgcccagagagagagagaggagggagtggggggagatcaggctcctgcttccttcaaggggagaaacggagggggtggcaggtgggggygtccgcctccctgacatgcagatgcctttcttctctgacacaggtgtggagacctgaagtgcttatcattccgtggaggcagtcacctcgggttaatttttcttctcacttctcctgtcttcccacctcaggagtcagctttgatagacttaagataaggaaagcttctaaattaagaagggaacaagtggtggtggtttcttctcccatccctcacaaatgggtgacatgaatgaattactcastggcacgcttggtcctccctaggggtaaaaataaaagaaataaaaacgccagctttaagatttcacacatctcttagtgtacctttattgttcaagagtactttagtgaaaattgcttgtggagaacacatttatcgagcctgtccctgttaattccataccaggaagaaaactcactcgaacagagaggcaaaaatcaccaagatttagaggttagtgggttttcaagagtggcgaggaaaggaatcaaatccccctggcaggagagagaggtttttaacgggaagatcggattgctctggagtgagcagtagctgctgacaagtgtgggccctcctgcttcacttaatgaagtgtgctggggtgtggattaactttttgatgtgagccaatgcagattcctttggcttttaaaccatacctggaagggccttagaaatgaaatgaaaggwttttttcatctcatcgtaggtctyggaagtgcttccatctcttgggaaggttgtgacgaaggtttcctttgtttctgggttcctgagctgcgctttaaagttgatgcacagtgcagggagggtgcgtcctgtagtgtcgccatccttcagccacctacagtagcaggacactaggggggactagttatcttttccaccatcgaagaagaaaacaccagggcccatgttactgtggtttatcttgagggttcatgagcctgtggtttatgttgagggttcgtgagactgtggtttatcttgagggttcctgagatgaactttttgggatctagtacatgcttgcactagtgagtggattctgagtgcctaagggatgggcctgctcacatctaaattgtcatttggacaactcagaaccagttaactgcaaaatgttatgtgacattctgaaaagactcagttataatctctaagtatttaaggactacaaaaaggctctatcctttgaatattagaccatcctaactttaagttccctaacagtttgtaatcaacacttttggtgtttggtttttgactgcatattccctgcagtcatcataaaatcacatggcttcaaaatgtctctgcagtggactccatcaaacttaaaattccccttaaaaatacattccgtatacttagagatgttaacataacatttgacggtgtagttgcacttccacctcagacgctgtctgcacttttaatagtatgaaatcattaatgtccacagcccttccagcagaattggaagataattctacttccctgaagaacactgactgccccattgcctaggtttacccaagtagctaagtcttatcaaagctgatcccagaggtgggagtagcggggagacaggaaagatgcaaggtagaggccaagaagagcctgcttagtttagaatactgtcacaaaaacaggcagatatcaccaagatgttggtcacactggattctaaaaggcccagttcagcatgtagagttagactctgtttgaaacctgtgaacccacctgagttattacttttcccttgaactctggggtctggtagacggcatttgtgaccctttacccatacgtgtagtgcacatttaggtagttgaaggggagctattgttgtggtctaggaaaaatggtcagcagamagctttatttctaacattaagactttatagattgattctcttgggcacagtacagccaaggggtaagagattggaacaggaaaataccatcgcatttgccattgagcaccaacgattgaagaccgatcctgtggagaatatatgctgtcatcctgagacatgaatgaagtcttatgaatttgatggaagccaggtggcagaagtagaggcaggaggctggccttccttacggtccgtgaacaagatgaaggtgtctttttggctagagattctcagaaaggaggagcatactgcattgggggtgggggatataagacccaaaaggctgagagctctagacaccctgccactgacacacctcggggatacagccaccttggaaaatctgcttagtgttggtgaggtcgctctacatggagtatttgccattgagaggtgttcrgcatttctctgtcacattggcgtatggagagtagcaggcagcaacgagtgaaaggcttcgttaaatgtattttataagacttttcatcttttcgtttaacaaataataatmgaccatctaccctgtggcaggtgccatgctctgtgtggaggttacagagtcaggttacatttagcttctagtcttttatgggaggcagacattcagctatttgtttgtttgtttgttttttcttttttttttgagatggagtcttgctctgtcagccaggctagagtgcagtggcatgatcttagctcactgcaacctccgcctcccgggttcaagcaattctcctgcctcagcctcccgagtagctgggattacaggcgcccgcccccaygcccggctaatttttgtatttttagtagaggcggggtttcaccatcttcgccaggctggtctagaactcctgaccttgtgatccacctgtctcggcctcccaaagtgctgggattacaggtgtgagccaccgtgcccgggccagacattcaactattattaccaggtaagtactatcctgcagacttgttcaagggatgagtttgaacttcccaggagagtagggaggaaggggatcacaggcagaaagaacagcatggaaaccctaaagtatctattgtggtgtgtatggagaatagtcatagttagtgtggctggaaggtgggatgtgcccgaagagggaaacgcggtgttagaagagaaataatttaataagattccatgctgaggactgtgcccccgcttcttgctctgtgtattcaaatagtggcaagaatggttgcgagataaaatctgagcatgctaactggttatcccacattgttattaaaaacagaaaattttttcttttgtccgttatcattctacgtacagcattttgcctattctttaaaaaactattagcaatgcaaataaagaaagggtcccttatcaaccctaagtctgccctcttgtgtacatgaattacacctggcactttcattatgtcattatgcagcagtgggaaaaatgacaatgttacttgacaaatgatataatatgaaaaaaaaaacacttaggtgagaacaaattccattttatcagatatgctctgggtagagttatggttgtgtttaacacctgaacaagattcatattatgatcatttcagttctagtctaaacttcctttgctgttagaaaagaaagagttttgaatattgagaatgggagggtaggtgggcatgtgtgcatatgtgtgtttcttgggatgaggaaactatggtgaggaagagcaagcaacagtgtaactgcctgaaggatattagatagagaatgtggaaaatcacagttgtaaaagcagtctccagggccaggtatatttagtatagtttttagaaacagcagccagaaggataatgggaataaaagttagaagcctctctctctctctctctctctctctgtgtgtgtgtgtgtgtgtgtgtgtgtgtgtgttgtgtttgtatgtttgtcttgtctctatcatccatccctatgttgattgggagacaggatgctttaatcaagccccaggggatcaggggtttagtcttacagcatcctgtgctaacttgctgtgtgaccttagaatatttcttggcatctctgggcttcaggcgctgtctctatacattagtgtgttactgatcttgtaagtaggaatttagaggcccagggagggaaagggcttgcttcagtcagttagcttagcctctacactgagcactctttaggttgtctagttttctccttcttaaatggaaagaaagaggcctgaccagttcataggtgcactcttccttgaaatataaagcactgcaaatacacaaggctgaagaaaagaatcacaaagtctttgtgattggtcatagccattttcataaagcagcagccagacttgccagctaacttattacctatggtggaaacccgttagttctgaaatgttacactgttctttgaccactatttgagaattaagtgctttgtgattaaaaacaacagcaacaatgctgaatcttgtaattatttcataattaagtaaataaaagctgaggtgacctctccggattttgcaaagccctgaatgtaacttggaaggggaaacccattcatttggcctgaacgggagattaccttgtaggggagctgctgggtgaatatcaaaggtcttttgaagaaaaacagagtagaagagcaattgggtagatacacaagtcaggaaaaatgcaaagtgacttagtttgatgcctccaaatgtgtgagttgctagaaagagggctcctcactatggctgatctcctgggggtagaggaaagaggagatctgaagtaagtgcagtgtaaatagaaggtttgttacattcttatttgggagttgaagccaagtggaggagtgctgtattttaggagaagtgggcatataaaatgtgatcttaaaactaaataatttgagataagttaattgcagtacaaaaagatttttaccttactaaagggattcatagtgagtctccttttaatagctaattccgttattatatttcaaattatttgatgaacacaatcatgatagacccttttgggagcctcacctgttatgcaaaaccaaggacttttcggttgggcacagtggctcacccctgtaatcccagcactttgggaagccgaggcaggtggatcacgaagtcaagagattgagaccatcctggccaatatggtgaaaccccgtgtctactaaaaatacaaaaaaaaaaattagctgggcatggtggcgcgtgcctgtagtcccagctactcgggaggctgaggtaggagaatggctcgaacctgtgaggcagaggttgcagtgagttgagatgccgccactgcactccagcctggggaaagagcaagactccttctcaaaaacaaaaagcaaacaaaaaaaacaccaaagacttctcaaacataaacgaatgttttaacaaataacccgctaggagcctaatattcaactgtattgcagaaagcagtacagtggttatgtaaactgtcattaccgctaacctaacacatggagttacatcacttacttacttttggcagattacttatttaactactgttctgcctggagataacagtactcacctacccaccttcataagttccttaaccacccgcacattctacctctaagaatatatcaagaacaaaagtggtttaaaaagtaaattaggtaagagtttccaggattctgagtttttataattgcagagacatggaattcattttgttctgcttgagtatacaggagaggcggtgtgtatgagacattaaaaaatatcaaaatcaggccgggcttggtggctcacgcctgtaatcccagaattttgggaggccgaggtggagggatcacctgaggtcaggagttcgagaccagcctggccaacattgtgaaaccctgtctctactaaaaaatacaaaaattagccgggcgtggtggcgcacgcctgtaatcccagctactcgggaggctgasgcaggagagtcacttgaactccagagacggaggttacagtgagccgagatcacagccattgcgctccagcctggaaacagtgagacttcgtctcaaaaaaaaaaaaaacatgcttgtctgctggttcttccttcactgtaacagaaatatctagggctttttttttttttcattgttgttcttcctttatctcttatgaggctttccaaaaaagattttgttctaggaatggaataaactgtagggcgtttaaggcttcaraggtaattttgggcaacctggagttgcaggtaatcacaggctggggctggaattgaaaatgcagtctcacccataatttgagcctcttttgtcgcattatggggctgtgccttggacaggcagcagacgcagatggagatggaaccctgactactgagagagctttgcttttaacatagtccttttctgaattaccaaggccaattgggaagaaaggacttgccgatctttccagctctccatggtagccatagaatttaggaagatttacagcagaacgtgggcatctagggatttctttcttccttttcttttttttaaattttaaattcagaagggaatcttgggctcttgagtgttattctgtggttagggattgctgcggcttccttggatacattaaatgcatatttgttattattgagtaaggttaaccttgctgcggctaactcgaagccatcccctccccttttgtttttagaacagttgcgtagatccttcatgtgccaacactgtttgtttaagagccttcttgactgatgtcagctctcatctggaaatggcattttgtggttgtttcagaagccaagggaggcatagaggcaagcccataggccggtggggctttacctttcttcaggagtggtgctggtgcttagtaggtctgcagttagtaagtagttgtgtccacactgaatgatttgttttgtgaatgaatggtcatgttttcattactggggtggaggtgatgcgggagggagaggtgggtgagtaacagtagacttaaatggtgatgagrtagacttgagctcctcaaggcgtctcctagcagcttttgttttaaaaatgtgaaggatatttcagatcagcagaatgaattctctgaaggatcattgttgtggttcaaacattgatggctttgtaaaaaggcaaggagagtacaataccgaaatgcgtgctttctttcctccgagtttgtagggattttaacttatctggaatgagaagaatggacatgctgtaaagcttgttcacatttacatgacaagttgccttgaaaatgcctggaaagacattttcaatatgagaaactttaggatggttgttgtccagcatggatgacgatgattatgaaatgacttaggtgtagaccggcgctcccatgtcaggaggatgaagtggacgtgggagaatggagggagggactcagtacttggtccccagcaggaagaactctcctcgaccatattggtgtctttacccatttcccaatatgactccctctctgctgggtttctcagttacaagagcactctctgatgccttccgtctgtaaggcagagctactgtattgagagactaccaaggctggaagagaccttggagccccactagaccaacaccttcattttacatccgtagaaactaaggccagacctaagggaggtcaagatgattattcagaggggaggtggaaccagaacctaggctccctggtcctcagctctcccttctctgcagcatgctctgcttccatccaatctgcacccaaagcacgttcttccagtgtttcttttgtgccaggcactctctcattcggtcatttttgttatttcattctcacagcaaccctgggagggggatgtgctcactctcccacttcacagatgtggaaactgacgcttgtgcaaggcccacagccatgaagaaggagccaggactcaactcgcagctgttcagactcctcagtttgttgttccaggaccgaccttgcccctggcttccctgcctctctgacctcgctgtatttcctaggactcctctccaggttttctttgttcctagcctactaggcttcacctaaaaatgccacttgttttcmcacttgagtggccttgttacgctgctttttttgctggatccaaccccccatcctctctcttgtctctggctgaaatcgttcctgactgtaggctctgtgacactgtctctttgtggggtttccttcacttgctcagccaacgttgatcaagctcctactgtgtgcaggtcctggcttgacagcggaacacagaggtgcagagttactcatcgtccattcaggagcctcgtcttggtgagggaggaagagtctcgtaaggggatgagtgaaagtcaaagggcccagaggacagtgtgttgggtagcattctgcttgaagaagtcaagatgagaatattagatttgggtcttagtgattaggagatgggaggatagggtaggaggaggcgtcaccaaacagcaaaccaaatcaaaggctgtgcttggccatcttcaactaggcattgtcagtatctacatactttaattcttattccttcacttaggtattagaggctgtgagtacgttacacccatccttatatctatgaaagcaccttgcgaagctcttagtacttacgacccctccactcaacatttattatattaaattcagagcttcctgtccctgccctcgagggacatagttggagagcttgcaaaaaatgtgtcataagttaagcaacaatagaagattaaatgaacagttacgagcaacaatagaaaggaggtagcagtgtagtgaatggatgtgtgcactgtggtggctgaacacggatgggaagtcagaggtgggagcttcctttagcttctcaaactcaaaggaggggtgggacttgagttgggtctttggatacaagacagttaaaatctgaatggaaggattaagggagggtagtttggcaagcacaaatatattttttgggttggagaggaagccagcttgggtttctgttagcaaggagttgcagatgaagttggtgagttaggccgggcgtggtggctcatgcctgtaatcccagcactctgggaggctgaggcgggcgaatcatgaggtcaggagatcgagaccatcttgactaacgcggtgaaaccccgtctctactaaaaatacaaaaaattagctgggcgtggtggcgggcgcctrtagtcccagctactcgggaggctgaggcaggagaatggcgtgaacccggaagtcagagcttgcagtgagccgatatcatgccactgcactcctccagcctggatgacagagcgagactccgtctcaaaaacaaaaacaaaaacaaaaamaaaaaaacaaaagaagaagttggtgagttaggggctgtgggctttgggaaggcagggtgacttttcatcagggggatgtggtgtgctaaaggccctggttttggaaggtgcacctgcatcgtgcctgggacaaattgaagcggggagagatggaggctgggagacagctggacaggattttgtaccagttcatatatgaagttctaagggccgccaggctggaactgttacaggaggacagaagcccagggaggcttgtgaatttttctctgttgaatcactggctcacaaacatttgcttgatatggaagtctgagatggctttcattgcccactgtaatatggccttgttggaataaagtccactcgtgacacaagcagcaagtcttaaaatagcgctttctcctttggcttggcttggggtagagctttggtgaaaatacacttttcggggcctctcttattgggggtttgttcaaatgggctcagggttatagaacaacctttttcctagccttggatggcacccaataaggggtataatagagaaaattcttcttttcctcatgagtggctcctaaagcagctgcgtggagctgagagcaaagtgcttggagctctgacatctgggttctggattcaccttaaaagtgaagccaatttctttgcttcctgtgacggctggtgtttctctgtctgaggaggagcttgctttgagattacggtacacacttttcagcattgtggggtaagccattctggataacagaatttctcaaataggataatccaatcccttacagacagcaagtctttatttttaatckttaaggaatgagggtttctctaggatgttctgtgtacttaccctcactggctcaccatcagcccctggaaaacttcagctgtcatattgggacgcacaaagcttgttatgaaccagccctgcctttctctgcagtctcaccccccacccctggccaccccccatttcatgcatcatcaatctgtaacttaatcattttcttctttactgatttttttccccctagacctgtcaagctgtgcacatacccctcctgcccggtaagctctttccttctttatctgcctgggacacttgtgtttttccttcagaacccagctcaggtagtcctgcctcttaagcttttcctggtactgagcactgaaccgcatctgcacctcagtctgacttctgcagctgcactttctgcgccgtaacctgactgttttgctagagagcgggagcctttcagtaaaactgcatctcaggggatcttctaggttttaccgtatgcctggaacatgcagtcaatacaataaatggttgttgttgtcgttttagatttcagtgaatttgctggccaggcataatgtaaccctttctgatgaaacctcgagtgtcatactgtgctgcagtggtrgatgggttgatgtgaattagcctctcaaagtattccggaatctaaagaaaaccttccccctctcaccaatgaccagaatggccattgggcattcctggggtacactgatgccttcaggaaatctggtggtgctggtgaggtagaatgcatcttaktcatcactgcagacctagaaatgtcttcacacaggccgggcacggtggcttacgcctggaatcccagcactttgggaggccgaggcgggtggatcacgaggtcaggagattgagaccatcctggctaacatggtgaaacccggtctctactaaaaatacaaaaaaaaattagccgggcgtggtggcgggcgcctgtagtcccacctactcaggaggctcaggaggctcaggaggctcaggaggctgaggcaggagaatggtgtgaacccgggaggcggaggttgcagtgagccgagatcgcgccactgcgctactccagcctgggtgacagagcgagactctgtctcaaaaaaaaaaaaagaaatgtcttcacacaagctctcaagggctgagtattgaagtggaggattagcaggtaggaggacttgaagaaccttgtaccttttatgtttaatagtattccccatttaaagagccagatgcagaatggcagtcataattgatggagaaattatcagacggtgatggggactggctaggkaggatcgaataaatttgtacaggagcttagcagcagtgcctaaagactcttctccacataaccacatgtttatgttagaatatttagtattgcctctagtattcgtgaggtccatttgggtttttatggcactgcccttgtaagccaggcgtgagtgctgcatgaataggtttgcttagcaaatcacagaggagtgacagaggagccctgggcttatcagaaggtttgtgtgatccaggcactagcaaaactttatgaacttgcacttggcacgtggtgttggttatatggttcaggaagccctactgcttctccagtagtggtctgatttaatccataccaaggggtgcttgttctgggtcttagcttttgccattttcctttttcttctgcttggaattatctataactcctttggaaatacagcatttttgagctcattaaatttgttaatgtgtgtattatgttgagaaagcactcagttatttagagttgcttcattccctttcccttcatctctttgccttccccaccttagagtaattgtgcttggttaaccaggaaaccaagggctcctggggatgaagaagaggccagtctttctcttcttagccctgtccagagatctcagaaaatttgcagaggccctgaaggtaaaagcaaatggttgcccactaatcacctgaggcagtttttcaggagttttctgtctaccttgcacttttctctcataggaaatttgggctctgacagttaagagagatggcagccaatgaatgggataggaaaggccccttccttagcagtttgtaagaaaaggtactgaggtgtgctttacaagtattatgccttttgacagctctctaagctgagtagtttcattttacagctaaggaaactgaggcttggagaggttatttgctcaagcaataaagcccagagactggaaatgaattttgttttcagaatatttgcttttaatctctgtcctataatccaacaacccaggtgtcctaatactggaaatatacatacccctgggaaatacatgaagacttttcatggagtatgcagatgtggatacttctaagaaaataaattttcacatctccagcctcacatatgtgcccttccctgaaattgatcagcctgagatgatccctgtctggtccacggttctcccaatcctcctttcatggttatcctccctcattttgtttatttttatttttatttaattaatcaatttatttatttttgagacagagtctcgctccgttgcccaggccggagtgcagtggcgcaatctcggctcactgcaacctccgcctcccaggtttaagcaattctcctgtctcagcctcctgagtagctgggactacaggcgcctgccaccacgtctggctaatttttgtatttttagtagagatggggtttcaccttgttggtcacgctggtctcgaactcctgacctcaggtgatacaccctcctcagcctcccaaactgctgggattacaggtatgagccactgcaccaggccctgtcctccctcattttataaaggcacatctcttagccagaactagtcttattctggcatgttgctctgggtatgaaaatctcaagggtcacctaacaaagggactatttgaaattggtatgttgaggtccttctaatcacagcaatgccacatggttgcctctttcccttttgtcttttacgtgttgaaacttggtgccagaaacagggcatttaagcccctttctcatgtgagagaataatataacattttcagttcttaaaaaataacttgctgttggatttttaaaatgaatgatggctatcagattgctagattccatttaaaactgtgatgtgaaagttttattttaaaatgttaatgtttacaatatgctgaaaattgtatccttagaaattgtgtagttgaggatgaaaactttatgtcagcctaaaaataggcacggcagtacaagtttttcaaatttcagaattcaagggcccaggcatggtggctcatgcctattatctcagcacactgagaggccaaggtgggaggatcgcttgagcctaagagttcgagaccagccctggcaacgtagtgaaaccccatctgtataaaaaacagttaaaaaaaatcagctgggcatcctggtgcatgcctgtggtcccatctactcaggagactgggaggtggattccttgtgcccaggaagttgagggtacagtgagccctggtcacgccattgcactccagtctgggtgacagagcaagatgctgtctcaaaaaaaaaaaaaaaaaaaaaggaattaaaaaaaaaaaacttaaatacctctgtactattctgtctcagatactgaagtttggagtgggtaatttttaagttgatttctgccatagacccttatacacctgaatatttttttccataaaatttaaaggacatcagtatttcctaaagctcatacattgccctcctgattaagcacacttgaaattctgttgggtttcaggataatgtaaacatcctttaaatgttgatgaaacttttacacatgtagctagtcatgtgatcgtgtatgccagagtgcctcaatggctcactgaggactgtttcaggtmcaaattatagaaacctaactcatagtgatgttaaataaccattccactttatcttcttaagtgactgaagacccgagggcagcgtcaggcagggctggatctaagtcctcgaacagcgtcaccgactctactgccccacgcctggctctgccttcttctgtattggcttggttctcaggcakcctgtccccatgggatgccaggagccctgggtgcacatctgacttgccccaccatcgtagctgagggaaagcatctttttcccagtacatctggcaaaagtcctggttgtggccaggcgcggtggctcatacctgtaatcctagcactttgggaggccgaggcggggggaccacgaggtcaggagattgagactgacctggccaacatggtgaaaccctgtctctactaaaaatacaaaaattagccaagcgtggtggcacacgcctgtaatcccagctactcaggaggctgaggcaggagaatcacttgaaccagggagtcggaggttgcagtgagcccagcctggcgacagaatgagactccatctcaaaagaaagcccatgttgtaatctggttggaagaacctccaccacatccccggagctggtaggaggaagtcagtcctatttgaattgcttgaagagtggggaaggagtcattctaggagagaagctgggtagacagaatggccgaaaatattcagtaggaagattaatctgaagatctagaagtcatacaaaagagaccacaggtctctataaaaccttttgactgtcctgtgtgtacttcccctaccagcgccagtcaacactttccctgctaggatactcatccgcccattgacacagtggtgtcagtgataccttctattccctgcatcagtcatttcaagactttttttgttttgttttgttttttggagatggagtctcgctctgtcaccaggctagggtgyagtggtgcgatcttggttcactgcaacctcctcctcccaggttcaagtgattctcctgcctcagcctcccaagtagctgggatcacaggcgcccaccaccatgcccagctaatttttgtattttcagtagagacagggtttcaccatgttggccaggctggtctcgatctcttgacctcgtgatccgcctgccttggcctcccaaagtgctgagattacaggcgtgagccaccgcgcctggccaatttcaagacttttaaggacacggtgaagaatctctgacaatgtgttttgccattctttttttttttaactgttatgtgattttatttattttttaaaaaaattcagaatggtggaattccatctattttagtttgccagggtggccataacaaagtaccatagactgtggagcttaaataatattaatgtattttctcactgtcctagaggctggaagtctgagatcagggtgttggcaaaagcctctccctttggcttatatgtggctgtcttttcctgctgttttcatatggtctcccctctgcgtgtgtctgtgctctaatctcttcctgttattaggacatcagtcatagtagattagggcccaccctaatgacctcattttaacttaattacctttttattttttgagatggagtttcgctcttgttgcctgggctgcagtgcaatggcttgatctcggctcagtgcaacctccgcctcccgggttcaagcgtgtctcctccctcagcctcccgagtagctgggattacaggcactcgccactgtgcccagctaatttttgtatttttagtagagacaagstttcgccatgttagccaggctggtcttgaacccctgaccttagaagatccaccagccttggccttccaaagtgctgggattacagacataagccactgcgcccagccttaatcacctttttaaagaccccgtcactaaatacggtcacattttgaggttctgggggttagaacttcaacatacgaagttgggggaggggatgtaattcagcctataacatcatctgttgttttaatgctgtgaatgggttgtattttgaaaaacatgtacatatcttgtttgaaacacaaattagtaacagattcacctaggcagtgcagactgtttcagggatggttaagtttgatgtagagtttattattcgggtactgctttccctttaataggagtagagagaagacaaaacgtacagatgagaactggttgtggatttgcgaaaaatgcttggggttggatagtgagaatctggacctttcacctccctaggctcagtgctgccgtgttggaattgtagcattgtccttgcaattgacagcttctctgcgatactctgagggtggacttgggttgtgaaatgagttttatgactttttggggaatgggatgggtggctgccctaaggcaggactctgtctttgagaccaacagctcatcctattcttcccactggagcagtggattggccaagagctctgctgggcacgccagcactcccgtgtgtgagagagtcttgtcgtcttgtttttttgtgtgtcttacggaccaaagttttcaagtgtggggttttatgagtccatttggcccacgtcgtaaaagtgccactgttgtgttggaatgatttctgttcattctcagagctaatctttaaggttctgcctgtgacaaacctgttcatcgttccactttatcaagaagttgtcattgttctcgctcttgcactaattactgttttaatgtggcttgtgtgttcattgtctggtctgtctctgtttagaatgaaacatcacagccaaaaagatgtggggagtaggtagcagctttcaaattgtagtcttttcacattagaacccaaaaatccgcttcccaaattttgcttgcctgcaaaccagaaatttcagtacaattttagaaagccatttgctatacgatgtggttaaagtatgcatatgttcaggttgagggcctgaataagtcatccatgtatcatcacccctttatctgccaacatcgattgtgttaactgattggaagattgtcatttcaacattttaatttaattttttatagagatgctatctcactctgttgcccaggctggagtgcagtggtgtgatcctagctcactgcagccttgaactcctgggcttaagcgattctcccacctcagcctctcyagtagctaggactgcaggcatgtgccacctcacccaactaattaggggattgtctttatggaagacatttcacagtgtctgagagagtaggacataggatcaagaagttttggcagaacatggtttattgttatttccatgctaatatttcctggctccccttgggtaaggtgcttactttctttgcattcatttcctatggcagccgtaacaatgtaccacgtgctgaatgacctaaaacaacagacattaattgtctcacagttctggaggccagaagtccaaagccaaggtgtctggaggagtcagcaggaccacactccctctccagtggctctcggtgagaacccttctggttctcactagcttctggtgattgctggcaattcctggtgatccctggctggtagacatgtccctccagtcacatagctattttcttcttgtgtgtcttcacattgtcttccctctgtacatgtctctgtgtgcaaacaaccccccctccctttttttctgagacagagtttcactagtgtcacccaggttagagtgcagtagcgcgatctcggctcactgcaacctctgtctcccgggttcaagcgattctcctgcctcagcctcccgagtaggtgggattacaggcgtgtgtcaccatgcccagctaatttttgtatttttagtagagacggggtttcgccatgttgggcaagctagtcttgaactcctcacctcaggtgatctgcctgcctcggcctcccaaagtgctgggattacaggcgtgagccactgcgcccagccaacttccyctttttataaggacagcagttatattggattaagttccacctaatgacctcattttaacttgattatctctgtaaaggccctatttccaatgaaggtcacaatttgaggtaccaggggttaggacttcctcatgtcttttgggggattatttcaacccttaatactgtctgagcttcatttttttctcctctgtgaaacaaggtctgtcatctgttctcgcctttaatgtaaggatcaaacacaagttaatgagaaagcaatctagaaatcgtatcccctgagtgatggccggatgcccgttggacattagaggctcttcattccaagcamgtgacatctaatgagcatttgggtctgacacgtgatgtggtctgtgagaattttcaattgtaagtcctttggaggtaagaatgttgtacctgagctgtgtgtttggtggaaacgtagagtgagccggggctgggcttgcaagggggagcaccacccgggagctgagctgcatcttcttagacgtcaggactgctgtgttcctccttgtcctgacttgcaggccagtgactgctgccctgtggtrcaatttgagtgtaaatcctgagatatctgttccaactcctgaatctttcatggagagtgtgggaatgtattctggtkttttggtttgttttcatgagctgtattttgatattcaacagaggttcacttggggcagaggctaagaatgttttcagactgcatttctcttttgtttcttcctaataacttgcaatggttaggggaaaaagctacaaaacaaataagccaaaaacaaccctccaaacccacacactgacatttaaaggatttgtgccttttacttgcatttacttacarcattgtacagattgctgtctgaatatatacatctggatgtattctttgagatgcccaaagcactgcagaagtctcacttctttgttaaatagatttwcatgttattcccatcaattggatcagaatttctgagggctgctggtcatcgatgttgctttgctcagattcattccttcatttgctgattcactgaacacacagttgttgaccctctgttatatgccaagcactgtactgggcacagtgagggggcgggtgaggaggagaacaagacaaagtcccagtccctgcttgcttggaactctcattctgtgtggcttggttcattgtgagcagattaggttggcccttggctgtcatgcttccaggcaaagctatcccttttgtcacttgccacctgcagttctgrgctaaaaactaccatatgtataactcctcttggtatttattggtttgttacatcmaattttgcaaagcctgatgcattgtttggttagaaggaatcctctattctactcccaagaggccgctcaacaggctttgatgatccgttaaacccagttccatttttgacatgggagagcctgtaacttttttgcctgttttgattttgagtcctttatagggtattttgagagttgggcaccatcaggcgggtttgatgtcagtgyctcacaggtgggcgatgaagttctgggatcaattttgttatatggccgccttgtacagtgccacactggaagcttacattgcaagacatgttcttttcatggcgagattgagatgtggtaattgaaatgggaatggctgaaaggaatactgatgtctccatactgcagggaggggtccaaagccatcttgctgaagagcagcaggggtttgtggtcctgttcacttctgatagggagcagcataaatagcacatcctgtcacttcccgatggatacagttgcgtgaggacttgtttataatgaatggtcctggaaaacaacatctcagggaatgaggaggcaggagggaacatttctgcagggataggagaaggaggaactggtagaagatgtcatgragaattgcataatgggttggttttatcttaagaagaatctttttgtttgtttgtttgtttttgaaatggagttttgctctcgttgcccaggctggagtgcaatggcacaatctcggctcaccacaacctccacctcccgggttcaagcgattcttctgcctcagtctctggagtagctgggattacaggcatgtgccaccacgcccagctaattttctatttttagtagagaaagagtttccccatgttggccaggctggtcttgaacttccaacctcaggcgatccgcctgcctcggcctcccaaagtgctgggattatagacgttgagccactgtgctcggccagtcttaagaagaatcttgtaatgatcttgtggaaggagaggaggaaataaaagtagggttacgtggtgtaaagtgctttgcactccctctgcatctcatggaaatgcagaacttttgggctcccaagagggatgtggaccaatgggatgccttagtttgtggatggggggcggggcacttgggcccagatcaagggaaccgtgtaggctcacaccaagttaatgataaaattcaggccacttgacttccaaccttttattttctccctcaagcccaggctgtcttccgcatcattcaggagctcttttaagcctggctcaagctttcttggggcctgtgggccgccaaagaaactgcatagtcctcttggtaattgttgggtaccttttgggtggctacagctgtggccacgtgtatgctgaaaggagtgacaggactgggtctcttgttttttaaacagggtctcattgctacaatcattgaatgtattttttaaagatgaatataaaacagctaccctcccaagcaaatcataaaacaaattatgcccttgccacccagaactacagagaaacagcaggcacttcgtggcacagagagtaatggctgcaatattaaaacaatgatgggaaaaccaggatccaatagctgaaagcagggaggaaaacagcctcgtaatcccccagggataatgggtctcaccgacaggtccctgtgatttattgtgcttaatgtacttatttttatttgtccccttcaacacggagctttgtcactgaagagatttgataatggcctgtttgcagtcacttagactctcgtaataaagcgccacattttggctgtctgtaggttccgctggcttcattggcattccccctctgatttcaccttcactggctgagctgggatagatctagataagggctgcctcccttgcgtrttcccgtcatgctgccctgtcctgacttctgcctgatagccagccttactaggtggctctccaggcccagcttgcctcctgctttcgttttatgctactttgggaccacaggaaggaaccccttattctgcctgaaataatartggatccctgggacttttatctttgtagaccaccaatgagagtttactgcttgcagctttttgggtgagcaaaaataaaagcggaggagtaggtatgtggggtttttgcaaaagaatgggcttgatttaaaggctgtagtgccttctgaatgtggtagccagctgctttgcaaagaagggtgtgtgggattcaacagttgtgagtgagtcaacctgaggctttcatttcagcttcttcctgggctttgaaggaagggaggtagaagctctccagggagctccacaaaggaggcatgactggcctccttcctgcaaaactgtccctgatctgctaacgttggggtgaagaaatccaggaagtgagagacaggggcgataaccagaaaagcagcttcaactgttttccagggcagcatgtgtgtttcctctctttgaggacctctctctgataccccaccatcaggtctggtcggcggggaaggttctgtgctgggttgcatctgacacttggcccctgtagcacagctgggggagagcattgctttcattctgaatactgagagagaacgagtgagtatctaattacggaaaactcaaatagtgtaactgaaaaagactcctttaaaatgtaggagcagcagcaaaagtcaagcacaccaggggtgggagccgggagtggaagggatcagtgtcgctaggcctcagtagatggagtgctgtggacactgtgaagtttgaacattctagcaaggtgacggcatcattgagggagagatggtgctaacaataggacgttgctctcagtcacttgggcaccttttactttcctatgcctctgtcaaaagttttaacaggctcccaagccactggaccccagtacacggtacactttggcctcaaatgtgcccctggtaccttaagatctagcagttctgctgagtatatacccaaaagagttgaaagcacagttctaaagagatatttgcatactcatgttcatagcagcgtcattcacaatagccagaatgtggaagccacccaggtgttcatcagtggaaaggctaaacaccatgtggtgtagacatacatggaatttattcagccttcaaaaggaaggaagtcctgtcacatgcgacaacatggatgaactttgaggacatgatgctgagttaaatgagtcagtcattaaaaagataaatatttatcattccacctatgtaaagtccctacagtagtcaaatttgtagagacagaaagtaaaatggtggtttccagggactaggggaaggagagaattgggagtgagcttttaagggggagacagtttcagtttgggaagatgaaacagtgctggaggtgggtgttggtaatggttgcacaaaaataggaatgtgtgtgattctaccaaactgttcccttaaaaatgggtaaaattgtaagttttatgtgatgtgtattttactacggtgaaaataaggtatctctggcaggcagactctaagttggccctcatgatcctcatctcctgatctgctcttgtgtggtccctttcacttggggtgtgcaggggacttgtgacttgcttctaataagaccagagcagaggcgaaggatgtcacttcygtgattacatttccttatgtaagaccccatcttcatagcaaacttgccctgaaggatttccttcttggcttgatgaagttggcatgttgggggagcccatgtggcaaggaactgtgggtggctttgaggagcagagrgtgacccctgcccacagccagcaagaaggcaaggacctcaggcacaaggaaatgaattctgccagcacaggagggagcttgcaggtggattcggccccagagctccctggggacaccttggctgtgtagccttatgagattcatgaaycatagacacagctaagccatgcccaggctcacactgagctataggaactgtgaaataatgaatgtgtgctgttttgagccatcaactttgtgacagtttgttacacagcaatagataactaatatgtagcctcccaggagacctgcctgagtccattccatcctagttttctactctggtcacctcaggtctccatctcctcctcttgtcctctgtgagtgggcagatggcctgcttttctgttttctgtttatgctcaagtgcattcatagttagagccaatttgtcctccttgtgccttcctgctctctctggtttccggtttgtgtgtcccatccagagaccgagggtgccaactctgcccacctctgtagaggtgtactctcctccccatcccccacagcacccccacttgcctctccaatataaggctcatgacacaaaatacaggtgatcggtgatcagattttctagggtggctctaattgcaaatattctgccccatttgttatcccattaaaccattaaactgtcccaggcattccactttggtatataagctcttccgggactggctcccatgtgacaaattgagaagtgccactgccattttttgagcacctcctgaatgtcaaatgcttgattcatgattctcattgtgttttcccaacagcctgatgaggtggctgtcatggtgcctgacttacagaggagcacactgagaccaaatgaggttcatttccttgtaygaggtcacacacatgtgtgtgaccttggaccagatatgggtccagacaaggatgagaactccaaagccctgtcctaacttgcctggggccactgccttggaagagcacagtagtttttctgccagctcccatgtcccagttttgtttgaaaaataagagttgctgcacacagaggctacttcgaggtttctgataattcattctgatggacarcagtgggacagtgtcgggtaggggacacagctaaagcctcaaattgaaataagaagaggagacaagggggtcaggaataaggttgcaactggggtagccaccctagtgagtagagtaggggtccacagtgtttctcacctaggatgtgtactagaatcctctggaaagctttaactgatgctgatgtctgggatccacccctagaaatagtgattttaatggtttgtgatgcatcttggggaccaggatcaaaaactccacaggtgakctgcataggcagccaagatttagaacactgggaaggaggcctccatatggtacaggttgaacaggaagtagagaagacacagccttaggataagggcagggcctggaccaacagcacaacctctctccccatctagagggtgaccctgagtgctcatagggtcagcctctagatggggaggggagttgacccttagacttagagcatccaggtctgcagggccgggagcccagtttggggacccagtgaggcctgctcatgcttttcctgtggaatcgatagatttcctgcatcttcagtgccttcaatgcacttctactcaacatgtagtgaaaggggcggaggtgycctgtgagacttgtgacgttcagcgggccytaataataggcctgcatggactgccttttgtctttgcttagagttcatggttaaacgtggggtttgtggtgttcccatgatacctgaataccgcttgatgagagggattagattgcaaacaccttgtgagtggggaacccaatatttgtgtctgctagaatgagtgatatgatggcttacctgtaccacttaagttaatgattgatttcaacagcttttgaaagttgaagcacagaagtcttaaggtcacttcgggaggtgaaaaacttggtgattatcactgtatttaaaattgtggctctccgataactccacacttgccttctttaccctgctctgttttttcctatagcatcaccgtttgttaatatgctgtgcgtttatctgaatgtgagctgatgacggcagggtttctgtctttttgtgtcttaggcatagagaackctcaataaatatttgttgagtgaatggagtaaatggtggcctctactagtgttagtggatccagaaaggacatggaatagtttaagatttattccttggttgagttccaggaggaactgcaggatttactggggtggtgggaagaggaagggggacagtgctgtggatacattttgttttacctacccttttggagctggtgttttctttctcaattaaaatgtattttctttagcggttactttgtaatggaaaatgacacttctgccagttttagtcttttatgtgttctaaacckagtyctttcctcctgctgtggcttcaataatgcatcgtttcataagttcacagaatttaatgtgcttctgctgaacccctagtctcagcyagatagttaaatgaaaattaaccactgtaggttggattcaaagtcacytattcaccttctccctttttaatccccttccctcactccacgtttgcaaagcagtgttgcatttttcttttttgagaaatagggcatgatgtgtgcctgcacacgggctcttgtgtgtgaatgggaatattgatttatttcacaatcagagatccatgaaaaaataacactgtgaacatacacatttttgaaatgctgcctcttccgctgaagtacagtggagtgtagggacctgtagcaaactaatatttaacgagggtgccactgttgtaccacctttagaattyacagtggctgctagtgaaactggcatgtgtcttgacaaggctgtgaaatgtagtcagtcttctttcattcattcatttgttcatttattcagagccagatgatcattttgtatgcatgaagcacctgagtggtggatgtgataggctgattgcatttgtggcctcaaatcttcacacgtttctgatttcctacccaactcctttgacttttgactttaagtttcaccatgtgactagctttggcctgaagtatgaggtggaggggatggtatgccagttttaagcctatgccttaaaagatcttgagcatttctgcttttttgtgtccctgcctttgccacaaagagtgtgccctgccagctgctggtcagaagaagagtaggagaggggagcagagccacgcagccaattcatgggccctcagtgagaaaccaagcccagtctagatcagccaagtcccagctgacctgcaggtgcatgactagaaataagtgatcgttgcctcaagacactggttttgggatggctcattaggtagcattattatgcaacaaatgactgatgtggtgggttgctaacatgattcagacgtgaatcctgtttgaaagaagctttgtagttttgtgagggtggtgagaaggccagracaagattgtgaactctcgtacgtggtagagaaggtacgaaacgtcttaagaaaggactcatggtgagagtggcttttgagaaggcatttttaggtgatgttgtcaaagtcgagaatagaagaactattagactaggatcctatcagactaggattttgagttaaaaatatgtgatatttcaaagttgatttcatcacagccaatgcatcgatgccaattttccrttaaatttctaatgactttgcttttgatgaaccaaaaccagctcttacaacttaaagctacgctgctgtcagagaacatctccgtttgataatagccaacatttacagtgcttatcacaaagaattttacccagcatgtatttggtctatgtactgtgtgccagggatgtgtttgctaagcattttataggtatgatctcatgtaatcctcctcatgatctgaagagttgtaggtactaatgttgggtcaattttccaggtaaattaaccaagccagagaagggtaagttacttgctaaagtcatgcagtaacatcgtattctcattctccttcctgcacctgtctctcctaatagaatggcatcctctcaatacagttttttttttttttttatggctagcacatagcatggtgccttgcacatagttgttgctcaaaaagatgtttttgttcaacaaaaagtgaataartcttttaaaaaggaataatggcttcatccatgtccatatggaagtcatagccagtaaggaaatgaatttctggactaattcatataaaacaaaggggcaagtttagtggtggagatattggaaatttttataggcatttggtagagcacagaggagagcctcttgattcagccttgaaagataacatttctggagctggtgaactctgaaatgactctcaaatgaggggtctgaatgaggcaagggggaagcaaggggcctgcctgttgaggagacgagagttcacagaaccgtatgcagcttcccatatgcacagaaccatatggagcccagggtagcttcggggacaggtagctgctcagttgtaaatgtttgtttttctgagctgttgcatgccttggcgctagggcagtaaatctctgagcagctatgcccagtaaagtcatgaaaacttgagtctctgtagtctcataaccccttatttccacctgcctaatgcttgttgctttagggaaactgaggcagcacccccccgcccccaccccaaaattatgacctcctctgtcctgaacaacctgaggaattgttgcctatgagggctggcttatcacgaagctcatggtccttttgaatagatctgggaattttgcagatataaaataaatttgaaatagcttgttgtagtttaaaccttgacagcattatgtgcagtgattcttggtttttgaaacaatttcttgatgattctcaacttgactcagactccagcatgtacctgtgagattttggtgaagttctgttgcagagttttgagcctcagttttttcatttcttgcagctttttgagcctcagttttttcatttgtgaaacagagataaaatatgcctcctagaattgctgtgcgggttaatttgaaaaaaatatgaagaaaagctcattttttttttaagcaccaactactgtgccaagcactctttttagcctctatatgaatgaattcatttgacattttaaatcctcacataaaaccctaagatggaataaacaggagtgtgagccccgccttgcatctgaggcattgtggagtttggtaacttgcttagggctacagggctgggtaggggagaaactaggatttgaacaccagaattatgcgcttaaccctgaagctgtagtagctctgttcctagaatgtggcaggtrcacatgggtcgctagttcccctctatcttcagaccactgtcgttgttctctcccaggcctgaggagccagtgggccagctgggctgggagggcttggcagggccctggcctggctccccacttatggggggcagaaacctggggcctccctttcagcactgacatggctggtggtttgcatttgcctgtgtgttcctcatctgtctatcccatgaggtttcacactacacaagggcgggggccatttccgttttcctggttcacactgtgtttctggcaccgagcttcacatccttccctcattgaacactcagaaagttatgaatgaatgaatacatttttatttagttctcccctcctctatcttctggtcactccagaccactctccctttaagacccagttcaaatgaccccatccccttgtaggtgcctccgtgagtattgcttgcatctcctttgtttcctgtccatgagcccctccgggaccccctgcaaacaccagacccagagcctgcctccccatgttggatgttcccaatcaatggtcttggcgtgmgttgattgaacagagtccctatttgagaagagcctgacttatgtctctgctagactttagaggggaccaagaataaagggtctatttaaggaaaccattacacaaaatttccagatacgtattattccagctccagaatctcaaacttctgaatggatgggctccaaaaaatacactttcttttctctcattgaaaaagatgtcataaatggcgctaagaaatgctgccggtgtgcagaagtctgcctagcccaggagggagcttcctggacctttgccacgaaaattgtcagacatacacttgcaaacctgacaattaaaacggaagacaatacaatagaataagaatcttttccatttctgttgaatgaggggcttgagaaaaagctcacgaaattaaaaggagaatgaagacgcttctgaagggagctcggtaagaattttaggggcaggtggcatctgttatttattgtgccagttttgatttcagattacagtatatgctttcttttggggaagtgaggtgatatcctggttgaaagctcaggctttagggtcaggcagatgctgatttacatcaggaacttaaatgtgtaactgactttaagtaagctactcaaaaaccaccagtctcttcatctctaaagggagtgaagtatgttacaaaactcgtgagtgttgtatgaagatatatttgttttttgttttgttattgagacagagtcttgccctgttgcccaggctggagtgcagtgctgtgatcttggctctctgcaacctctgcctcctgggttcaagcgattcttgtgcctcagcctcccgagtagctgggattacaggcacgcaccaccatgcttggctaattttttgtatttttagtagagatggggtttcrccatgttgcccaggctggtttctaagtcctgatctcaggtgatcctcccacctcrgcctcccaaagtgctgggattacagcggtgagccactgcacccagcctgtgtgaggatatattcgaaggtgctttgtaggtagttggagggctccataaatgttacccacctcccccgtgtgtgatacaaatattctttatcatgagctttattagtacagttgtccaccacgtgcacatcatttcttggttggaagggaaatggaagggcatttgcaaatgcagaaggaagggattttcatgaggtcattgaagatggtgacaaaatggaagggaggaaggrgtttgtttctcaaacagtgttccttcatgggctcatggatgttctgtaagacttttttttattacttttttttttcgttttttaaaaattgaccttttgatgtcatctaaaattaatataagcatcttctgggtcatgaatgtgactacttayaaccaaatactggtcctaggtgaggcattgctttggtacaaagtggtccctcttcaattgaagaaagagaatgaagtgcagaggggcctgactgtggaacgggagcattggtggttccacagtgttgtccacattgggaaggaacgatggaatgagctccatgcacagggtggggccaccatcttcaggagaacctggccagcctgagcaaagtggaccatattccttctgggaagtggtggtttaggtcaggggaatagaaacaaacgtatgtgacgttcactgaaacttgtattggcgttgatcttcaaggtaaaccttgtaagtttgttttgatttcaagattgttttagagcaaaaatcataggcatgagaaccttgtcctagtctgttcagactgctgaagtaaaaataccatcaactgggtgatttttttttttttcttgtgagatggagtcttgcycttgtcacttaggctggagtgcagtggcacgatgtcaactcaccrcaacctccacctccaggctcaagcagttctcctgcctcagtcccccgagtagctgggattacaggcacccacccaccacgcctggctaatttttgtatttttagtagagacagggtttcaccatgttggtcagactgatctcgaactcctgacctcaggttatccacccgcctcggtctccgaaagtgctaggattacagctgtgagccactgcgcctggccaggtgacttttaaataacacgagtttaggtctcgcagtgctagaatgttggaattccaagatcaagataccagcagattcggcacctgctgagggcctgctgtctcttggccttctcattgcgtccttacgtgaaagaaggggcgagggagctctctagtgtttctgttttaagggcagtaatcctattctcgagggctccaccttcatggtatgaacagctcccaaaggccccaccttctaataataccatcacattgcgggttaggattttgacaaagcaattttgggggggacatmgatattcagaccacagcagaactcattcgatgttcacgtgctgttcttttcacttggaattctgtttccttcacttccccaccctggcctcgataacccctgctctgacccaggtctctgtttaattaccgctttttcaccctacchtcaccaccttgcccagaccaaaacttgccttctgtatttgtaaagccctgcgaggcacttttcccagttgactttataggcttttatgggatgttctggtttatttgtttcttccctgctggactggaagcttcacaagagccaggggtgtctttttgtcgttttccttgccactgtatcctgcagtggtgagcgcagtgcctggtacttggtgctcagtaaacatttactataaaaataattttttaattttaatgtcttacatgtttttctcttctcttttcttctcttttccctccctccctccttccctccctcccttcctttttttttttttttttttttttttttggcagaatctcactctgttgtccaggtgcatgatctcggctcactgcaacctcccgagttcaagcaattctcctgcctcagactcctaaatagctgggattacaggtgtgggccaccatgccctgctaatttttctatttttagtagagacagggtttcgtcatgatggccaggctggtcttgaactcctggcttaagtgattcacctgccttggcctcccaaagtgctgggattacaggcatgagccattgtgcccagtccactttaatgtttaaataacataggaataaaaacagtttaagcccaaactagattctctgccagtttcttttctctaaatgtgccccctagtcacacaagtcacaggaacatcctgtaggacggctggagggcctaagtcagagtgtctgagtccccaagtgtaggagaggaaaatgggaggtgggaatttactgggtccttactgagcaccagggagcaggattgctgtgggctggcttccatggatctagcctgcacctcagcttggctgcgtggttacctgagatgctcacaggagggagttttaattcagtgatacccttcctggggctcacatcttttattttatttatttatttatttattgaccagagtctcactctgtcacccaggctgcagtgccacggcatgatctcggctcactgcaatctctgcctcccagkttcaagcaattctcataccctagcctccccagtagctgggattataggaacgccaccacgcctggctaatttttgtattttttggtagagatggggttttgccatgttggccaggctggtctcgaactcctggccttaagtgatccacctgcctcggcctcccaaagtgttaggattacaggtgtgagtcaccaygcccggccacatcttttatgatcttttatgagaaacttgggctccagcggaaggtgaacaggaagttgtaggttgggtggttcatctcccggagggtagctgagctgcttatgcctgcagtgagacctctgaatgggtgtcactcactagatttcattataattataactttgttttaatagcctttcagagtttataaagcacattaacaagcttcatattgctctatcaatatcagtagttacgtaaggctgccttatgatactgatatgagataaacattcctatttttgtagataaacagactgaggcttagggggattggtgtgaacttggggctcgggacttcacgtgtagttagccatctgaagtactggtgtgtaccccaattctactcctgggatgaagtctcagaggcaggagttggagctgccccctccgcagagggtcagctaagatatcagcttgaaataaagtggctcagtagcaatgtaattatattttcagcaacttaaaaagtgatagagtcactggtattaggaagcatggtatcgcctgtggaacacacacccttgtgccctgcaaacctgggtttgaaagcgagggctgtcactttctggcgcatgtggattatttagccgatgagccttagtttctgcatgggcaaaacgaggatgataatggttaatcagagcattrggatgaagtgagttatcatttaaaaactgcctaactcagcatttaaataagttccagtaattattcgtattcttcccaaggttttacctgcccttttattaattcctcccccccatggaaagcctcacaaatacatgtgctgttggtgccatcatgggctcagggtgactccgcctttgtgtgcttggcagcatctcagaagctgcagagagcctgagcttcagaaaacaggaggggaggttgatttgtgccatcaggaaacctagggttgctcctgtcattgtcctttgtagacaaaggttgacttttggagtaagtgcacgcatgccactaagagggtgatttgcaggaggtggaggctttccttccctgggtaggcagattaaaggcggggttgccggccctccgcagtgtaagccgtgacctcgagaatctggcagctccgcgggatggtggcatctggcctttcagggcctccccaatctggtcttgcccggtctcccacagattccctgcatagttgtgacactccagccaaactgacagtcacttggatgtggcacatgccttcccatagtcaggccctttgcgtgggctggcacaatatgggggcctcagaagagaagtggggtttgataagtgggctgcttctcccacactgactcaccctgaatgatagcagtgtgtgaagagcacactcgttaatgccatcagaggaaagagggtcaacgtacagtgacccaggataatgttccctgcaagcgcatgatcgctttaaagtgctgtgttcccagcagcgtggacggacagctgcagtaatgattcgtacacagaggaagctggcattgaccgaggccaaccgcatggccttggtttctgccctgaatgagctgacattcttgttgaaggtgagacaggtggtgtggttggtgggcagagaccacctgacttagataggttcaagtctttatttttctcattgattcatcacacaactatttactgtgcactactgtatatgaggcactgttctaagtactgtgggactgttagtaaaccaagggacacgagtccctgccttcatagagtttgtgttctggcagagggagatagactaacacacaaaacaaggaaaacatactgtgtctcctgtggtggtaaatactcggagagaagaaaatacagaagggagagagagggagggtggagtgtgtgtgttggcaggagtgggttagggtttgcggttttaaggaggttggtccgggagggtttgcagaggtaattggaggagatgcctgaaggtggtgaaggaatgagtcatggggctttctggggaaagagccgaggcccatgccagtgcaaaggccttcaggccatttcttaattgctaatagagagaccacagaggggtcgtgtgcctggaagggcgcaagcccctaggaaagtattgggagaggatgacagagaggaacccaattgttctgggtctcctgggcacagtgtgcattggaagagatgcatgagctgattcatgtttatcaggatcacgaggctacttcttggttgtgcattggccccaggtagcaaaggctgaaacagggagactgcggagggctgtacttcaggcaggagatgagggtgacttgggccagggagcagtactggaaggctttgagaaatatatgagtctgagtctctgctgcttacattctctatgaccctggttgagttactttgtcttattacactttaattttcttgactctgcaatggaaataataatactgaaacttcctggagaggctgcaaggtggtagccaagcatcaccctgcttgcaaagcagcgctccccgacastgtgggtgctggaggtgtgtgcatggccctttgcatcatatctcactggaagggtcttaagctgctgaggctgaaacgtaaagataacagcagcttcctgccgcacagacttctccggcattggcatccgagcatatctttagaaatcttctaacccattcttggttattatttgcawtccagggcccaaagtgatgagttttcccattttcaacataattcatctggctgtgtgtcatgtctcatggcctcttggatttgtggagagatgggggtgatttgtagacgcacgtgaggaaaattggattatggagtgattagttaaaagagcgctccatcagtctattgaaaaccccatcgtttggggctcttggagttcaagttaatcatagcaaaggtaggagaatggcaggagaaaagtaaaattcctgcccatttatgtaagcaggggatgcatacctgttgtcccatgatcaaatctcacaggtttcctagacatgctgaagtgaggtaattcagtgcatccttttactctgtggaatgtatgaaacttttatttgcaaaataccttatttgtagtcttagttgccttatatgataaagattagccttcctgttccagtgttactgatgagaggctgagtttcatctttggtgtttttcctaagctttaacaatgcccccctgctgagaggtctcytggctggcatctgcttccctcacctgcccctttatcactgctgagggtggaactgggtgtgggggggcatcttggtatgatttggatatagtctgcactgacttgaaacacaggcatttcatttgccccaggttactggccttttttcatttcatagaaggcaaagagaattggccgggtgcggtggctcaagcctgtaatcccagcacttggggaggccgaggcgagcggatcacgaggtcaggagattgagaccatcctggctaacacgatgaaaccccgtctctactaaaaatacaaaaaattagccaggcatggtggcaggtgcctgtagtcccagctgaggcaggagaatggtgtgaacccgggaggcggagcttgcggtgagccgagatcgtgccactgcactccagcctgggtgacagagcgagacyccgtctcaaaaaaaaaaaaaaacaaamaaaaacaaaaacaaaaaaaccccgcaaagataattgatagcatttgcgggtgtggcaaaggtgttagtacctcctctcctctgttaaagtgctattggagactttcattcagccatatttggcctcctggttacagtactgccctgagggctttgcagtgttagcctgatgtctggagaacctgccccatgtgccactgttttcatattcaggctcatgaagatgatcactcacttaagggttcctatttccttaaccttttgtagtgagacattgtaacttgtttcctgaaaccgcaaggcttaacatgagtgaaatatactctgtaggtgggtctttttcaaaataaggtccatgggtctatattctgtatgttttatgagagggaactatttaaacaaaactgttcaaattggggtttatattttgatgaatctgaaaaacaaatggctgtgattctttgctgtgataatttgccatggaaacatatttttgtaagactctgccttttaaccacacttctcttctttaaaaagggtcaagttattacccacatttgataaacccaattataattcttatttctttacctttmatttctcaaaaatcctttccaggtgatgaggtttagaccagccttcccacacagatgctcacctttcctctgagtcctccagctgctcatttggagagctggaggtgacttcgcctgggggatttagtgcagggacttctgggggcacyagggcccgctacaggctttgagcaagttgcttgttgagctggacagtaagccatgcagcgtgttgtgtgtgcagagcttctttttcggccccggggggctcgtaactgtgttctggaaacctggtacacaagaaggcatctggaacgtcagactctccatatgggagcctgtcagagaatgtcgtcgcgttttggcctagcagcctctgtggcatctttatcgaaagtaaaaaaaaaaaattaaaaaagctacttattaagtagacaaggacagtttggaggaggacagtttgtaagaatagcatttattctttgcaatcagaaggctaaaaagtacattaacatacattcaaagtatattaaacataaaatatattctaataaaaagtacattcacgtataaaataaatctcgcttccatccctctgctgctgggttggctgtccacagaatgggcacagcgaggcaggtgtgagggagaagcatatacttatgttaatatgtatgtcaaaagtaagaggagcagagggaatgaaaatatccatatgaatttttttttccagaatttaaagcaacacctagttgacgattcagatgaaaacgtctcagtcccttatggctgggaggtttagcaaagctttcccagaggaaagaacacatcatttgtgtggggtggctctgcttcactgaaatgaccagaacgtagctgttaagcctgggaggatgggtcaggccacaggatcaggtaagagtgtacccttcaggccgcacatggcagagactgcacatgacttgtgcacggataaggtctgggccttatctctgtctcttctggctctggaatatagtacatttctcaattaagcctcagtttccttatctgaatgctggcatggtaatggcagtcttgcaggatagttagaatgttcaaatgagagagtctatcatagtttgctctgctgtttgctccatagaagctgcggatggttgagattttggtcaagacctttctttcgtctgatctgacttgggtccagatacttggaaaaatatggcaatcatgctgggtccaaaaggctgtgggattcttttacttcagcttaaacctgttttattggtcttccggaaatgcttgcagaaataagagcatgttaacgtgggtggacacaatttggagtgcttgattaacycagcaattaataaaaatggagaggtgacaattggtgttaccaagctacagttgaaagcagtgcacttggcctctctccatgcaagcagattggtggagaagccacccatggggaagaacatcagaattcagaagagtgaagcaggttgggaaaaaggtactcagaacaaaaaacagggtgtcaagatgagctggttgcttattacattcatttaatcagcagatgcttactgagtaattcccatgtacctgataccgtgccaggagccgaagatacctacatgaattaggcatagcctcttctttgaagagaggctgatgctgttttggaggtaacagacatataagcaacacattctaatacactatggcgagtacaggatagatggtgtttcaagttcatgcgttaccaaagtaaggagtggttaattaattttactaaaagggagagaacagtattggctttaaagaaaaagtggtttgagccagacctgccagaataagtcgatgggaaaagatattctagcacagaggayaggaagagcaaagacagggaggcctaaaatgaagggtggatttgcagttgttaagtgggaagactagatatagactgggtttgaagtctactctgccacttactagctgggtggctgtggacaaagcagtaagccttcctgtgagtggtttcatcatctgtcaaatggggatgcaggatccatgcctcatggggctgttgggaggattccatgttagtttagtgtgcttgggatgttgtgacccctcctgaacattacagccctgaggcatcccctgttctttgatgtgctgtatataagaaaagagactgggcgtggtggctcacgcctgtaatcccaccactttgggaggccgaggcgggcagatcacctgaggtcaggagaccagcctgaccaacatagagaaaccctgtctctactaaaaatacaaaattagccaggcatcgtggcgcatgcctgtaatcccagctactcgggaggctgaggcaggagaatcgcttgaacccaggaggcagaggttgcggtaggctgagatcacgccattgcattccagcctgggctcggaactccatctaaaaaaaaaaaaaggaagaagaagaagaagaaaagaaactgggactagaaatgtcactatggccaagtattgaaagcatctgaatatcatgcatcctgatgatatctctgcaaacatttaccctcactcttttaaaaccatatcttaagctatcaaacacttatcctattaaacacagcatccatcggtgatcccagtgacaagtaattgaatgttagttctggagtctttcctggggtgatggcctggagaagcctctcttttaaggattagattcagaggtagaggtaaatgagtgttgagcaccaggaagagctgagttcagcattgagttagatctggggtcagattctggccttacctttgttagccgcttgacctcaggcacatcatcaggttcatgtttagtttctacatccatgaagttaacgtatttatatattgagatgtaacattttctctgaagagctgggattgaaaattcctttgagaaaggaattgccttcgtttaggaaaacagtttgataagctagaacagcattttgtcagatagaaatacaatataagctggccgggtatggtggctcatgcctgtaatcccagcactttgggaggctgaggcgggcggatcacaaggtcaggagtttgcgaccagcctggccaatatgtatttgtatactaaaaatacaaaaattagctgggcgtgatggcgggtgcctatagtcccagctacttgggagactgaagcagaatcacttgaaaccagaaggtggaggttgaagtgagccgagatcacaccattgcgctccagcctgggcaacagagcaaggctctgtctctaaaaaaaaaaaaaaaaaaaaaaaaagaaatacaatataaacaacatacataattttaaatattttagtggtcatatttttaaaaaggtaaaaagaggtaaaattaatttaataatatgttgtatttagcccagcataaccaaaatatatatatataaattcaaatgttacattctttatttcatactgtctggactgtggtatgtattttattattattattattatttttttgagacagagtctcgctctgttgctcaggctggagtggagtggcatgatctcggctcactgcagcctctgcctcccaggttcaagcgattcttgtgcctcagcctcccgagtagctgagactagaggtgtgcaccatcacgcccggctaatttttgtatttttgtagagacacggtttcaccatgttggccaggctggtctcgaactcgtgacctcaagtgatccccccacctcagcctcccaaattgctgggattacaggtgtgagccaccgyrcccagcctgtattttaatttatagcacagctcacttcagagcagccacatttcaagtgttctgtagtattttcctgtatcatcgtattacatccttccagaattctaagaagtaatcatttctcccattttgaaaatgggaaaactgaggcatagagagattaagaaacttgcccaaagtcattcaatgaaggtttgaacccagataatctgtcctcagagccctgctgtgctagtttcttacaaaatcttgggaaaaaaaatttttttggaggatacttggggctttcatttggcgtagactgggtagtttatacctcaaatggagggataatcttgactagactgaacctcgcaacagggttaacaataaaattacatggcagatgcacccccagggcaccattattatacatagcagggcctcagtaaatggtattctttcccttctcttcagacccataaaatcagctttttttaaaaagggactttcttagttttgtttacctctggatccattcctggtacatagaagacgctcagtaaatacttgcggaaggcagagaggatgctttggggtcactggatgtgatgatcactcacagttgttggggcatctgcaaatacagtggtaccattagatggtgggttttataaatacagccctgggtgaagggggcttatgtggagagatgaccagagtgttcagatctggagttcttgccctgagccgaggacagtcataaaggccagtttttgtgtcccatgccaatgcttttttttttttccagtacatttttattttatattttatttatttatttttttatgttgttttaagttttgagatacatgtgcagaatgtgcaggtttgttacataggtacacatgtgccatggtggtttcctgcacctgtcaacccgtcatctaggtgttaagccctgcatgcattaggtatttgtcctaatgctctccctcccctagccccgcacccccgcaccccgacaggccctgttgtatgttgttctcctccctgtgtccatgcattctcattgttcaactcccacttgtgagtgagaacaatgcagtgtttggttttctgttcctgtgttagtttgcttttaaatggggaagtatagcatattataccagcagcaaagcacagaaagcataagtgtgcagcttggtgaattttcacaaaggtaacatatctgtatcaccagctcccagaacaagaaataggacattaccagtgacccgagtgcacctccccctctcccatcactgccccctgtgtctctaagggtatctgctctcctgatttgtgactccataaattaccttcgtgggcccacacttttgagcaaatcccaatggttggagttatcatggggaccagtatgggggtccagttagtttcagtcctgttttatccccaggcctggggttctaacctggttcccgtgttcatggtacagatgataaactgtgcccacagaggcccacccaactgctgggtctcatggtgagagaatagatcagtgattcagacacagaaattacatgctccaaagcctgcattcttgaccatcctgtatgttttcttctatgacgttttgttctaaaatcccaagattgggatatttaggttgagatctttggactgaatcctatctgggagtggctgctggaaaactgtggaggaggaacccatagctctgcatcccagagcccagatgcagcatgctcctggcccccgggcactgaaggctgcacctcacctaccagaagtgacctggctagcagagcccatcaggtggggctgccggaggtgtcagagtgtgggacaggcaggcytctcattgtcctgtgtttcccgcttccacttcctgctgtcaagcactctcaggcactggtgagggaaacttccaattaaacgaaatcaggcggcttcctcccaccaaagtgaaaatgccctgtgctgccaagtgcgagctaaattcatcggtcacctgctttgcggcatgggacatggctggggctgctgcctgttggttgctgtggattttagcaccagtcactgctcagaggatgcagcaggcatggcgggctggggagggccatctctgctcagcctggagtccccttggcatggttggagatgggcatgtgtgttctggaggagctttgctctctctgtggcacagccctctgcccccatggttccccagtcaagagggacaggtggtggctgtcattctgcagttggccctggccacagagagatttgccaacaattctgggatggagacacccccagcttctttggcccagagactgcagcttgacccataaagctgcaagcaggcagttcccgcagcctgcctttctctccagaatggtgagggtggggtgtgggtagagatacatattattatagcacgagggtcagtgccctggctctgaaatttaattcaaaagccagaataaaattgcccctctggaggcaatggttcttataaaaatgaagccagtaatatttattataatcctagtgagtgagttgttgagcagctaattctttgctggccactgggcctaacctcatagatggagtggtgtatctctggagctagactgcctggggtgaatcctgtatcctctgcttagtcatgtcatcttggacgtttttcaacttcgctgaccttctgtaaaatggggatcacaacagtccctaccttttagagctgtgtgaattattaatccatgtaaagcacttggaatagcatctgacatgtcagtggctccatacacatgtatataatgttggcagagtcagttacagtcctctgactacttttctatggtgggaactttattattccatgtttaacagacaaggaaaccgaggcacagacaggctaagttactggcctgaactttcacagacagttaagtaccaaggtggaatttgaacccagggggacctgactccacactttccagtgatcgttgggtggaaatagtgtcttgcccaagatttattacctaaaaatgaaatatatttcaaraaagataccctcaaactctaacatttccagtaaaagcaggacaaatactctattttataatccatttaaaataataaacatagctgcagttcgttgagcaaattgctccgtttcagctgccacgtgttacattgcctttctgtttgggtcacgccctgagacctttgtgaaaaagttgtgaggtcagatcaaagcggcggctgatgtgctcctggaagaggaggtgtcctggggagtgaggacagttgcagtagcctcttagaggagtgaaaacctgaagaccagctttctaccctttgtctgcacagggtttccttgaggtgaggcgtgcctgtggtcctggcctgctgtatccctctaacctcagcatgtcttaggtcctgtccccggattcagtcaggctgycacaaaggaccgagttagccaggaaagaagaggttttgcgttggacagaggtaggatgcaaaaagcggcctgtggaaataatgtaccattttcttatttaagttccctgagcagaggcaggagaatagaggacaggaggagaagaataaaggaggagggagggaggggaagagagacggaggagggggagagagagggagagagaatacagkcgggtggggwggaaggaagaaatrtcagggttgggaggtgagaggagaagggatgcagcctcagtgggggaggaggaagaagaggtggaggraggtgaaaccagtgacttgtacttggcttcttgtgacatggagtgaggagggcagggcaggacccaagtgggaggcagatcctaggcctggtggaaaggaggaggaggaggaaggatgtgaggtagcagacagtgggagggtaaagaatggcatatgaatctgagaaaggatcatacaagttttagtgccagaattggtgatggggtgttttggatgggtaaacagaggcacgttgttggaccctggtcagtggctgtttcccatgttctatggttgtgacatgctatcttcctgggtgggtgaagaggctggaccccaggcagacgagcacrctgagtgccacctgctccatgcttccactcgtccygtgttgcctgcctgcatctcagcttcccggaaggccccaggagggacrcggccttcagggctttcagccgggggcaggaagtgctccatctgacaccattcagaacagactagacaaataactccacagcatgtctcattaggccaggaacactccagctaatcgaggcgtgcctttgtcgtgcgctgctcgtgccaggggagttaaaaaaagaaatasgcctgatcccaagggtgtgggcagggcagagataataaacccaaatacaaagtcaggccacccaggaatgaggtggtgtgctctatcrgggccggattcccccagctccagatcatctggccaaatctgcaccctcctcccgggcctcccttttgctggggatggtttgggcagaggtgagtgggcatgctttctggtaaaaggatccgattttaatgtaagaggcttgcttgtgtgttttcccagctagttcacttccatggctttatttatttttttttttgagacagaattttgctcttggcacccaagctggagtgcagtggtgcaatctcggttcactgtaacctccacctcatgggttcaggcaattctcctgcctcagcctcccgagtagctgggattacaggtgtctgccaccacacccagcttatttttttgtgttttcagtagagacagggttttgccatgttggccaggctggtctcgaactcctgacctcaggtcatccacccgcctcagcctcccaaagtgctgggattacaggcatgagccaccgcgcctggccatggctcttttccgtgctccaaattcactcagtttctggctcttcctgccagtgtgctccataagaccagctcccagggagccctacacttagcgtttggtctgtaaattccatgggacttgcttcatagctgtagaaactcaggttcaagggcgtaaaggatgtgtccacagctagtgtgtcgctgggggggtggcggtgttggtggtgatgatggggatggcgatgatgacactggtgatgacgatggatagcagctgctgtgtattttcttaggagcygtgttaaattctttaatggcaaagatcgtgctagtaataataataataataataataataataatagatagcatttactgcgtgtctgctctgtgccatggaaggttctcagcacttctggtacactcaacctgagaatgactctgtgaagtggatgctggcgtgcccatttcacagtgcaaataatgaaggcagtgtcacgtcagagtctgcattcttactgctaagccacgccgccacatggcagtcaagacagcgtgctgtgtgtggagtgaccagcctctgtgggtgggcgagtgactggctgaaaggttgacgtcagagcatgctctattttaggttcttcaactcgaaggaaccccctccatcactcccacctcctgccaccctagttcctcattcctttccccaatattgttttcttttcttttttttttttttttgctgatttagaaatagacttgacttcctggtgctgagactgtttagatcaattaacactaatgaacattgctagttagctatggactttagttcttcaagcctctgaccttaaattttttttttctgaaggtcatcaattaactatttacttcattatggattagtaatcattagttaaatattgccatttgttctgtaggtcaccggtgtggttcatgcagtgaaaaaatcaagtgtttcagtgaaaagttgcagagagaaagaaaaaagagaatgagggaagacagaggagtatgtgtgtgtgtgtgcgtgcacgcttatgtgcaggggaaggaggttggtagtagtggtgtttagattagccttaaaataagaagcttgaaattaagggtaaaggtctggtaccagatgctctaaagccatctgttatttacctggacagattttgatacctctcttctgtcctctaatagcatctgtgttctgactttagtcctggtacttacctggatatatggtaatttggccatttccatgtccttccagatggagcacctggcaggctgagtctgtgtcttttgtatcccccttacctgacacagtgctggcacacaatatgtgctcattaaatgcttactgaaatgacctagcacataaaagctttgtaagacaggagctttattttactctgcctgctttgtactctagacaccccaggtattcctattctgatttctgttgctgctatagacctgggtcagccttaaaatgaatataaatatacgttaatttgagctaatgggatgtatggaaaccactgcctatctaattaatttatttgtgccatgaaataaatgttttaaggtgctcctgagtgcagagcattctatcagcaggtggaatacaaagttttaaaagaggctagggatgtgggctgtgtcaccagaccttctgagttcaattctagatcagacactgttctggttatagtgggtcagagcacagattctggatctgggtttgaatccacattagaccacatacaagccttgtgcccttatgcaaatgatttaatctctgtatgcctcagttttccctcctttaaaatgggacaggccgggcacggtggctcacgcctgtaatcctagcactttgggaggccaaggtgaacggatcacctgaggtcaggagttcaagacagcctggtcaacatggggaaaccctgtctgtactaaaaatacaaaaattttacgagtgtgctggtacacacctgtaatcccagctactcaggaggttgaggcaggagaatcgctggaacccgggaggcagaggttgcagtgagccgagattgcgctactgtactccagcctgggcaacagaacgagacggtctcaaacaacaacaacaacaacaacaacaacacagacagtcatggggatgttgtggggttagggttgttgtgggaataaaatgagtttgtctgtaaagcacttggtaccatgttgatacctgtcactggtatttgttgttaatgaagatttagtgacttcatgtgtaaaacccaactgtgtcagtacttgtcttcatagaattgtggtgaggactgtatcagtttccgaaggctgccataacaaactggatggctcaaaacaacagaaatgagacaataatgtctcttgattccagagaccagttttgtgtcggcagggccatgctctctgaaactgtgtccttcctggcctctgcctagcttctctttggcactctggctggtagatgcgtccctctaagcccctgtcatcactggagctctttctgtgtgtctcatcacatggccatcatgttataaagacaccagtcagactgggttaagggcccacccttctccactatgacctcatcttaactgaattatatctgcaatgaacttgtttccaaataaggtcacattctgagtggggttaggacttcaacacatctttctgggggatacacaattcaactcataactagggtgaaatgcgagactccacatgaagtattgaacccagaacctctaacaaaacagtgccttcaacatcagcggtktctgtttttacttccccatactcctgatgacggccctttgtggggtggctttgggcagttctctgaacatctttgaatttctatttcccatcttttcaccgtgatgtggcacgtcttccagcaacactgaattatgtagttttcctggtctgcattgcctcatctctgaaatggggagaaaggagaaccacctcccagaagggacccccttcccaggatgacatgagggtacacacctatgtgctggtggtctggacatgcgagtgcttcccacggttgctacccctccttttgtgcctggtgttttctcgtcagtgaggacaaatggcttttgtagtacccctgcaaaccactgcacagacccgaggaggctcctcttttccttcccatggaggtgggaagccagaggcgcatccagatgtgaggaggcttcgatttttcagacccctgggttgctttgcagtcagaatggagaatactttttttttccctacttgggagggagctgaacacatttgctacagagaagtctagatatctatggaaacagtcctaattttagccttgccacacttaatgccaactctgagagtgttgttttgggtcagggcctggggagtagggaaggtgagtaggcctgcaggggtcagatcaagcagggagtagccaaccgacagacaagaggaggatgcagtagaaatcttaagtggatccaaaggagctggctccaagggtaagagagggccagaatgatgagcattgatcagaaagttggatttcaaatgaaagggtctcccttcagaaagttggatttcaaatgaaagggtctcccttctttcccccttttgctctccctgtctacattctgctcatttttggagcctcgttcatggcccttctttccacaaccccacgtttggaatcagccagtcctgccctgagtgcctggcatcttagaattctgttgaagtactagtggctgcccatttagttttgccgtgaatccgtgtaccttgcaaccccctttccatttagttttgwgcccctcaaggtcagccatggtcattgtcaagtctgtgtgctgtgcctgccatggggtagacatacagtaaatgcatgatgagttgggatttgacatgataggtgatttctggttgaccagaccagggcgtgggcaatcactagaaaggggcatcaaatgaaggagtttttaataagaggcacagaaatgtttttgatgggaggaatctgcctggttaggggagtggaaattgcctgtaatacaattaaggacatgttagggagggccatgggcaagaggaggtcatggtgtggcagatgctggctgggatggtgagggaagtgagggacagtaatggttttaggccacgtggggagcatcacctaacctcatttcagccctgtcctccccaccaggtgaactcctagcaggaatccttgtagatcagatacaggaagacccttagacatcatctcgtctcgaagtgtggtattcaagacaggcatttttacactaaaacttggctcttaattttagtacatgtataaaagccacatagaactagcattccaaacctggcgtttctcaggtgtttctgcttccgacgaggccggctgtggtagttgcctctcagtcccatggattacagggtgctgttcccacacacccatgcacatgtgagacctgtaatgagcacagggcctgttgtcaccatttggaacgaagtcttatgcagatggacgaggttgctggtatgaattcttgcactgaattttcatatgctttgtattcttttcagcaggatgaaatgtaccgtggttgtgggaaaatggagcgggtagtgtgctgcaagagattacagggtaggctgcttggatccggtttggccctctcctcttgaatgaggagggaattgggcaagccgcaggtagaccaggtggccccgatagatagtgaccgaactggtacttgagctgcatctcctcttcttgtctagccatcttggtgttctaggtaggacatgagctaggtcctaccaaagacttgggcactttatttaagttctctcatgtaatcctactaacaacgttgtgaagcatgcactatttttacttactaaacaaaaaaggagcgatcgggactagaggacttgaaataactttctgaggcccagcctgctggtgcgaagtagatccagtgattcaacgtggctccatcccatgacatttagctytcagggagctgcaaacctatgaaacagagctttcagattttggaaatagaaacgcaggcagcatagtgccacttgctgcctcctgggaaagccccttgtcgtgaataatagaaccagcgctagaaggcacgttgctcaggccggcaggtgagtccgagggctggggaggggttttctgggcagtgggacacctccctcttagggggtttcatttgtccagggccagtgaaaggctgtttggtccctctgctgagtgaacagycccagcccacaggatgagtcagagcagagtccagaacagaaggcagagggcatgtgtgcaaaggccatgtttatcccaggcatttggatcttaagattcctgttcatgatgattaaggttttatacataacactgtttacagactgctttatgatcatttatgagtgtcacctggcaacagctgagttagccacatccatccaccgtggggtaattaactctgggcccacccagagcccagttcattgcttgtgcattattgagcctcctccccacaccctcattcattcatctatccatccatccattcattcattagagccctttttgtcagatgccacctttgtgggtagctttgtggttggcatttctttttcattgctgagaatacgtaatatgctggacatgttggtgttcctgttagcgtaagcaataatcaacccctttagtgagactgtaagctccatgagggcaaggcctttgttcatttctatgtctctggtgcctagaagaatgcctacccatagtaggtgctctgtgaacatttattgaaaaaaaaagtgaatggactgagtgtctgctatgtttgggcctgtgggaggtgctttctataaaagtctttctaatcctcgcagcaatccaccgtgcaccataagggtgtctgtcgtccattctagggctccatctggtgtgtgtttaccattatcataagcattattgtgagtgcttccagagcagataatccttattatgactgaataatgtagctacattatccccattttacaaatgaggaaatgaggcacagagaggtgaagtaactcacccaaggtcacacagaccctcaagcttcaagctactccttcaccttcatatcagcactgtcttacagaaccttctgcaggatggaactgctctccatctgcaccatccgatgttgtcaccgctagacatgggtagttactgagtacttgaaaggtagctagtgcaactgaggaactgaatttttaattttgtttaattttaattaaatttaaatagccacatgtgggttgtgactcccatactgggcaaaacagccccctatatgctgtctctaaagaacaacaggctgggtacagtggctcatacctataatcccagtgctttaggaggctgaggcagattgctttatgatcatttatgagtgtcatctggcagcagctgagttggccacatccatccaccatggggtagttaactctgggcctacccagagctgaggccggaggctgaggcaggaggattgcttgagcccaggagttggagaccagcctgggcaacatggtgaaaccctatctctactaaaattacaaaaattagctgggcatggtggtgtgcatctgtagtcccagctacttgggaggctgagatgggaggattgcttgagcctgggaggcagaggttgcagtgaactcagatcatgccactggactccagcctggatgacagagcgagaccctgtcaaaaaaaaaaaaaaaaaaaaaaaaaaaaaaagaataccagctaacattgaatgcttactatatactgagtattttttaaatgttttacatttaaaatcctgacaaccacaaatgaattaacaagagtcagaagttaaatacctcctttactctcaagattttatggcaagatactagtgtagctggattctccccaaggatgcattctkcctggcccagagttttcaactatcaccctatttttatccttattttccctgcgtacagcaagggatatcaccatggaaaggatctcattgttcataatatttgtcagccccaaacacaatgctacctgccaccctccttggtaaaggggtcaacctatatgcaggcttgcgaactcactgttcccaccaaatgactcatttaggttgaaaacatttatttgcacaaagtggagttgtgtcagtgtcactttgaaaagaaaaagacgccaatattccctaccaggatgttctgtcatgaaaacaaacagatgaaacaaaatctacttcgaggtcagagtgagaagaagagaaggtccggctgaaattatctgcagtcttgctggagggaacaaatggttgcagctcatgggtatagtggcattttacggctcccagctgtgccttcccttcttgaagatgggtgaaggggagtaggttctgggctagacttggggctatggagcaaaagcagagggagcttgtcctgcacagacgtggaagcagaggtcactgaattctgttccacagtagaagtcagcagtactttatgataacagtgcatccaaacgtgttctgtctgctgggctgggcctgacacccacggctgtgactctttcagaaactgcgaaccaacctgtgggtgggccagggatccaggtcaggagcagaagtaggttaaaggtgatcgagagagacatgtgagagagtgagcgagagatagaggcctgcaggataaggccacatcaggagtacagtccaaatataggcagtgattgtgaaacccagggactgtgggctaaaagtgctgtagattctgaaagtaggaagaggaaaaatgtggccacgggcctctggggaaagccctrttctgtgggctttggccacttaaatctatatgtcttctgctgctgtctcaaggcagtgatgcagccctgactatccttctgcccatctatccattcatccatccatcagtccagcatttgagtctctattctatgcatggtactggggatagtgtggtaaacagggcaccatccctaccctcaaggagcttacagtcttgcctggtaaaatgtacagaagcatgcatttttgaaacaagtaaaggaagaagacttaggcgctctccactccaaggccacctgcaccttgcctatgtagctttccccagcaacacgaagccagcattggtttcttaagttcccttcttgtctttatcatgtatgtacttagtatctgtattgtgctttgggctatttatttatatcagcatagcactttattgcatctttattgtaaataaccttcctgaacataggggcctccatgtctttgctgggtcctagctccatggtaggcactgatgggggctccaggattattgaagtaaatgagagccccttaaacctacaaggaaccttaatggtcatcagtggtctgaagggtcttcttgacctttcctgcctcccagcttcctcctgtctctgtcaggtcaagactctacctgcctggtaggttctgtacaaaccattgccaggcaatggaagaagaaaggggagctgcacccctcactggagttggaacttctgtgatgcttgtcatagctccatatgcctcacattcacctggaaacatgggaggcgttagttaggccagattaacagatgtgggatgccatataatgactttgycttcaagtgaaactgcagtccaatgggagcaggccccagacattggcctcctcaaaaccctgggttacttttagtgtcttccagttcaggaaccacagttttcaattttttgaaaataaaagtactcctatctcctttcattttttttttttctgagacagagtctcgctctgtcatccaggctggagtgcaatggcgcaatgtcggctcactgcaacctccgcctcctgggttcaagtgattctcctgcttcagcctcctgagtaactgggattataggcatgcgtcaccacatccagctaatttttgcattttttttttttttttggtagagacgggggtttcaccatgttggtcaggctggtctcgaactcctgaccttgtgatccgcccacctcggcctcccagtgttgggattacaggcatgagccactgggcctggctcctcctttgtatttctaataaagtttacctgaacttacagggtcttctagaaatggggatgggattgaccaggcattgtcagccatcccctggccccatcgtgaggcaggagactgttgggcaagccgagacggcagggaccccaccctcttgactgctaaaggaaataaagacaacagcattattgagtgcttctccatggcaaatgctttgcctcaattacctgatgaggttggattaacctccatttcagaaatgagggaagtgaggcttgcagaggtggcacgcccgagataaaggagtgactgagtggcaaagctgagacttgaaccctaaactgtcggctcccgtgttcctgtgtgccacggtgctgtgtgagaagtgggaacggtgagttccctgctgggctcagtatggaggcaaaccgctttctgcaacacattcctatgctctcggacagcttaattgacttctgtgccttaattttctcatccgtgaaagagtataataataacaacaataataataatagactagaaattggccaggcccttggtgaggactcggtgcgtgctacctctgatagatactaatatgtaggtatagtaggaacatcaatcatcaatattgttttgactcttttgacctctgataaaaaattttgaccatggactgccctttttgtgttaatagatttgttaggtcaatgaaaacacagctctcacaagaagaacttatgttttataacaccaagcccacaaacgaacgtcatggtggcccccgaggacacgtgacagagctgggatttgaacccaggcctatctagcctctgtgtccccacactgtttctcttgggacccaggtgtccggctggccctcagcttcctgcgttcctggtgattcggccctggcggtcacagtgtcaggtacacccactcagagtgggtttatgatacagttaggaaggagcccaggccacagcactggaaaagacgaaattgtagtgttgatsaaggccaggagcctctttgctcagcgactgccgtcaatcctcttccctgagaagatcgcctgtattgttcaagatgttcggatataacctcccccaggaaggcttccctgatgtcacacacacctctgtcgaaggctcccaggtgggccgaacagagtcttcctttgctcccatggcagcttacaggatctttggcagccttttccatgatgttttcttcccaggggtttgtgtagcttgtcttcaccacttgccgtgagctctcgaggacagaggatttgtctgtgttagaaacatctggttcctgccgggcacggtggctcatgcctgtaatcccagcactttgggaaggtgaggcaggtggatcatttgaggtcaggagttcaagaccagcctggccaacatggtgagaccctctgtctactaaatatacaaaaaaatgagccgggcatggtggcgcgtgcctgtaatcccagctactcgggaggctgaggcatgagaattgcttgaacccaggagacagaggttgcagtgagctgagatcatgccactccagcctgggtgacagagtgagaccttgtctcaaaaaaaaaaaaaaaaaaaaagaatgtctgggtcccaaaatccacttttcttctactgaggacataggaatggtcaccttccctgcccttttctagggccatgtggctcattctggccgaagggtggtgagcagaagtgagttgcataatcccagtgaaagcatttatttgcgggtgcaagatctcctggggctggcgcgaagtgctggggggcaggactgaggagtggcaccaaatgctgcgtaggagagttctccagatttgacagtcaaggatcctcatggcagcatggagaggccaggcgtgtctgcgtggccattctgtgggtgaggagcctgaggcttagtgaggttaattgcttgtccaagggatcttgtgcaaattccatggcttgttctatggcaatatgctacattcgctgttatgatttcttgttgttgctgtaaattgtaggctaagggtgtgtgtgtgtgtgtgtgtttgtgtgtgtgtgtaggtgggtgaggagtgggagtgaggaacagctagccgagttgcagtgcttggtccttttgcagaatgggtgttagcaaaggctggcatgcttagcccaggtggtggctgtactcggccaccaagttaacgaagagaaaaacgagttagctgttacctcctctcagatgtcagttttcctttaatgtggagctttggagagaataccaagatagggctgtgcttactgaccttttccttgccgcacagatgggaataaggggggtggaagaaaaggaggaagaagagaggtgttcgaggcagaggctgcctgggcgatgccgcttcgttacccactctcagcctaaggaagcgttgcccaccctgagattcagggttgaaatctctctagcgacagtgcccaggagtgcaggcttcacactccaaggaccttgctgagggtgcatggatgtacgggcaagggtcgtggttgtggtggcagtgcagtaggtcatcagaaaggcctcaggctggctgcgcccacggtgttccccgtgctgactccagcttgcaggcagatgcaccattctagttgttgtgggcagctggagtgggggactggcccaggagggtcagggtagtggcctggtagtttgcacgtgttggtcttgcccccgctttgccctggtgagcgctgaagtcatgtttgtgtgagccaggcattctcctgatcacggttgcacgcccatcctcagaagagccccctctgaggtgctgatcccaccaccaccttcacagctcaggacgctgagtgtcagagaggctgggtcgctttcctcaggccatgcttgctgctgagtagagaatccagtgtggagccaggacactgtgaccctggagttcccaaccactaggattgcccctccaggcccttaacttctctggccacaactttatttcttattccgaaaacaaagacagtgggagaaacaaatatttatttgaacatctatggtatgccaggtgctatgggttagactgtgtacattattttatttaagtcttatttcaagccctggggttaagtatcagcttctcgatttaaaaaaattcaaaaaaggccaggcatcgtggctcacgcctgtaatcctaacactttgggaagctgaagcggtaggatcacttgagtccgggagttcaagagcagtctgggcaacatagtgagaccctgtctgtacaaaaaaatttttttttaatttaaaaaaaaatttaaaattttttaattgtaaaatacacataagattgaccatcttaactatttttgggtggacagttcagtagtgttaagtatcttcacattgtcgtgcagccaatctccagaactgtttggatcttgcagaactgaaattgtgcatcctttgaacaagaactccctattttcccctcctcccagcccctggcaagcagcattctctatgggtttgagtcctccaggtactttatatgagtggaatgatatagtatttgttgttttgtgactggcgtatttcacttagcatgaggtcctcaaagtttacatcacatggtgtagcgtgtcgatgatatttccttctactttatatgtatgccacatagcaccttggtttgcccatttatctgttgctgaacatgtccttgatgaaccatacatgtcataatgggttgcttccagctcttgaccacattttgttgatttcgttaatcaytcaagaccaagaaaacatacctggayttaagccccggtctctgtttgatacctgacttctgactgctttttacttccaaggatcctccagctttaggagttgagaagaattttatacaatgtggcctttgttaagcctgaaactgctttgggcctgttgaaaactcccttttattttctgagtccctactcagacaacacttcttccagaagcctggtggggaccaagtttataccgccagaggccacaatgtaaggtgaaggctttttgtttgtatctgttgggtgcccgttgttttcctagtgtcatttctaccttttcccaaagctcgtgcgtttgtttccatattttaaaaatgactatgatgagatgtcgttctgaaattaggaagtacagtaatacaacattattatcatgatacaggtttgcatttataaggtgagctcccttggggctagtcatttttattttttttaattatactttaagttctgggatacatgtgcagaatgtgcagttatgttacataggtatacatgtgccatggtggtttgctgcacccatcaacccgtcatctacattaggtatttgtcctaatgttatccctcccctagcccccgaccccctacaggccccagtgtgtgatgttcccctccctgtgtccatgtgttctcattgttcaactcccacctatgagtgagaagatgcggtgtttggttttctgatcttgtgttagtttgctgagaatgatggtttccagcttaacccatgtccctgcaaaagacatgaactcatccttttttatggctgcatagtattccgtggtgtgtatgtgccacgttttctttatctagcttatcattggcatttggattggttccaagtctttgctattgtgaatagtgctgcaataaacatacgtgtgcatgtgtctttatagtagaataatttataatcctttgggtatgtacccagtaatggtgagagacaggactagctggatttcctaggccaactaagaatccctaagcctagctgggaaggtgaccgcatccacctttaaacagggtgcttgcatcttagctcacaccygaccaatcaggtagtaaagagagctcactaaaatgctaattaggcaaaaacaggaggtaaagaaatagccaatcaactatcacctgagagcacagcgggagggacaatgatcaggatataaacccaggcattcgagccagcaatggctaccctctttgggtcccctccctttgtatgggagctctgttttcactctgttaaatcttgcaaccgcactctcttctggtccgggtttgttatggctggagctgagctttcgcttgctgtccaccattgctgtttgccacagtcacagacctgccgctgacttccatccctctggatccagcaggatgtccactgggctcctgatccagcaaggtgcccattgccgctcccgatcgggctaaaggcttgccgttgttcctgcacagctacgtgcctgggttcatcctaatcgagttgaacactagtcacggggttccacggttctcttccgtgactcgtggcttctaacagaactataacactcaccacatggcccaagattccattccttggaatctgtgaggccaagaaccccaggtcagagaacacgaggcttgccaccatcttggaagcgaccggccgccattttggaagcggcccgccacgatcttgggagttggaactcccggttccaacttgggagcaaggaaccccggtaacaatgggattgctgggtcaaatggtatttctggttctagatccttgaggaatcgccacactgtcttccacaatggttgaactaatttacactcctaccagcagtgtaaaagcattcctatttctccacttcctctccagcatctgttgtttcctggaggctagtcattttttctcaagcccaggtcttaagcagataactgccctgggtgtgcagtaatatggtttatggtgtcaaaggcgagatctcttgtgtgataggctagagattctctctgatgcactcgattatcattttctatttaaaataggcattttgtttatctaggagagcattaattactaattactaacatttaccgataaacaactataagaaatatttmagtaagtgttttgttagtatgtgtccttgaaaacttactgcaagtgaacatgtaatttaacttggcctttttctgattgcatcgtttcttgccgttgcmtgtccagtgggagtatttattgaattcttgccctttggggcttcccagctgtctgggtatcaaaagctcccaatggatttttttctcctgcccttgaggggagtctgttccttttggcttccagcttagaataaaagagccactaatctgtctgccccatgaacctttacttaaagatgttcttttaggctgggtgcggtggttcaccgctgtaatcccagcacttctgggaggctgagaagggcggatccctcaaggccaggagttcgagaccagtctggccaacatggcaaaacctcatctctactaaaaatacaaaaattagctgagcctgtaatcccagctactggggagactgaggyacaagaatcacttgaatccagaaggcaagggttgcagtgaactgagatcacgccactgcattccagcctgggcaacagagcgagactctgtctcaaaaaaagaaaaaaaaaagttattttagctttttctgcttgctcttggaaaaacaaaaattagggagcggcggggagacaggagaggataatgacagacaggttcatctgacaactaaccttaaaggggccttgtctatttttcagaacctacattaagaaacgcattcagatgcatcagccgtttgtaaagcacctgtcgtgagccaggtaagatgtgtagcgttttcaaagctgttttattaaatcctcacagaaacctttccaagttgccgtttttcagcagggcgatctgtgctgaagtaagctacctcgcttggctcacacagctaaaagtagacgcaccagcctagggcttggcgttgtccgcctctaagtttagggctgtaatcyggttctttcaccaaagaagacacagtggctgcctcacagggacctggaaacagtgtctaattcccagttctggtgggatttcccctgtgtcttactctcttggctgatgatcagtagatctatttatcacttstaggagctgcgccttaagtcttcatttcagcctcttcatatggacctcactgaggctctgagggggaagtgactgcttagacccaccacccacccacccagcttgttctgtcgggaatggttctgaccctcttccatggagaggcatgtgtttgtctgggtggagaacatttccagaggagcatggccccctgagaactggtccgggtatggccacagttcagcactctggttggattctgcacatgaaacattttgaaatcttttcagtggaagtttggttcttggacagctctcttctgctgtcccctaaaccccctattcctactgagatcagaggccatttgttgtacatagtcatcgcccaggtgccagcgtagggctgggtgcccgggaagcctccagtaagcagcacagaggtgcggggtgcgtctcaggatgccaagacttgatcccgactccatcatttattattcctgttctcttaaccttttaagcttcagtttctttgtcttaataaaaagggggcatgtgaagagatgacagtagtccttcatggttttgctgtaaggactcactgagcaaaaaacgtgtaatgagggcaggtatgggctttattaatttttgtatcctgaggttggtattcactacatattcatcagaatgatgatgaaaaagtaaggaacccccccactctgagtttcatttgctccacttcgaaaactaagatactggtgttaatctgtggttcctgggggcagagggctgctcatcagaaattccttgagggcctttcccagaagcacaggaccaagccccacctctgaaattctgattcctgccatcttggctggaatgtggcatttggrttctgaaacatgggtcctggggattgtaccacacagccctggtgaggcgtgatgggccctccagaccctgaggtctctcgcctgatcctttctgggttgggcaggttgggggcacatggagtggctagcaaatggttagggttctgacagtttcccactccacccctctaccttccacccgttcttcaaggcccactttatttttatttatttattttttttgagacggggtcccgctgtcttgcccaggctggagtgtggtggcgcgatctccgctcactgcaagctccgcctcctgggttcatgccattctcctgcctcagcctcccgagtagctggaactacaggtaccgccaccacacccggctaatttttttgtatttttagtagagacagggtttcaccgtgtttgccaggatggtctcggtctcctgaccttataatccgcccttctcggcctcccaaagtgctgagattacaggcgtgagccaccgtgcccagcctaaggcccactttatatgccaccttctccagaatgactgcccgggcctcctgagctggaaagtgctctctctctctgctgaatgccttgtggtcctgcctctggggttttgtaatgctgcaatcagccataagcttgtgaaggacgcggcctcgcttgatgcaacatggcaccccacagcaccttcgccgggctcttgcatccagttggcatatcattatatatttacatatgtcaccgatacatttatgaataactgtttcaacagctaactctttggctttataaatcacaactgcatctcccaagattccttctgtgtctcttcagaccagtaacacagaatgtctttgttaaattggaccttttttttttttaaataaactggagacacttggggagaataaartgatgtactctgcttttgtaattagctgtgatgattagactatcttcttcataatgtcttatttttacttgctttggaatttatcaagtgctctcttttctatgaaggttacccttcaagtgagtaagggggcttgattagaacactgggggatttaccttgyactttttaaaaataagactcatgatggagaaggctgatgtgagccgatggtgaaaggtcagcctggagctataaaaaggggtctctgagctgagaaactgaaacygatgctcccagaccaagattttttttttctgccatcaactgctgaagtaattaatagtcacttttattttagaatttgttttatatttaacaaagcagcctgtcatggcttctcttcatgcccagggcaaggtcctttcytttttttttttttttttttttttttccccttaagtgcatttataattacattgatcagctctgagtttgtgatatgccaagtccttgaatgtgatactcatttgctttcacgtttttgatgcaaatggatcttggaatccattctagagtgctttggtagattttttaatccacaataggcaatttatcttgttcagcctctacaaggactgtctggtatggccggtctgggcatctggctggccacgagcctgcccagtagggactcagttgggacctgctgagagcagtttcactttcgcatttgcttcctcttgtccacagctgaactgagaggtgttctcggggatccctagagtattgagaacaaagagcagaaggaagagcttgcatacttctattttccatccattcagtgaatatttagtgcctgccccaaggcaggttttgaggatacagcagacggcacaacaggcagacatatccttgtggacgtgctctggcaccargctgtttccaactcagcacatgtgggaaaggaactggcacttttttgtatccttgctatcttcggcatatgtgggcatacttatttaagcctcacaactgtctgtgaagtaggtattattaagggttatgtaggccacatgtatctgtgaacatcatactggtgtgtggtgttttgcataatagagctatgaaattatgcagctggggtttgaaaataaaccctgcctttggccatctagatgttgaacaagggacttaaatgctcacagcctcctcctcttyccctgttttgaatgaggctaaaggttggacctctcaggatcatttggtagttaacactttgcaagttggcatggatacacacaggtattgtaaacctgtgtgtgcttgaaaagcagcggctgtttctgcctgtgattctggagttacttctggatttgatcctatacagaatgctcttatatcctgttcattatagggaaggaagcttgtggcagggaatctgcagacccacgttccacctggttctatcatcaaattgtgtggtctcggacaagttcctagacctctctagttctcagttgtcgcatatctgaaatgagacgatggtgctgatttccctttggattaatttctccttggattaatttctctttggtggctttgtttaggcccccccttcatttccatcaagactttctcatgtttcagtttcatatggcggagggcttgcctggctgcctcattgatcactgtgaccctcgcctggcattcccatccctctttaccctgttctgttttttctttattttcatagcacttatcacttttctttctttcttttttttttttttttttggagacggagtctcgctgtcttgcccacgctggagtgcagcggcccaatctccactcactgtaacctccgcctcccaggttcaagcaattctcctgcctcagcctcccaagtagctgggactacaggtgtacgccgccacgcccggcttattttttgtatatatgtttttttagtagagaygggatttcactgtgttgcccaggctggtctcgaactcctgagttcaggcaatctgcctgccttggcctccaaaagtgctaggattacaagtgtgagccaccgtgcccagcctttatcgtacttagcactttctaacagactgtatgtttttttaaatttgttgtgtttatttttatagacaaaaaacacatgttacctttgctggaatgtaacctaattaaggggcgaaatctttatcgatcttgtgcccagaccaccttgaagccatgaagggatgctcaggaggctttgttaaatataaaacaaattctgaaataaaagtgactattaattacttccacagttgatggcaggaaaaaaaaaacttcatctgggagcatcggtttcagtttctcagctcagaggcctctttttgtagctccagggctgacctttcaacgttggctcacatcagccttctccatcatgagtcttatttttaaaaagtacaaagtaaataccacaaacaggtattgtgacttgtggaacaagttgtcgagaaaattacaaagaatagttccttctgctgctatctgcttagagccagcctggctctaatagctggggcctttgtgtgttctcttcttgggcataaagagtttcacagaatacaatatagagtgatggagtcactctatgttggtaatagaacaagacaaaaacaagaccactcaatcatcaacactgagcacagataaaagcaagatyactgcaaggcacaaaaacaaccaaacattccccagtctcagctcacacgaatgtttctttaccgattatggctttagcctcattctgttcctcctgcctcttagataaaaattaggaagctaygtcatcataaaatttctgctctgttgacagcacccaattcagagcaaaactacatttccctgagcctacccctaaatcactgaacacagtccaaattgtataatgagctcctcctgacatcctcttgctgagatctctgaaattctgcctgttgtagtgtccaccttgctgcagtgaaccaatgaacccaactttgtttgaccacaggtatgttcctggtagtctttaactggagccggtggcatagtcgcttggtgaataaaactttgtcctaggcatcactgtagaaatgtgtaggttattttacagctgaatggtattgaatagacatgtacacagtttaattggagagctgagtcacttgataattgtggaaacagagcaggatgtgacagaaggcagaaatgcaaaggttgggtaagtgtgcctcgaagtaagtgacttgagagaaggagaaagcctagaaggctggggcggtagagagaaggtagctagggctggaagacacagtggggtcttgagtaaatcgcttgtttaggagtcaagagacccaaggtcttatcctggatttactgcatatgagctgttaacaagtccaattgttaggtttttcatttgtaaaaaacagggtcagtaatctctcctccttatctcacatggtagttaacttgtgtgaaacaccttgtaaagtgtcttgtgctggaaaagtgtaaggcctggctctaattgyggagagaattaaaaaacatgcagtttcaaggtgtttcacccataagccaggtgccaaatgatccctctctgtcttccaccacccaaastttagaaatgggggttgccataggaaccttgtcattatcattcagcagctatagacttgctcaggtggtgtctttttttttaagaccggttaggttacttatagggtcttgggagcaggagtgtggtgggaggggcataagagagaggcagggatagaattagaatggggagccagcaaaactcttcctccatcagatgaggggcctgggatccagctgctacctttatgccctccgccctatccccctccactctgagtcagacttggttgttcaaggatttaaatgggaaaatgtgttagccagattatccttccaaataaggttataaagtctaccgtattaaagaggggaagatttccttctgtggaatttcagatcttgataatagtaatggtaataataataatacgactgtctgtcatttattaggtgtttgttatatgctggacactggattcagcatttgtgggtgttgcttcctttagtacttgcaataaattcattgttatccttctttgcaaatgaggaggcggaaacctagaggttaaattacccacccacagtcaccagccagctggcctcacagcccagagttgaactaggtccctctgacctcaagtgcggaagacttaagactctgctccctggtttccttgcagataatcctaggatatgagagctattatctagaacactcgtcttttagatgggaaaataggggttagaagaggtgaaatccctgtttgaaggccgtgttattgctgctgctggtggtagggcctgggtgtggcccgagatcttctgatcctcagtccagagagtgaataggacttttctcctgatgggtttaaatatgagtggttgtggtcgctggcagtttctgcaacagaagtatggtcctccttttacttttctgtggaaaaggccctcaagctacagaaccagatmattgcacccccaccccctaccagccatctgaccctgggctccttctttaatctctccatccctttgtatttcctcgtatggaaaattgggataacaactgtacctataccttagtattgtaataagaactaaaggagtccgggcgcagtggctcacgcctgtaatcccagtactttgggaggcagaggcgggaggatcgcctgaggtcaggagtttgagaccagcctggccaacacggtgaaaccccgtctgtagttaaaatacaaaaaagttagctgggcatggtggtgctcatctgtaatcccagcttcttggaaggctgaggcaggagaattgcttgaacctgggaggtagaggttgcagtgagccaagatcgcaccactgcactccagcctggacaacagactgagactctgtctcaaaaaaaaaaaaaaaaaaaaaaaagagaagaaaagaaaaaagaactaaagggattaatatgttgaaaactcrtagcctggtgtctagtacccagtaggttatgagtgagtactgcctgttaataatgtatcgcatccctcgtttgaaggatgtagtcctaatttgagtttttttcagtagactggagctcctgccctcaccctrtagcattcgtatcctctgagatacatggatactgttgaagttatggtgaagatgatggggtgctgggaggtggagtggaatgggattgattgatgaaaaaacgacattagcttgctaaggacacccaggtggttgagatgttctgcgaagtgggcctgtgtgtctgctggacctggagttgaggrgacagctttcttctgaggcagcgtcttatcctggggtgactccgggaggcaaaagcattaactattgatgagactgawgacacactatcattcctagaccagaaatggtgcaagaacagagagsatttatcctgctcttctttctctacacagtccctgtgtcagagaaggtgtctgctgagtggacaggccaagaactgttctctgggacggagtgcagatgaagtagggggtgtaaacccatgaagaacaatgaagcagagcgagtgaagcaggacaggctggggtggaggagaaagaatttgcctttattgtgcaattagccttttsgattctttaaaagctttaggagatagtgaatatgkccctccaatctacagacccgaagaggcatctcrggaaagtgatttgcccagggggacagatcaaggacctgaccccaggtccctctctctgcctcagaggccctctgggatccattaaagggwcttgtcttgagtaattaactgaatactggtttattcagaatgaggggtctttaattgggggataggcatacctttggtaaaaccactggagtttttgggcccagtgtctggcagtgtgcaaggagcgtggggcatctttggcacaacgcggcttcaggaagagcyctccttcccttcctgagtaaggcagagtttgagtcaggctggggtgggctcctggtgtggggacaggttattgtgggtgctggagggaatgactttcactctgagtcattcagtggcctgcaggggtgcagggctgggggtggagagagaaatagagggctggccaaagactctcagtgcctgccctttcttacccctagggcccatgagcctggtttaaaaaccgcttatccaccacctcgttttcattctcacacactgagtcctttagacgtaagcctgttggtgaggaagrctgttgcagtggctgagatgtgctgggcgaaagattttcaactagtcttttcctaataagcacctacttgtttatattctgagctttcacagcagcattctagaaaaaagaaatacggaggactcaaaaaaaatacgctgcctgatttagttttgattgctcacgtctctggcttctttcatggaactattaattgactatagggagtagctgcttttcgcacaataagctcctagtcatgaagcaaaatggtgacattgatcattttggggtccctcagactctggcaacgttgaaacaggctgtcagttttttttgtaaccaccagttagcatgagtgggggtggcagaaattaccagtttgatttttgatcaggggctatggcttatacttaagctatttggagggaggagaaagcgtgaatgagcgagttaaggcagtagaaagatggagccatgctgggtttttaggcagttgtttcaaaaacaacacaaagtgagaaatggtgaaaaccaggaactgtttggctttttctagtttacaatgagagaagaaagatgtttggggaattttagaagacttgagtctatcgtgtagtacatctggtggagtccttgtacaggtsagttcacrgcgtaccactgcttagaagtggactggatttaatggggctggctatttattcagcaacaacttattattcaccttctatgtataaagcactactctgaataaatgtcttctaaattgttagaatctaaactatactcaatattgttaccatgtgaagcatatcttatggaattatgattttttaaaaaactgttactcccatgtcattaaatgaaaagtttcagaacaatggtagttgaatgcagtttgggtaaaactgtgaatatctaatattctatatttgtgtatgcatgaaacattttggaagatggataagacactgtaaaataatcagtctaataaagtcagtgttttaatccatggttgccagcatcacaaaagagaaacaaccagatgtcatgtgcctcttgatggaactttatcggggaacctgccccgatagtcacgtaggttcttttctattttcctaagcgtcggctggcttgagaaataaaggacagagtacaaaagagagaaattttaaagctgggcatccgggggagacatcacatgtcggtaggttccgtgattccccacaagctgcaaaaaccaggaagtttttattagggagtttcaaaaggggagggagtgtacgaatagggtgtgggtcacagacatgaagtacttcacaaggtaatagaatatcacaaggcaagtggaggcagaacgagatcacaagaccacaggacmggggtgaaattaaaattgctaatgaagtttcgggcaccattgtcattgataacatcttatcaggagacarggttttgagagcaaccggtctgaccaaaatttattaggcaggaatttcctcttcctaataagcctgggagcgctatgggagactggagtctatttcacccctacagcctygaccatagaagatgggcacacctagtgggggcygtttatagacctatacccccaggcatgtattctctttccgagggatgttccttgctgagaaaaagaattcagtgatatttctcccatttgcttttgaaagaagagaaatatggctctgttcyaccwggctcaccgttggtcagagtttaaggttatctctcttattccctgaacaattgctgttatcctgttcttttttcaaggtgcccagatttcatattgttcaaacacacatgctctacaatttgtgcagttaacgcaattatcacatggtcctgaggcgacatacatcctcctcagctgacaggattargagattaaagtaaagacaggcataagaaatcacaagggtattgattggggaagtgataagtgtccaagaaatcttcacaatttatgtttagagattgcagtaaagacaggcataagaaattataaaagtattaatttggggaactaataaatgtccatgaaatcttcacaatccacattcttctgccatggcttcagccggtccctccgtttggggtccctgacttcccgcaacagaacttggatctgttcaagaccctagatctagctatgaagtcacaggaagtatacagagggcagagatgcaggttaaatgacaaacagagasgctgtcatgaaaattcagacagcggaaaactctgtagaaaaacagctctgttcttcaccaaggaaattgtaaaggggaaaatttgatggcactggtggcttgtggattttagatgaagttaaggaattaatgttcttttcttagtgtggtaatgaaattgagatttaaaaataaagattttgaaaccctyaggaccaagatgatagtatatcgcggatttgcttcaaagtaatcacggggyggggagaaagggagtcatgggaatgagtaggttagagaggaaacaaggctgtaattatcatgacttgataattactgatattgggtcataggtacatagggactctcttgttttaatgtttttaacatttttcataatacaaatgttaagtgaaataatgatttagtctatttcttagccatttcctaaagatatgcattataaggtccattataggccaggcgtggtggctcacacttgtaattccagcactttgggaggctgaggcgggtagatgatctgaggtcaggagttygagaccagcctgaccaacatggagaaaccccgtctctactaaaaatacaaaattagccgggcatggtgacgcatgcctgtaatctcagctactcaggaggcttaggcaggagaatcgcctgaacccaggaggtagaggttgcggtgagctgagatcgtgccattacactccagcctgggcaacaagagtgaaactctgtctcaaaaactraaaataaataagtaaataaataagatccattatacrtcccatcctggaatttttcaacttgatgtgatgctacaaagatgatctagttccctaatatcattccatgaacttctaggattctgggtttcccaggggctgggggaggtaagggagagagactcaggtaagtgggactttagaatcctgtaaatacacttcaatcacagatgcgtcacctgtgtgttttagatctttgcatttcccggaagattttattggggacaaaaagggggcttgttatttatagaaagaaaagtttgaggccaggcgcggtagctcacgtctgtaatcccagcactttgggaggccgaggcgggtggctcacgaggtcaggagttcaagaccagcctaaccaacatggagaaaccccatctctattaaaaatacaacattagccaggcatggtggtgcgtgcctgtaatctcagccactcaggaggctgaggcaggagaatctcttgagcccgggaggcggaggttgcagtgagccgagattgtgccattgcattccagcctgggcaacaagagccaaactccgtctcaaaaaaaaaaaaaaagtttggaaaccacactcttattttataaacaaggaaaccaaagcacacagaggggaggtgatatacccaagttcgcacggtaggcaagtcgccaatccccagaccccatggcagctgtttttatgctcttcagtcatgccggtccccagtcattacccttcagacctcttgcacaggggccccaaggaagataggtcacctgcattccagcttccagtgctgcctgatcgtcctaagtggaagctgtgctgaaattgaaatcacttcctgtgttcaaagcaccgaaaggagagccccattggagatgcacttactgcatgctcccagctcccagcttgctctttactaaactccctgtgccagggagcattatagcaggaggaatacattgaatttgggaaacaaacagtctcattgggactcttcctgggctagaaagcctgtatgttgaacacttaatcatttttaatgcttgtttcacctgctctcatctttatttgccctcaataaaaccaagaaaccttggacggtctcaagaggtatcctgtctttcagggttagggacactgtggaacacagaatctagggttgcaagtcttgtctgtaaattggaggttttttcttgtcttttttttttttttttgagacggagtttcacttttgtcacccaggctggagtgcagtggcaccatctcggctcactgcaacctccgcctcccgggttcaagcgattctcctgcctcagcctcccaactagctgggattataggttcccaccaccatgcccagctagttttttgtatttttagtagagacggagttttaatgtgttgggcagcctggtctcgaactgctgacytcaggtgatccgcccgccttggcctcttaggaaagaaaggagatgagtaaactagaagtgggaggaagggtgccgggaacagactgtgggaacagagttgcacatatattctcttacggccattttggaccagtggcctttaaacttcttttactgcactcaaacctgcaggataagacttgttttcatcagtaacatttgagtagaggtttggccaggttgtgggtacagggagggcttggggcaggggtgggacctctggagaggatggtggtgggactgctagagggtttgagtgcggtttgaataaacccccatatgcattttggatcttcctgcatccgctactctttccctgtctacctctgttgagacctctttaattttttatttttatttatttatttatttatttatttattwttttgagagggagtcttgctctatccctcaggctagagtgcagtggtgcaatctcgtctcactgcaaactctgtctcctggggtcgggcgattctcctgcctcagcctcccaaagtgctgggattacaggcatgagccactgtgcctggcccaaagtgccaatccttacagccaccctctctgccttccagtctggaagggacatactcccgacccactgcagtatactgaacaaagatgttcacacgcacagggcggtggggaaggagagctgacccattcacaagcagggaagatagaacggaaaatcaaggacagcttcacagaagagataaagcctgggttgggttgtgaggatgaaaaggatgtctkccaggaaggctaggagtatggaaatccagggccacgtgaacaacatagacaggacccccccagaggaacaaaacagatgccctgtttggagaactgtaggtgttgtggtttttttgttttgttttgttttgttttgttttgttttgtttgtgctagaatgggaaatgtgagtgagagagagcaacaggtaaaatgctggagacattctcaagagtracatcccagctgccctctagatcagtagccattagcggcatgtggctactttaaatgagttgaaatgaaataaaattaaaaatacagttccttagtctcaatagccacctgcagctagtggccaccatattttagagcacagatgtagaaaatatacatcatgactgttgggcagtgctgggctgaatgtttccttatttggctcacatctgtcaagctgcacctggtgtttcgtgacacctgcacgcgtcaggttttggagtggcttgcttcgttttggtagaagagcctgtactggctgctcagggccacagtggatgtgccagagagattgaatgtatagttagaagcaatgtacaattgctsaagatatgaatattagtaactttgttttattttttagcactgctcagatgaatatawaaaaatccgaagaaatatgttatttcccctctaagccagcagagctactagttttattaagcagacaatggcaaatctatttttaatttaattttttattaaaaaatgccctactgcttgagattctaatctctagctgaatagtaagtgtcattttcgagttgcgaatcgccagagcaacagcgtgcgtcgaaggcacttaataaataggattcggtgctttacgtccgtgtagagacaaaaatagatcaaaaagcttttcgcttttacttttgagtacagtgttctgactttctagatggtaaggaaccatttagaactataaagggatttcgatttcgataacagtaactgtgtttaatgttacaaactttctattttgtaagtggctttctttgaagtcctgttggcagtttgttaaatattttagactgttatttgtgaccaagaggttcagtttggaggactttttgtgattcacccgtgtgctttaaaataatttgccactatttttggagtactcggtcccaggagatttgtgcatgagtcctgattttgtctcttagtagcagtgtgactcwgggcaagtcacatagcctgtgctgaggatctcttggctttctgactttgtatttattcaccctgcttagttttcccagggagacccacactcacacccaccctttagcccatggactttggtggagatgatattgtgcagggcttcagggggagacataggactcagattattcctaatactggcttatagtaattggcttagaggtggtttcatgacctagttggagcccacaagatgtgatgaggcttttgttggggctgttgagaggtatgtgtgttctttcccactggccttgaactcagaggttggagctgcggatattgtagctacatccaacctagtagctgtcttgctactgcatggcatctgagtatgaagtccgtgtggatgagagcagagctgaggtggagaggraccaggccatctcctggacccagatcaaaccttgccacagggtagattcacctctggaccttacagattgtgaactattcagtcctttattttgcctgcattagtttgagttggattttctgtcactttcattggaaagctccctcaaaaactctgaaacattttttgtacatttgtaagaggaaaaaaaaatgagagtaacagaacagacgcaccttggcttagcatagattgcatcctgctaaacccatcgtaagttgaaaatatcaagttcaaaatttgcgtttaatacatttaacctacattacagcatagtttagcttagcctgccttaaacatgctcactttcattggcctgtatttgggcaaaatcatgcaacctaagcctaggtatattaaatactgtactgaaaatgaaaaacagaatggttatatgggtactcaagtatagtttctattgaatgcatattgcttttgcatcatcataaagctggaaagtcatccaggtgcagtggctcacgcctgtaatcccagcactttgggaggctgaggcgggtggatcacttgagcccaggagttcgagaccagcctgggcaacgtgacgaaaccttgtctgtataaaaactagaaaaattagatggkcatggtagcatgtgcctggggagtttaggctgcagtgagccgtgatcacgccactgtgctccagcctgggtgactgagcgagaccctttcccagaaaaaaaaaaagctgaaaaatctaagtcgaattatcctaaatcggggactgtctgtacttaccttatatctagggttgctgtaaagatgaaggagggcaatagatccaatagtactttaaaagtggtaaaatactagatatttgcaagaaaagatgctagaacctttcacaccaaattttgactgtgtgagaaataaatcaacaatgtagtttcacagctccaagctaatagagattaractatattactctcagtattttgccaaagtgagttggtctycaaaaatagttttaaaagaatgtatgtataaaaagtttttaaagacaggaagtaaaactgcaacaggatttcttattcatttttatgaccatttttgtcttttaaaaactaggtccctttttatgcatggattctattatttttcctagattttacagtgaggggatgtgcattttcttgagggggtgccgatttggtgcagtgctgctttgcatatattattaaatcaaatagttttataattgaatatgaagtagggcaaaatcctaaacctagttagtatgggtgtgcatttcctgcgtattcattttcctgtgttggtttacatagtttcttaccaccttcaattcggaggcattttagaggcattttctctartgatctggcccatagatcgtttcataagtaaatgggatcagcagggttttatgtctcctacagcagaaggtgcctgggctttagggttgaatgcatctgggtttgaagcctggagcccccacgtttcctgggtccaggtgatcttctctggaacaatgaggggcatagttcattgtagtaggcatgcatgaaagttagatgaggtgacgcaagtcaaagtgcctcatacctggtaggtagttaataatcgcttttcttatttttttatttcatgtaaacgtgtgatttgaaggcagtcagtctgtctctagggaaattaagaattttagcaaagaatcaattggtccccatagcattcatattttaactgttcaggctactaaatcttattctcactagttgttctgtttttgtgatctatacaggctgcggtagaatgagaatgttctctattggcatgctaacatatggtcacttatttgttcagttatttatttgtttgttccaacatatgtgtaaatggggatcttctctgccaggggttgaggaaaacatgcttttttctcgctgatatggtttggatgtttgtctcctccaaatctcatgttgcagtgaaatccacagtgttggagatggggctggtggaaggtaattagatcatggggactgattcctcatgaatgggttagcactgaccccttggtgatgaaacagttcttactcatgagaaatctggttgtttaaaagaatctgagacctcctccctctttcttgctcccacttttgtcatgtgacgtgtctgctcctcttttacctcccaccatgattgtaagtttcctgaggccctctccagaagtgcagaagatgtgggtgctatgcttcttgtacaagcctgcagaaccatgagccagttaaacctcttttctttataagttactcagcctcaggaatttctttctagcgatgcaaaaatgaactaatatcctaaattatttcttgactttttggtgggtctatggactgggctatttctgaagccactgtttaggtaaaagcattggtttctatcagaaattctacattcacttcctctcctggcaaaggtttttctattatgggagtagttcattcctttcatttttttcctccctgatataaacaaaaaacgtggagagccgtcacgggtaagatggattggattaattctgcagacacaatcagggagacccaggagcctttgggggagtgagggagatgaacatcatctcaggaagaacttttaacctctggaactccccaccagtaggacrgactgttccagaacgcagtggtgatctactgccaaagatgttttattaggatagaaatcgctaaaggacaattatttatttatttatttattttgctggggacagggtggagtgcagtggcacaatcatagctcacactgcagcctcaaactcttgggctcaagtgatcctcctgcctcagcctcccaagtagctgggactgcaggcatgctcaacaacatccagctaatctttaaactttttgtagagatggggtcttgccctgttgctcaggctggtctcaaactcttggcctaaaggaatcttcccatcttggcctcccaaagtgctgggaatacaggcatgagccactacacctgtccaattttttaaaacacattttttgagatcctagtggctgtatgagtcactgaagattgaatagacgagatttcagcagccatagtccccacatagaatgtcagaagcttgaagttccatgttactagagattgtgtaggggtaatgattgagagcaagagtctgcattctgtgggccagtctgtcttcctttagcccatgagctaagaatggcttttacatgtttaaagtgtccaaaaaaatcaaaacaagagtactgttctgtagcacgtgaaaattaaatttcactgtccataaattaagttttcttggcacacaaccatgcctgtttcctcttatctgtggttgctttcctactacagtgattgcgagttgccagagagaaagtatggcatgcagagcttacgtgatttactatctcaccttacacataaaaattttgctggcccgtgttctaaagtagaatatcctcaactttcccaccctgaaactttgtggaaaatgataatgtttgttcagtgtactgggataagtggaagatatcttgctggcctggggctgaaggcaccaccttagcacacctgaggctcatttggggcagagcctcttgaagttctcattgagagccggctctggccataggcttcagccctacctgcagctgtttgatacgaacacactcacctgggtcagctcttcttccgaggcatcctgaagatgcctcatggactcagatgatcatagtcatctatgtagctgactctcacaagggttttcacrgtttacaaatgcttttcacttaggctgcttgctttttctctgttttcaatggttacgtttgtctctcacaatccttttggtcctggtctctctccacttgaattagcctttcttgaagatgttagggcatgcatgaaagtgtttgttgttaaaaaattcgtaatgttgcagggggagacaggacaggatatatatacatacacacaygtatatataaacacatatatgtatactatatatgtgtgtgtgtatatatcctgttcgtatccatatgtacacatatgtatgtatgtataggtgtgtgtgtgtgtgtgtgtgtatatgtaatactctctactccatatatatatatatggagtggcatgtgaaaattaaatttcactgcccataaattaaaagtattgcaaaatccctgtgcctttggcatttcaatcacaatcatggatgtagcagtgggacaagaggctggagaaagcagggccagatcttatagagttagctggaggcgaagctcactctcccacatggaggtcccgtgtgctgcctgggttctagccacwttcttctatattgcttggttgtactacagttactattctgggattcatgcacgrcccatctcccttttcgttctcagtatgttcatggtaaactgctattayctgaactggcttattgagtctctgtttcttgtgatcaggtcataatggtagttggtacttacagtgttccaggtcttggcctcacactttacatggattaattctttttttttttttccagtaaggtagataatgatggccatccctattttacagataaaaaatctgaatcacagaagggttaagttactggtctaggtcaccagctaggaaatgagaggactgaggcttgaacccaggtggcttgttgctgaagctcattctttttctaccttgggctgccactcgaagccatggaatgcagctgagatgcctgggtgtggaacttggtgggaacagagggaacattgaaccttaaatgggtcacaaacctagataagtgagatcgggcctggtctggtacagcagttgtagaagttgcagggttcttggtgtgcaggaagcaaatggacaaaaaaatatgacaaggctggtccttggtcctgctggcctgagggaaccttccagttttctggcagggactgtgaatggggagactaacacagttgacaccattgtgtgccaggcatttgttactgtatttaatcctcctaataactctgcaactggtggtcttgcttccattttcccatattacataggagctaccatgctcagagaggtagagagctcccctaggatcaactagtgaatgggggccagagccagaatttaaactttggaaccatctgcctccactgtctttcctttccatcacaccagctctgtaggaagcaggctgaactggactgcactctagtcactgtcaacctttcctggtcacggatccctttgacagtctcttgaaatgtggcctcttccccagaagtgcttgtttgtgtacatgtatgcacacagaattttgaatgcaaaatctggagctttacagaatcccatttatgggttcagagctgtttctgactttgtaaagtcaagctaaaccggagctaatacagttgggaggaagaggaatggagtgattgctataactactggcttcatctggatctttttcctgattagcagtgactttgctcattctggtagttaacgcctaatgtgtgttaggttccagacccagacctcacatgctcgattttatttcaggactgctttaaccgtatgcctcaatttcccctattttaaagatgataaaaggaagcttggaatttggacatttatccatgccaggtgagctggagaacctggcttctaacttagctcttcgttataacgactttccaaataggccgcagttagtgccagcaagtctttagcatgaataagtgagtgcttgaggatattgccaggctctcaaatgtcatttctcacctgtctctgttaggcagctcagatccaccagcctggggaatgctgctgaatttcggtttttatcctgaatgccatccgatgcattaattaacatgactgtgaaagcacctcacactcttggagggttatagaactaggaagtccttgcagcctctattgcaggcagcagtgcagttaatccctgctgagacagtgccaagctgtccagggagttgaaaatcacaggaggtttgcaaagacttgcctgcctttacagactccaaagtgtagaattgtaaatgacaggacacttaaaaatgccacatattgtgtgaatgcttctctagcagtaaaatattataccaccataaagcccttatgaacatgtaataataatttctgcataagcaccagcaataaagtgaaattcagctccatccagttttgcaagaattttccctggtggagagtgctagccattgtgtgaattctcatctgggtgaagagaaacaaaatccatttctctgaacatggttattctttgaaatagctttggcctcaaactttagagcaaaaattatcctgcatgggaaatgctaactgtatcatttctaaagctgtagctttgtcgctgaggcatattaacatgatagaaacttttccttggggctcatgacttgcctctgcctgatttttttcataaacttaaagaccagtgaatggagtgagcagtgctctcttgaaaattcacttttaccatttggcttttttaaaagaaaattttgttcatcttaaatgtttatagtaaaaactatagaatgggatgataaagaaaacttgctcatattcctaccaccctccagttattgccgaaggtactttcactcgcgtccgtgtgaagagaccaccaaacaggctttgcgtgagcaataaagctttttaatcacctgggtgcaggcgggctgagtccgaaaagagagtcagcgaagggagatggggtggggctgttttataggatttgggtaggtagtggaaaattacaatcaaagggggttgttctctagctggcaggggtgggrgacacaaggtgctcactgggggagcttttgagccaggatgagccaggagaaggagtttcacaaggtaatgtcatcagttaaggcaggaacctgccattttcacttcttttgtgattcttcagttacttcaggccatttggatgtatacgtgcaggtcacaggggatatgatggcttagcttgggctcagaggcctgacaggtacatattttatattttmttgattatgattatttttgctccctatttgtctgaaagctctactagagaagaaattttgtccgttttggctgctgtagtatccttagcccttaaaaagaccttatcacataatagatgctaaacaaatattagttgagtaagtattatattcttggtgatagaaggagtcaggctttattaccttgaatcccagctttcccactcggtggctgagtggctccagtaagttattcagcttccccgaattccagtgttctgctaaaatgacaataattgagctgggcatggtggctcattgcccgtaatcccagtactttgggaggctgagatgggtggataacctgaggtcaggagttcgagaccagccggaccaacatagtgaaacctcgtctctactaaatacaaaaaattagccaggcgtggtggcgcatgcctgtaaccccagctacttgggaggctgaggcaggagaatcgtttgaacccaggaggcagaggttgcagtgagctgagatcacgccattgcactccagcctgggcaacaagagtgaagctccatctgcaaaaacaaaaataaaaataaataaataaaaatgacaataattgtgcacaaagactgacctcacctagtgtgttagtttgctagccctatcgtaacaaggtaccacagactgggtggcttaaatgataaaaatatattctatcacagttctgcaggctagaagtccaagatgaagttgttagcaaggttggcttcttccagggcctctctccttggcttgtggaaggctgtcttcctgtgccttcatatggtttcccctctgtgttgtatccttatctcctcttcttataaggacactggtcattctggattagggcccactcatacattcccatcttaccctaataacttctttaaagatcctgtcttcaaatacaatcatattcttaggtactgatggttagaactttaacatatgcattttaggggaggcacagttaagcctgtaaccgagggtcactggtttgattagactttataattggtaatccgccattcagatgtttcagtattacattagtttcaaatctaattgaggagataatgtaataaaaggtaaacataaataaaagtcagctacctctacargctgagacatcatctgcttggtgagcacagtgctcttggggttctggagttgactgccacccctgcactggggcatcctgcagttctcccgaaggatgaaggcacaggtgcctctgagacttactgaatcactgtggcctgtgtttacccacctgagggcagtcaccacacctcagaccagatgggcccgtagtgcctgccaggccatgtctggcccagtccaacaacagtcgtctaataacatttagcacttattgagtgcttactgtatactggacatagatcctgggcctcagtccagagttccagttaactgcatgtgccagaccacacagcatgtgccagagtcagtgtcaggctctgtgctctcttgcctgctgagctggaccggttcccagggaagatatctttttgctggcagctgggagccccagccagtagcaagtctggggctgcagcttaaacagcctatgcacagtgggtacagtcagctgattccgagccctctggggttgccscatcttaatcgacccttcctgacttccatgctgttgaggcctgtattggagggtccaagccacagcttgcgtgaagcctgggggctctgggtccaggctcccttggtcactgacagcactgacagcactgtcccttaacactgacagtgtgttaaggctcgagtttgtcccatgggccctccagttgtgttttggacctctgtacctccattccctctcagttctgttcctgatctgtcttgttctttagacagagctcacagggtacctcgggcttgggctttgctgtctgggacttttcaccgatgagaatgggactccatacatgagagaggaagatggctgtgtgctgtcttctggttctggagctcgagctaagtgagctctgcatgtttgagcttcctaggaatctggtcattatgactgataggtgccaggactcatgctgaaggtactccagtaagaaaagcacggtattatgggagcccaggaaaggggccactgactagaggcttccagggagatgtttgattcctgaatcttgaaagctgagttggtgttagctgggtgaaaggaagaagggagggctttgcagccagtgggaactgcaggaacagaaaggtgagaaacgtttgaggtgtgaaagagagcattattctagggctgttactacccatgtccagaagcttacgacttggaaaggtggagtggttgcctcgggattacgcctgggccaggctgggaggggctttgtgtgctaggccaagcagcttgaacgttatcctctttggaggctcaagtctgtgtatgtgtatgtgtgtgtgtgtgtgtgtgtgtgtgtgtgtgtgkacatgcatgtgtgtgtgttgtgttaggacctgaccctgtagcttccactgtttgctagtggtatgtctatgtctgagtttgcaaactgcaagttcttgtccagttatctttttttaaaaacttaggaatacttttccaatccaatcgctggttttgggaagccactgtgagtggcttgagagtgctcctctggccccaggggccacttagggacctgggcaggcatcggtcctagggcaagaggagaagaggcagcttccgatgagcctcccactccgtcctcacggcagggctccccgccctctcacctgacatcttccagctctccaggccctggcttcctgtcttcagagtgttctggaggaacaggaaggcaaagcagagggggggtgcatgtatgcacgcacatgcaagatcagaagggactttttacgaattctttccttgacactcctttttttgtgtcrcaactttgcctgtgaacccttagaatctctgctaatgagccggtcgcagtggctcatgcctgtaatcccagcactttgggaggcagaggcgggtggatcacctgaggccaggaaccgagatcgtgccactgcactccaggctaggcgacagagcgagactccrtctcaaaaaaaaaaaaaaagaaaaaagaaaaaaataatatctgctaatatgtgagcagtatcatcgtcatcaccaccattgtcgtctacattgctgtggaccaaatgtttgtgcccctgcaaaatccataggaaacctaactttcaaggtgatggtttaggcctttaggtgacacttaggtcatgaaggcagagccctcatgaatgagattaatgcttttatataaagagacctcagagagctccctcacctcttcttctwcgtgagggcacagcaagaagactgctgtctgtgaagcagcaagggtgccctcaccagacacygaatctgctgcttcctgatcttaagcttctcagcctccagaattgtgagaaattgtttataagccacccagtctatggtattcagttaaagtagcctgartgggccaagagaacaaccaccaccrccattgtcatcatttccagtctctataagcttgcttgtatcagctttgcttgaggtgtgtttaattckcacagtaacygtaggagttagatacttgttgcatcctcatttcacccttgaggaaactgaggcagggaaatgttcaataaattgtccaaggtcacacagctgataagtagcagagctggagttcaaaggcaggccatctggcacaagagtcrgctttgaaccatttcctcctgcctctcstggaggaaatgtgtccctgacaattccttcacctgtgagctggaaggaaggaagaactcgacagcagccagctccctttgcctcggcatctgcatggtgttggtttcttcttcactgtagagctcccctaagttttatgttataatcaaatgtggtcagcatttgcttatggaatttgatttagctggacagtgtctctctgtaaattttacagatggagtgtctcytgaagacagagtggccatgggtctcaggccttgggtgtcacrgtgggagcacacacggttgctttaataaatgagcagagagcatggttggcacccggcccaaaggaccttgttgaytggtgggcacatggtatgttacatctgtcattgtgagagaattcctcatcttcccacagacattatcttgccaaagcacttttgcttccatctcatcctttccttggacaagtcatctataatctctcaagcaggggcctkgtctgcctcctgccttcacccttgtagggaatggtggtttcttcttaggatgactgggagctccttggctcagaatgggttaactccaacccgggctgcctcctgaggacctgtccccctggatcactgttggttttaatcttcattatcttgaatggcaatgctgttagcacccaggaggggtccttgaacagccagatggtggctggatttttctgccagtcatcagttttcatctgattgcagtgcaggtgcagggaggaggaggggttttagtagtccccatgccttccagtgttcaagcacattcctccaggaaccattaaaggaactattaaggctgggagaatttttgagaggtaatatagtggattcattcacttaataaatatttattgagcacctactgtgtgccaggaactgtactaagcaccggggatacagraatgagcgaagcaaagccctgtcccagtggatcttatagtaaacaaacaaataggtatgaaatacgtcaggtggcatggagtggtgagaaggggaaatatggcagtttaatggtagtggggtcagaggctctctgggccatgcgtgaagggtgggatgatgctgttttagaaaaagagactacaagaccgggtgcggtggctcacacctgtaatcccagccctttgggagactgaggtgggcggatcacttgaggtcaggagttcgagaccagcctggacaacatggcgaaaccccgtctctattaaaaatacaaaaattagccaggcacggtggcacgtgcctgtaatcccagctactagggaggctgaggcaggagaatcggttgaacgtgggaggagttggttgcagtgagccgagatcacgccactgcactccagcctgggcaacagagcaagactctctcaaaaaaaaaaaaaaaaaaaaaaagaaaaagagacttcacaaagcatctctgagaaagtagcatttgatctagcactgaatgaagtgagaaagcgagcctctkagataattgaggaagaacattccagcgagagggaatagcaagtacacggaccttgattagcaaggaggctgtggtggctgagtaaagctagggaatgctatacaccaaatttatgcacaaagaacttttttccttctcttcttgtagcattattatgttttctcattcatccgtttatgcatgcattcatttagtaattctttactgaagctaacattggtgttgggcacaacgttagggactgggactttagacttcagtgtgttcctttggggaaaccacaggggtgctgggtgctggcatggaaggtaccctcagagttgtctttctcaacgtcgcttacttctcactcctccttcatcactaggcttcaaagaagagcctgtggctaaagttttcactttcttagctttgccacccaaacctggcttccttcccacaagctgctgctgtgtgctgttgatgacctagttgtcagatctaagcacctttcttctatcctcatcttttctgaactctgcagtggcacttcatgccattgaccatctccttccttgtttagaagcctttctgtctgccttccttgaagaggactctctcmggatgccctggattctttragaactcccatccaatcacctgtgtcagcgtctctcttcctgcccttcaaaggcaggtcacctgcaggttctgtggcttcttctcatggatcaacttactcccttggtatgtgaattaccccatctgtcctactggcacctttaaacttagcatcttcagtgcagagctcatcttctcccctcctgagaattcttcctttacactgcgtctcttctggtgaatacacctttgtmcccttccgccatctcatttcttctcatctgcccaaatcttagcaatttctgtaatactctctgatatcatctcttttattctagttcttctgctccctgggctaagtcttccataggacaatggctttcaaactgtgcttctcagccctgcagtatgcatcacctgggaacttgttggaaatccaaattrtccaatcccaccctcgatctctataatccgaaactctaggggaggaggtgttgaggggagggcagcaatctgtttgaacaaagctctccaggtgacagtgatgttcctaaagtttgggaaccgctgaagtagacagtggaagtagcttccttcccagtctccgtgacgggcccacttggctctacaccacgatgtcagctttttcttcgaaaagaacagccctgatgtgatgcctcttctcatcacacgccctctgtggctcccgcattggccacgatgggacagatgtgagttcgtattgtccaggagtgaattcaggccagaacttttgcacttatttccacttttcggggctaacccagaattgctttttaaatgtacattatatccctttgtaaagatgtgtctcattttttgcagtccatgtgccaaaagtttatgtgtatttttttggcggggggacagaggggcgaggagggtaataggaccttcttttcagtaaactcttttttttgagaccgggtcttgctctgtcacccaggctggagtacagtagtgcgatctcggctcactgcaagctccgcctcccgggttcacgccattctcctgccttggcctcccgagtagctgggattacaggtgcctgccatcatgcccagctaattttttttttttttgtatttttaatagagacggggtttcaccgtgttagctaggatggtctcgatctcctgaccttatgatctgcccgcctcggcctcccaaagtgctgggattacaggagtgagccaccgtgcccggtccagtgagctcttttaaatgtcttaggagaaagcattgataaaagtagcttttgtttgrtaggctgcatcttctgggtaatccggggtgaattgcctccatcccagacccttttcaggtggaggaggctggggttaactgatttctaaggctatttccascttggatattctagggtgagatgggtgttgactctcatttatctgttttaaagggttaaatttttttttattgtttttttaaaaaatgagttaagatgagaactattgtaggccaatgataacaggctccaattcctgaaacctgtagctgttccctgatttggaaataggaaaagaccctttgtggatgtggttaagttaaggatcctgagatgagagaagcatggattgtccaggtgggtactaaaggcaatcacatgtctccttataagagggaggcaaggccgggttgatggctctcgcctgtaatctcagcatttggggaggccgaggcgggcggatcacracgtcaggagtttgagaccagcctggccaagatggtgaaattctatctctactaaaaatacaaaaattagccgggtgcggtggtggatgcctgtaatcccagctactcaggaggctgaggtaggagaaytgcttgaacccaggaggcggaggttgcagcgagccgagattgcgccattgtgctccagcctgtgcgacagagcgagactccatcttaaaaaaaaaaaaaaaaggtatgcaaagggagattgaacacataggagaaggcagtgtgaccctgagggtagagactgcagtcatgcagccacaggtcaaggaatgctggcacttatcagaagctgcaagagtcgagtaatagatgtgttttccctggagtccctggagggagcacagccctgcagcaccttgattttggacttctggcttccaaacttgtgagagagttatgtttctgttgttttaagccaccgtttgtgctatagcagacgtggaattttaccactatattaaaaaaagacagaagtgaacactcctgtgttgaaatgtgatctggacagcgggtctctctgtccttggcattgaggttcctggcaggatgtatgtcctcagcactgccctccccagctctgtgctcttactcaagagtggcagtttctgtctcccagccttgtccctccattataacgccttcccacatccacacctgctgttttgttttattaattgcagctggggaatgtagcagcttccagtctctgttggagtcaggattgatgggtagtgggaaaaagccacagtgggcttcgttccctctctctgtcaccatctgatatggttttgctgtggccccacccaaatctcaccttgaattgtagttcgtgtaatcgccagtgtcatgggagggacacagtgggaggtaattgaatcaagggagcagttacccgtatgctgttgtccttgtgttagtggtgacagtgagtgagttctcacgagatctgatagttttagaaggggctttccctccttttggtcagcgtttctccttgctgccaccatgtgaagaaggacatgtttgcttccccttccatcatgatygtaagtttcctgaggcctccccagccaccctgaactatgagtcaattaaacctctttcctttataattacccagtctcgggtatgtctttattagcaattacccagtctcgggtatgtcttttattataatttataaattacccagtctcgggtatgtctttattagcagtgtgagaacagactaataccccatcccatatttggggactggataaatatccgtattctgaaatgaacaaactgttctctggaacattcctttacaaaggatttccttcataatgcaaagtcatttggggctcctccatagtgctttgtagtagaagccagcattctctgcagagcaaactgggggaattgtctgagaagctcagtctttaagttgctcatcgactgatcaactgctggaatgacaaatcatagcattttaagactggtccctggagatgaccaaattcacttccctcatcttgcaaataagaaaacaaagacccaaagtgytcctgggatgagctgtagtagaayatagcattatacttggcccttgctgaccacctgtgtctgtcccttcttccccaaaactgtgcaaaaatatgttgctggacaatagctgttattatattcagtgttataaactgacatttattgaagccatatcgtgtaccagtacttctcttgacacttttcttgtattaagtcatttcattttcattatagtcctatgagttacatgctactattattagaaaatgtttggactttataattggtcatattttwaaattctggagtcaccattttgtggttaaatataaacctcgtgtgtagagtgggggtcatgtggttccagcacaggtcctcaatgaatgtctacaggtgaaaggaataacatgaatgagtgtgtaagtgatatggtttggctctgtgtccccacccaaatctcttgtcaaattgtaatccccatgtgttggaggaggggcttggwgggaggtgattgaatcatgggggtggacttcccccttgctgttctcgtgataatgaatgagttctcacaagatctgattgtttaaaagtgtatagcatttccccttttgctctctctttctccttccaccatgtgaaggcatgcttgcttcccctttgccttctgccatgattgtaagtttcctgaggcttcccagccatgcttcctgtacagcttgcagaactgagagtcagttaaacctcttctgcttataaattacccagtctcaggtagttcttaatagcagtgtgagaatggactaatatagtaaatcatggacttggggaaatacatataatgaagaaatgttggtcaataaaatgttagcaaaactcaatcgggcatgtggcatcaaccttttgggtctatcattttctcatctgtaaaatgaggataatgatatcagccttaaaggattgttctaaggatgtgatgggataataatataagtacttaccatgatggcttgaagttactgagcactcagctaatggcaataattacyattaactggtagacacttaacagggcaaatgaggaatgaaccatcactgggctgtggggtggtgctctcgggtaactgtgaagccctgtatcgagacgtgccctttaaacaggacagcatggaggaatgaactgcagatgactcagttcgaacaaagatatcctgaccccaaagggcagcagaaagagctctctccataaatgggcctagctggaaaattcctcactatctatggggaaggcacaatgggcaggagaagtcattggctgtgtgcagatgcatctgtctacagtcacactgtgtatagggatgagtcattgctgtgtcctcagatgcggagggcaaggacagggacaaatcatgtcgtcggacctatctgaggggtgcgtgaggctgtgttctggaagtgtggctggacctcatttccttttcsagttacaagttccatgtaaacttagataagctattgtaattattttttacttcctgatagatagcaagatggttaactgagatgaatatttattgacctctactctgtaccaggcactgtatcagattctgggaagacaggatgaaaacataaggcttctgtccttgggcagcttattacacaggcaaggaagccagcattaacaggtgtaccatgatgctgtgaaagcatttatacatgtgtacatacacacacacagacacacagcctttgggcagccaaggtatgtgctatggtctgtgttgaagctcatgaatttttctcatgggaagacctctagactgttgagtcatgacttgttattcttttttaatacatcatttatatttgtcaggatggattaggttgtgctatttatatggacaaccccgatatctctgtgtggttgaaataacaaagatttatttcttgtgcaacacattcatctgtggtwggtgtataggtggggtgttttattcttccccaggtaacttataccctgggatgctggtgtttccactagctggagtgtcatagatcactgtggccagaggaaattggaacttgggggatcatgttctacttctggcttttgcttacagttcattggccaaagcaagttacatggccactgctcacttccaggcgctgaggaagatcattcctacrtgtgactggaaggatagaaaccagaggatttctgatagccttaacgacttcccctttgttctgaccagctttttacatttacatttctttcttttaattcatattacttttttgagatggagccttattctgtcacccaggctggaatgcagtggcgtgatctcggctcactgcaacctccgcctcctgggctcaagtcattctcttgcctcagcctcccgagtagctgggattacagacgtctgccaccaccccggctaatggttgtatttttagtagagatggggcttcaccatgttggccaggctggtctcgaactcctgacctcaggttatcttcctgcctcagcttcccaaagtactgggattacaggtatgagccactgcactttgcatttctaagctcttactgtgcctgggctacatttgcatttctaagctatgggagatcagcacaacagtgcatttgaaaggggaacttcagatgccggccagaaacctgagcaagaagtgacaatctgacctctaagagaagtataggaaagccctgcctaccagctataagaactcaaactggggcagaatggaaccatggcatagggtagggctgattgtccagacatgtttgtagctcccaagggcacacatagtgctgttggcagcttagtgagatttaatgctacatagtgcctataccaggcatcaggccaaggttgggaatacataattaaccgggatcattaagaaaaatttagaatatatttattatagattacaagatcagggaagtatcttttcacttagttaaaactaaatatacccgcaatagaaacagctctttaaaaaaaaaaaaaaaaaacctaaaaaagtcacttaaacggaacctgagtgattgggacatcactgtttatagttttccatttccttcacatgaagtttttaatgcacttgggcaggcttttcagtctaattcctctgttcctatttttttcttatccatcataatgattgttgaagatttccaataatgtattgaaaattgaactcctttgatagcatatacacacatgtatgtatacatgcacacacctttctgctgggaaaaatatggrcttcagtggtcaaagggagtcattgattggggctaaggagggtacaagtcatcattggagcagacttgcctgttacctccactctgttccccttctcggcatgctcttagacgctctttacgcaggctggtggagagaaatctttctaaatacctttggctcactttcttggacatccttaccatctcattagtcagacaaacatttgtcagacgtggtttatatctgtaaggcatggtggggaaagaatgagaagtgtaagtcatggcctctgcactctaggagtttatcatttcaggatggggaggtaaactagtgtttgcttgctgtgtgtcaggcactgttccaagctttttttttggctgcaccatctcctttgaccctacagtagccctcagtagctgccatttttttctaacttcgtaacgatgaagacatcgagacttggagaagataaccaacrtcgtctgtgcttaggaagtgacagcatttgtgggtgaagctgggattctcctaatgccctctctgcctttgtcacaacatctgccagccatgaagcaattagagattcttaaactggaggagaatcttgggaggacagagatatttgtttgttctcttcaccactgtatccctggtgactaaagagaagtctgcaatagatacggtggtgattaaggaagattcctgccctcaaggagcttgcagtccagggttgtgaaactgacgagtaaatgtattgtgttggtgcagggtgtcagctaccctggaacagagagccatgtgggaggcagaagagggggtggtgcacttagcccaggaggagcctctggaggttggttagacagcatgtgtctcctgagcagcagcagggacaaggactagaagaaaagggcaagtgtggatatagcaagcctggttcaggtgccacgatgaatgagaaggtggtgaatcaaatggtagcattggggtagagaggaagtatagggcctggcaatataattgctgtgtgattaatatttttcttctttattttatcctatagtatttagctccaacactttaaaatgagaggctgtggatggtggctcaagcctataatcctagcacttcgggaggctgaggcgggaggattgcttgaggccagaagttctagaccactttgggcagcaccacgagacccccatctcatctctactaaaaataaaaaattagccgggcatggtggcatgcgcttgtagtcccaggtactcaggaggctaaggtgggaggatctgttgagcccccgagtttgaggctatagcgagctaggattgtgccactaccctccagcctgggtgacaaagtgagaccctgtctctaaaaaaattaataaacataaaatgagaatagaagttatggcaatatgctatgggagaaaataaagggaagaaaaattaaaaacatctattgtcaggccttatgtcagatcttatatggggggttttgcaaattttcattatttaatcagcataactattcctttaggcaggaagaatggtacattagttaaagcaggctgaatggacccccaaattcataatgacccgggatgtttattttgcactcacagaatgagtaactatgtggggtgagtgaaagcaggggaggtgtctctgctccacacagtgaccctggcctaaggaaacaccctggaccatccacatgcaagctctagacactgatgtccagccagcagagggcattacctgcaggtagggcccacatcacgctgcacatgtcctactggctaggacttggtcacatggtcacacctcactgtatagaggctaggaagtgtctcatcctgtgcccaggcyttggtgaacagctagctgtccacaaatggcccagagtataggagamgaaactgagtttcttagaaacacacaaatttccttagggttacagagattttttatggagtaggcaaggttcagattcagggcagtctttcaccccatgggaaagtggaaagggtggttgaggaggtggggattaaatgaggtggatttagtgggattaggtaattaataaaggtaacttaattatttgaagtcaaggcagttgacttcaacccttagatgatgtcaagggctggagctggtgctaaggaggctcggtggggaggtttgttggtatcagggaaattaaggatttggtgaaacagcctgtggatggatagccacaggcctgctggagttgccctggatggtggcgtagttggcaaggggagaaaaacctgagattgttagaggacagcagagggatagagcttgtgaccagaaggtctgaactttaaaaatgtcatccagagcattcatatgtgtggaatagctcatttttcagctctgccatgaactttgtagaatattagcgcaatgaagagctttgtactcacacaccactgggagaagacataatgagatatgatgatgggactgacaaaagttggctgttgtgatccatacttttggatcccaaagcccccaggagcccgtgtgaactctgaagtggtttgacatctgggactgggctgctggtgacgtcactccatccagtcctcctcaaactggtggcctttgaagttgtttttgagcatgatgataaatcagccatcagttggtatttattgagcacataccatgtgcccaagtaattaggcacccgtttctgggatggtgctgggaaataggaatgcggtgtagcctgcagccctaatcagaatctagttgtggagagactaatagaactttcagcccacccaagggagaccacagtgtacagacttcctgaaggtgggggaagtcctggactcttgccctgctgagttcttaccctgccaatttgcctcgaaaaagccactgggctccctggtccttgggtgtctaaagtgtttaacaaccaacaaaaatcacaggcaaatctgctttgttttcattgttcggtaggtatttgctgtgtatcatttcttctggtccatgaagcacagcagggcaggatacagagaggctgccctcaagaagcagaaggaacaagcttaatttattcaggagggaaragttaggcttttacaggctatcaacaaatactgattgggaacctccctttttctagggctcttctcagggccacagtcccccttctttctctcaggtcagttacaagctggtgcagctgctgaatgaacttcctccccycctcttttctccctcttattcttccttccttcccctgtcctatatttattcagaaaatattcattgaacacctacaatttatcaggctctggaaagacatccctgagtgagttgatagggttcctgtccttgtagagtgtatgttctccttgcagcgacagactacaaacaaactataagcaaatacgatgatttcggattttaacccatgccctgaatcaactgaagacagcagggtttggtaagtgacttgagggggcacagctggatgggaaggtgtgagtctcaagaagccctatgagaaggagctaccatgtggctggaggaccagtgcctaatccaagggtggagacatgaaccatccccatttttacaggagagaaactaaagcatagaacctgtccaaggttaaattagttgtggatctggggtctgaacctaggtcatctgcctgtaaaggcccttcctccacagtgtgaagctgcctgcaccaccatgctaccctgttcttccttcctctcctccccctttcctccctctcctccccctttcctccctccttcagcttctccatctatcatgagtggataatgattttgtcctaccttaccgctgacccccttgataatattgacctagcggggaagttgtaaggcataactaataaaaatgacaatgaagcatttgccaacagaaggtgtactactgaatgctaatatcggtgagagcytgtctgtgatgctagggcagatttattagacagctgtttagccagcatgagtttccctgcccccaacttcaccaggcagctgagtccagttcgagcagctctgtgctctagacttttgctgttacctctctgtggtcccttcttatctggatgtgcaacaacccaaacactcttttctgcagtggattgggcttggctgtcaggagaacaatggatagcgtgctgggtatgcagccatgaaggttgtggggtctgccccacgggtcccctgcgaaagagagagagagagaaacacaaacgagtgatctgtctatggctgtaaaatggggtggcagtactgactccctcatagagctatttcragcattaaatgaatttatatatatgcaaagggcttagaaagtatctaatagacaagtgctttaaatacctctaagtggaggtgtcagtacctgcaagtctactgatatttgactttgaaaatgtgtgccttcaaaggggctagatgggagacaaggctgttggcaagcaccaggttgtgaagaaacttgtgtgcctggcagaggcgaaccatagggaaactgccgagcctccagtgtatatatttgattgtatgtatatgtgtatgcatgtatgtatgtctatatacgtatacacatgtgtgtatgtatagaaacacatatatacacatataaatgtatatgtgtgtgtttgtatatacatgcacccctccaccccgacttcccagggtcttagctgtaggggcagattgtggtgggtgaggtcaggttgaggagaatgacttgagtgagagaggcacttakaggaggttggcagtgcgttagactcacttttcctggagagcatcctggaatttgaaatgattgagaatgaacactgcgttgtgaaaaggatattaattttggtggccagatatgcctgaatttgaatcttggccccaaaaacattgtctgtctgtatctgtctttctgtatctatctgtctrtctgtctgtctgtctgtctgtctgtctgtctrtctatctatctatctatctatctatccatccatccatctgtgcatccgtctgtctgtatgtccacccgccctcccgcctgcctgcctgctatggtctgaatgtttacaccccctcagaatttgtatgctgaaatctaacctgctgtgtgagggtattaggagctgggcctttgagcagtgaggtcttgagggtggagcctacatgagtgggattagtgcccttaaaaatagacacaagggagcctttcaccatgtgaggacgtagcaagaagacggccatctgtgaacagaaagcagactctcaccagacactgaatctgctgttgtcttgaccttggacttcccagcctctagaactataagaaataaatgcctgttgtttataagctacctagtcggtggcattttgttttaacaacttgaacaaattaagagtctgcctacctacctggaagccagactgcttatggaggatgaaaccaagcatgaaaatccagatgctgtcctgccctgttcatggatgaatttttgctcttcatttcttcgcccgcagcccacagaggttgctcgctgagtcaggcctggagttcccatcactcttagaccttttttatttgtaaaaacagtgtgggcatcagaacaccaggccatgtctttgtttgcttatttaatgacaacattgaatgcgaaagaggaaaagtttggagataattggactcaggagggttgcctgtgtttttggaggtgatgaacagttgatagtctcataagtagtacttatgatgatctgcaaatggttcagcagctgaatctcttacttccacggcacctctcctcgtgattttactctccccacaaaccctttctggttctctgcagatgcatgagactgcacactcacagggctctgctgagccgtctgcatggatgtgaatacatacatgccttccggtgtggttcacagaaagacagagttcagatccttgctacaattctctgctgagaactcatggccaggcagtctcttccctgaagtggcaagcccaggtgtgtgagtccctgggctgggttgatagacagatgtttgcactttgcacacyatcagattactaagaatggttcttggctgaagagtmctttctggttgtagaagccaccatcaaaagccagtccctcaaccacttattttaaaacagatgaaggcaacccagtgctttttctctgatggcacattctccccgcatgaggaaaggaacrtaattggaaaatgggcaatattcacagaacaattactgtgcctcttaatgaggtttgcatgaaggcttccagtgaattaatgaagagcaatgattttgccattcacgttgaacagctggacaacaatgataakggtgcagactgtgaggtctctggcttagacgaggtgatgaggaccggaggaagttctagcttctgcccttcttcagttctcctttggtctcactactgtcctgggagaaactgaacgtgctaggctgccagactgtgccgccccaacaaaaagtgagaagaaccagtttggctgggctgtgggcttgcatcttccttggactgtttttctagatatattcagtggcagatcattaaatctcctcctttactgggctattcttattaggaattatggtgacttttggagggcagtgtgtcttgcrgaaagcagcataccatgttgagttgaagatatgagtctaaattatggccttgtcgtttaatgtctgtgtgttccttgcacatgttgtttcgctgcaggcagggagctgcagtttcttcacttgaacaaaaggcgatcatacttacataggtgacctgttgtgagtatcaaatagcctgtatgaaattacattatgcatatgttagtatcagtcagggttctccagagaaatgacccaataggatggtgtagttgtataaacacacacacacacacacacacmtataccttgattttaaggaattagcttatgtgatcgtagggctaagtccaaagttgtgggtaggttacactggcaggctggactcttgggcagaaaatgaagctgtggtcctgaggcagaggcagaatttctcttccaggaaaactcagtttttcctcttaaggccttcagctgattagatgaggcccatcaatacaattgaggatagactcttttacttaaagtcaactgattgtagatattaaccacatctacaaaataactaccagagcacctggacagtgtttgattaagtaactggggaccatagcctagccaagttgaaacataaaactaaccatcacagtcattattattgttactgatatgtcaggaaccaaagtatttgaccctgttgggccctattggggactgttggaaaagcatcatttgcttgcctgacatgtgctcagtgtcttagctttagggatagattttcaggggcgaggtcaggttgaagagaatgatttgagtgatagaggcacttagaagaggttgacagtccatctgactagcctttcttggagagcattctggaatttgaaatggtcgaacaagagtgaatactatgtcatggaaaggatattaattttggagacgagatatgatttacactcttggcctcagcatgtctttcttcccccatcgagatacgtaagttaacttcagtgatgctttttaaagttttttctctaaacaggaaaaattaatatttacgttttaggcttgttgcaagagtgtggagtatctctggcatgatttaaacactcagtaaataattgtttccctccttgcatgtttgttcagtgttcattgagttgttctaatgtgacgtttgttcttatgtggagattttcctataaggtatttaaggctgaagttgggagcatcgtagaatgcaagagtttgggaaaaactggagataccagtsaagatggagaaaaggatggagttcaagggtacctgggcttyctgtcttcactgtgaagatggatttcaccatgagatctttactaggcagaaaagatggaacatcctgcagtagtgttttgtcatcgagcccacagccgaggycgaacagaagctgtatgttgttcctcaatggttgtgtccaaatgggaatgagtaagacttcaacatttctgaagatggatggtcaccattctcaattctgttttatgtatctggtgggccgttgagcagaagagatcccagatgtcagacacatctgtcctccaccaagatgtgtgtgtgggacattgctggaactatgttttgtttctggtcttgtggcatttgactatcggagatgaacaaaagagcatacaatcctgatttatttccacaagcttckcaggactagggcttgacagtcttgcctggggaagcttgttgattcttagagtggcactaatttttttttttttttttcttgagacggagttttgctcttgttgcccaggctggagtgatggcacgatcttgtatctttactagagacgggattttgccatgttggccaggctagtctcgagctcctgacctcagatgatccacctgccttgacctcccaaaggagttgggattacaggggtgagccactgcgcccggcctagagtggcacttcttaatgcagtagatgtacttcataccaccatttaaaccaatactaagagaatagtctgtattcatatgccaatttggtaccacctaataggagaaaaccagaaagcaaacagtgctagttgcattaattatctctgttttatttgtcttttaatatctttgtctccttgaggaggctatggacttcttgaaggacagayrgttttcatctctgtgcttcattgtctagcacagggcctggcgtgttgtcagggcatagtacctgtgtgttgaatgagcaaataaactgtgaagaaacttcttgatctttgttggcctggacagctgttgaggcttgactgtgcttatggaatgaaatatccacacaaagggaaacttggtaatagcccagaaccccaaggggatcattgcagagggactgatagatggacaggatggcctggtgaggcctgcgccatctgtgccttcaacccggcggatcaaagatgaatgtgtgattgagtgaggcctcactgatgacaatgcaccctggctggaaaatgcacagcaggaggctctggtttgaatctcagttttcctaggagacctgaatgaagagaaaaggcaccgcagtatgcaaagagagagtcatcacttgtgcatgtgtctgggggaagtaacgaatagaagacattacatgtcaaaaagagcctcgtccaaaatgaagccaagtgactgtcacaagttctgggcaggtgagatgctgtgtcagaaccgtgagaaagcaggggaggccaggcacaattcccaatatgttttagagcatacctggagcttagcatagccctaacttcatggtccagccctttggggcatgtgctcctggaaccttagctattaagtgcccttgagtgggaaaataaatgagtttttaatgtctgtgtgtacatgttgttaatcgttttctgcatttgccacctgggttgaacctgtcaaattagtttccagtagtcccttttaatgcattgttatatacccaaggtggaaatctcagtcatccttagagactttctgtagccaatttcccctttccttgttcctctcttacttaggtcatgcaattgagcgctaagcccgggtcagcccatttcctgtgttctggtctttttctttccatttgtcacagttctgggctgggctcccattatccctggcctgaagtatttcactagctgatgctccggcctcctccttcctgtgtctcctaatccatcattcttatactgccagaatgacttttctaaggctcagagcagctcatgacattccctgctagagcctctttgattacttcttcttgcctctagaaaaagtttgaacaatttaccgtgacgtaataaagctgttcccagttgggctctggccttctttcctggtcttgggccccacctctatataccaaatcatgattttaccacttcctaaatacagcatgctcttccacgttgcgaatatttgggaaatctttttttccttggaaagctgttaactttttctccctgtcagactcctagtaatccttcaagactcaggttttgttggttgaactgaagctcatgcaaatgatcacttaagaggtgctgagattggcatacttctccagagtgcctggctttagtgtagtggaaattctcttcagccacgagcgtcccacaagggagcctagtttgttcatgtctttacttgctctgctaaattatgttttattaatgtgtgtgcttgtactgttgctcaggctactgtgctaatgactgataattgccttaatgagctatttgtaagaaatacagtaataccagtagggatgaaaccagaccccaccacagctggtggtctaatagccttttgactgactttatggaggagcagactgcagggttattgcagttaacataagcaagagctcagaatcacccacttttccctgaacacccaatttacccatcttccactcacgcattaatcatgtttatatgagtcgggggcaggttaggttatgctgcagtaacaaatctcgcatagaacaaaaaaatcactttgggaagccgaggcgggtagatcacaaggtcaggagatcgagatcatcctggccaacatggtgaaaccccgtctgtactaaaaatacaaraattagctaggcrcggtggcgcacacctgtagtcccagctacttgggagactgaggcagggaaattgcttgaacccgggaggcggaagttgcagtgatccaagatcgcaccattgcagtccagcctgggcaacagagcaagactccatctcaaaaaaaaaaaaaagaarttcatccctcaccctgtactacaagtccatcacaggctactcatggcactgctgcatgctgtcttcactctgggatcctgatagtgaggcagtctctatcagtactcttgctagtccttaagatagagagaaaagggcgcataatggttcttaaagcttgcagtgagttgcatgcattcgtatttcattggccagagtaggtcccatggctgttctggggcagagaagttctaccttgatgtgctcagagctgaagagctgatatttgtgaacaatatgagaaccaccacaccatggtagaatcttggattcatgtgccttatgtaatttgcttctggggagtcaagagggagattttgttgccttcagcggaggtccagagagtactgtgggaccaagagtatcgggctatggctttgggttcagccagtccttggttcagatcctgaccagcacttgctagctatatgatcttggtcagtgtaaactctctcaaccaatttctttacctgcaaacgtgaaaacagcaatacctattttataggattgttacatattccatgagayaatgggttgaaaagttttataattttgtcataataaatgttagttctcttcccatcccccatgctgtgtcttgttcagagtgagagatctggtgtctgttgcwtkcagactactgtagttttttttctgtgctctcctgggtggtagcaacacccgcctataactacaagtgcttgaaatgtggctagtaccactgaggaactgaactgcaaattgtaaaatctttattacatctaaaaagtgaagcagtgtaaagtttttttgtttttttttttaacacaagcttctggttttggaggtactatttcacttcagtcattgaaaatttagcaccccaattgagatgtacttaagtgtaaaatatgcatctgatcttgaatatttagtatggaaaactataaaatatctcattggttatttttatattgatgatatgttgaaataatattttcatacattggaggaaataaggtatattatttaaattagtttcacctgttagctctttttaaaatgtggctgctagaaaatgaaaaactatacatgtggctaactagcattatataatatttccattggaaagtgctggtttagacatgcagaatgtgaggcccacacctctctggaaattcagactattcatccatctgtccttgcatctaataatacatatttattgacaacttcctatgtgctatgcacaggtgttgtgctaagcttttgggaaccagtgctggtcaaaacaggcatattctctgagctcactgcttattgagggcatggaacatatagttgtgtatgttcataagtataaatggtagctccatctagaaaagtgcaggaggctagggaaatacatcacacaggacctgatttttttttttttgagatggagtctcactctgtcaccaggctggtgtgcagtggcgcaatctcggctcaccgcagcctctgcctcctgggttcaagcagttctcttgcctgagcctcctgagtagctgggattacaggcacccactaccacgcccagctaatttttgtacttttagtagagatggggtttctccatgttggccaggctggtcttgaactcctgacctcgggtgatccgcccaccttggcctcccaaagtgctgggattacaggtgtgagccactgtgcctggcaggacctgagctttttaatacatggggtgggtgggcggggttagggarggatgtactgagtttctgaataaggagagaagaatggatgaagatgggtctgggatttgagacccaccagacagtgttaagagcttgtgcccaggttctgaggctgagggggaaataggtttaatggtgctactgggtctgtcttcaactactgctttggaagttcacaaacagttcatgggaaaatgcgaagaggatagactttgcatgaaacactggttccttttgctacatcctcaaagaagtgcaactccagtgtactcgtcactgtgaaattgatccggctcacatgtggggtggtgagcattgtcagggcaggggaatacggggctttattcttctttacgatcccagcgtcgtgcagggtgccttgtgctttgtaaacattccataaatactgtttgatttcatttgcatattactggagaagacttastatctggatttcccccaacctatttgtgccaagcaccttggtggtaggggcagggaggggctgcttttgtgttcttgctgagtctcagcactctggcaaggcttcatctttcttttctccccataaggagttggatgaacataacaagaagagaacagcctaatttaaaaagtggatcaaagactttaacagatacctccccaaagaaaatatgcagatggcagataagcacatgaaaagatkctccatgtcgtwtgtcatcagggaaatgcaaataaaacaacagtgacrtactgctacacacttattagaatggccaaaacctggaacactggcaccaccaaatgctgatgaggatgtggagcaacaggaactctcatttgttgctgtcagaatgcaaaatggtatagccactttggaagacagtttggcaatttcatatgcaactaaacatacttttaccatacaacccagaatctcacaacttggtatttacccaaaggagctgaaaacttacgtccacacagaaaccttcacataggtgtttaaagcaactttattcatgattgccaaaacttggaagcagctaaggtgtccttaagtaggtgaatggataaataaaccatagcacatccaggcaatggaatattattcagcgccgaaaagaaatgagccatcaagccatgaaaagacatggaagaaatttaaatacatatgaytaaatgaaagaagccaatttgaaaaggctacttactgttttccaactgtgacattctrgaaaaggcaaaactctggagatagtaaaaagatcagtggttgccaggggttgggaagaggaaaggatgaatcagcagagctcagactatttttagcgcagtaaaactactctgtatgatatgtgtaattacatattcctcaaaaccaataagatatttatcaaaaatgaactgtcatgtaaacagtggactttaggcgataatgatgtatcaatgtaggcycaccagttgtaagaaacttaccactctgatggggtatgttgagattgggggaagctgtgcataggtgggagcaggaggtatatgggaaatctctctataccttcctatcttgctgtgatcctaaaaaataaagtctatttttaaaaaactaaagacctggttaygaaagtgaatgcttattgaacacctactacatgctggttcctaataattaatcgtgtagattaatttatttaatcccaaacagtcctgtgaggcrggtaamatgactgtcctcctgattgtgcagataatgaaactragcacagagaagttaagaaattaactcagggtcacatagcttggaggtgggagagctgggatttgcatacagacacactgtctctagggctttgcttttaatgacttgttgccttacctgctgcaaacaaactgcctatccagctgtctttgtggaagttgcatggtttgaaattgcaaggaagaggatttttttttttgagacggagtctcactgtgtcgccyggctggagtgcaatggtgagatctcagctcgctgcaacctccgcctaccaggttcaagcgattctcctgcctcagcctccagagcagctgggactacaggcacgtgacaccatgcccagctaatttttgtatttttactagagatgggttttcaccwtgttggccaggatggtctcgatctcttgacctcgtgatccgccygcctcggcctcccaaagcgctgagattacaggcatgagccatcacgcccggccaaggaagaggatttgaagtcagctctgagtcttattatcttcctccgagtagcacagctggcatcattgcatcactgagagccttctaagccctggacacggctctgggtacccagattcaaagatggattagctcttgccccgttttcaaggagcttatagttgaggagatgtcacattgcaggtaatttcaatgtaatgatacagccatgttctcagaaagtgttcaaggaactgtttgtcctcttgatgtatgtgattatgtcaagagttgttcctgcagaagatcctgtaaacactggggctggaaaatgtgccaggcttattggtgagactctaggctgccctggaggccagacttttggactgcagcttgctcacgtgtgtccctagctccatttgcttcagctacccacttctggttttggtttcrgtatctgatgctcccaacacctcacatgaagcttgcaaaactgttgccataaacttaatttctagcaaagggcagagaaagaagtcagatacaagagatcacatattgtttgatcccattcataagatatatccagagtgggtaaatttatggagacagaacatatattggttattaccaggggctgggagggagggagaaagggcagaagctgcctgatgggtgtgggrttttgttttggagttcatggaaaagttttggaattagattgaggtggtggttgcacagcattgtgaatgcactaaataaatgcctctgggttgtttaaaatagctcattttattttatgtgaatgtcagcttaataaatttcaaaaaataataatcataaaatgtagcaaggggagaggcattagacaaagttcatagtgacagtgaacattgtttgaatggaagaaaacaattggaagagaagaaataggacrtgttaggtataatgatggttgttattttatttatttatttatttatttattcatttatttayttatttatttattttttgagacagagtcttgctctgtcgcccaggctggagtgcagtggtgtgatctgggctcatggcaacctctgcctcccgggttcaaggaattctcctgcctcagcctccccagtagctgggattacagacacctgccatcatgcycagctaattttttgtatttttgcagagatagggtttcaccrtgttggccaggctggtctcaaactcctgacctcaggtgatccgcccgcctgagtctcccaaagtgctgggattacaggcgtgagccaccgtgcccgaccagggttgagtctttactctgaatgaagttgggagccattggagtggttggggcagaggaaagagattccttggcttgcttttctaaaagatctctttggttactgacttgagcagagcttgcagacaaggatagaggaagggagatcagttaggaaactaggacagttgtttcattcaagcaggagatgctggtggcttagaccaagtgtagtggccaaagtgttgggatatagtccaaatccagrtgtgtctttaaggtatattcagcaggattttctgagatattggatatgagactaacagaggaagaagagtcaagggtgtgtctagttttttatttgagcacctaaaggaacgaagttggtggagttcgggagctgtccatatattctaactgggaagattgcaagagaaacaagcttgggagagaacattaggagttcagtttcagtcttattgaatgagtggtgctttttcgatatatccaagtgaatatattgggccagacagtgggatatgagccaggagttctggaacaaggttagggtgggagatacagattggaggttgctggcctttgcaggccattgaaagccgtgaacctgactgggatcagctagaaaatgcatgatggtagagaagaggaggctgaacttgactgcactctctgcatgctctggaaaaataaaacctgggttgcactggggacattgggggctagttcagtcattttttagagctggggttttgttgttgtttttgtttaagccaggcactttagtcttaactttcagggaaaatcaaagtaggttgttcaaggtacccaaaacacacagatatgcagctggctttctgcaaagtgttcatgtgaagaggtgccaggtgtgtgcctggtaagtgtgtgttttactgagcagcagggagctgaactgtggatctcttgcagcctcccttttgatatgtgcgtctcaagcagtcaacctgcaaattgctttgtattcagaaggtgccaaatacatgttcatggaatgaatggataaatggtccttgccctttgtgcctgaagaccatggtagaaaggtgcagtttattattttattgttgacttctggtttgaaccaaagaggtttttgcatatacgttggctattagagatcaagtctgcgttcaatgttggagatttattatattttggatagatagagggctctaaaggcaattcccagagaaatccaaaactattgtcaacaaaggcagcattagtggaatcactgactaacttcccaaaaagttatgttaagcaggcctttctaaggatggcagtcaggattgctatgttctcttctgtatagggaggagagtacaggatggcagccaggattgctgtgttaattctcttctgtataaacaagagagtacagaagacagttaacataacaatcctgactgccatccttcaacaggcctgcttacgaggttggctttggctggcatctggggacttggattttaggagggttcccatcattctcagacccgataagactgggtcactgtgcttaaactgttgatgcaaacaatatagtttattctgaacatctgttttccttctgggagtctacaattttggatgcctgcctaaccagtcctgggtgaaaaccctaggcacggaacctctaatgagcttccctcgtaaacatgttttcacacgtgtggtcacagctcattgctggaggaattaagtgtgtcctgtgtgactctactgggagagaactcttgaagcttgagcctggttccctccagactttgcctcatagaccttcttcctttgctggttctactctatgtccttttgctgtgatgagtcatagccatgagatgctgtaagtcatagccacatctacatgctgagtctggcgagtcctcctagtgaattgttgaacctcacctcctctgcatttttggttgttggtgttgttaaacagccagtcatatcatcttacggagctatgaattccattagcatttactggattccagctatgtacaacatacttgtaaaactccagtttgccttagaaactgagtcaaaccaccaaatgtgtccaggagtaactcgttcccaagacatttccagatatcaggcaatatggaagctacagagatgaagtctctgaagctcaattgagataggaaatgtaagttgtatagaagttgtatagaagcagaacccctagaacattgagggaaatgagtgctctaccaattccataatgtaatagtagcttttattaagaggagggtcatgaatgctgtcttgggggagttagagaagtgactttaaggcattggtggactttgctggtgttgagaaagaatattttgatcttccttggtatccgtcgtcatcttttagctttcatttgtgtgttgatctatccacccatcttcctgtccatccaattgtctgtctacccactcacccacccatctatctgtccagccttgccaggcagcttgttacattcatgagctttgattatgtgttaggctgtgttcaaggcactgaagtactggggtgaattgagtagggtccctgccctcttgtgcaaaggaaggatttggttgggtgggagatgactaatgaatccgtaccctggtggtattgtttagggagagggagatagacctgggaataaatatttattcctagatagaagtgcacaattctttctagggatacacaggtacacatgcccaattcaccttggtgggttgagtggggagaggggcagggtgacaaataagasttacttgtcaccttacctactgtatatctaagcatattgtccatacaaagagatcagtgcaggagatgtcctgtgtccctgtcttcataaccagaacggggaagaaaacctcctcctgtgagttccccgaaggttaatttaaaatattcttttcatttggctttaagattactcagagccatctttaatacacaattagggacataaccattcctaaaggtaggtggcagctgccttcattcacctgccagtgataatcaaaggaagactcccagcctgtctagtctggaacattcagcagggcctaagagctcttctctaagtgatgatgggactgaagccatctctgtagtgcttcccttgctgttctgagccatttgcagtgggaataagtgcttatggagtcagcagctgtgagttgsgggaggcaaattattacttttatttttggctctgcctggggtcagaatttcttttgtttctgatttaccttttatttgagaaacttggcatgatacctgtgttcagaggattcattagtcatctccctctcaaccaaatcattcctttgcacatgtgattgttaacccctcttttttttttttctccagagttagttatcaggcattttttcagaggactttcataaggtagtctgaacaaatgaagatattattttcattagtaaaaatagtaacagcaaacactaggggtgtcagacagtgttttaagtgcgtatatagctttactcttttgatacaacttatgaagtagatgccataattatcttccctgtgttacatatgaggaaactagtcactggggaagcggggggtatcaggtaatttgtccaggtacctcttctgatcttggattttaaaaggagttggaacaccaaaagcacaattcgtaaaacaaaatggatgaactggaattaatcacagtttaaaatgtggctttgtaggagaatctgttaagagggtgaaaagagacgccactgactgggagaaatgtgtgtaaatgacacatttgacagaggactcgtatcctgaatatataaaaatctctccagactcaacattaaaaaccaaacaatccaattagaaaatgggcaaaagacttagacatgtcaccaaggaaaatacacagatgggaaataagcgcatgaaaagatgctcaacaacatcagggaaatataaattaagaccataattagctaccattacacacctattagaatgaatacgataaaatttgctgrcaatatcagatgctggtgaggttgcagagaaactgtgtctttggtgggaatgtaatatggtatgaccatctgtcaatttcttaaaaagttaaatatataccatatgtattagtacattttcatgcggctgataaagacatacctgagactgggaagaaaaagagttttaattggacttacagtaccacatgtctggggaggccccagaatcatggtgcgaggcaaaaggcacttcttacatggcggcggcaagagagaaatgaggaagaagcaaaagcggaaacccctgataaacacttcagatcttgtgagacttactcactatcatgagaatagcatgggaaagactggcccccatgactcatttacctcccccgggtccctcccacaacacatgggaattctgggagataaaattcaagttgagatttgggtggggacacagccaaaccatatcaccgtatgatccagaagtcacacttccagaaaaatggaaacttgtgtttatagaaatacctatacacaaatctttttaagagttttatttgtaatagctcaaaacttataaactaccccaaagtccttaacaggtgaatgaatgaacaaaatgtatatccttgcagttgaacactactcagcgagaaaaaggaatgaacttgatgcgtgcaataactgagatggggctaaaggctattacgttgagtgcaaaaagccagtctcaaaaggttagagactatatggttctgtttgtacaaccttctcccaatgacagaattatagagcataggaaaagatcagtggttgccagggactagggtggggtgtgagtataatggggtagcataatggagtttcttcrggatgatagaacagttctgtatcttgattgtgatggtggttgcacaaatctgtacatgtgataatatttcatagaactacacacaaatacaaaaaagcctgaatgtatgcaagaactaataaaatctgaataaggtctgtggtctaattaattgtatcttgctgatgttactttcatgattttgataattatagttatataaattatcaccattgggaggaaactggatgaagggtacacaggacctctctgtactatttttgcaacttcttgagagtctataatttcaaaatgaaaataactgtaaagttaaaaaacacacagggaggtaggtatttagcagtcagagcttttgatataatccttgcctgcaaggggcttactatttgattggcagggtttggtgtactcacattaaacttttggaacggaatgagtcaggggatagcaaaaagcttagcttcatgtcttaaatgaagcttagcttagatgtcttaaaaattaaagcaagccataagtgcgtgggacagcgaggatcttcttcttccctatttcctggctaaatagagcccaccacatgcacatgtgagcacacatggtctcagcaaattctagttcctacttcagatcctagctcttctatgaccttatctatggagaggtctgtattttcattctcccctgaaccaactatgtccccataccaatacacaaagtcttcttcctccatattaccaaactctccgttttcagtcactcttgcttttgtttgtgagaatgttccttattgaccgggcacggtggctcacttctgtaatcccagcactttgggaggccgaggcgggcagattgccgaggttggaagttcgagaccagcctgaccaacatggagaaaccccgtctctacttaaaattagccgggcgtggtggtgcatgcctgtaatcccagctacctgggcagctgaggcaggagaatcgcttgaacccaggagggggaggttgtggtgagccaagattgcaccactgccytccagcctgtgcaacaagagcaaaacaacttctcaaaaaaaaaagaagtttcttatctgtatatgtttacaaaaacagccatccctttttgttaaggagttagttgtagatttgtttgtccccaccacatggattatgsctttgttttctcagcagcagtgcctggtcatagcccggctccagaaatgctgcttaactgatcaaacagtgggcagtggtatgcccgtctccagatgcttagtctaacttcacgtggataggctcgcatcctacccacgggattgcaggtgtttctttggcgtgataytccaccactgagaacattttgcaaggtaccaggcatatctctggctctccatccatgcatggatcaagctgctatcagtaacttcctggagaaaaagaaactccaggaatctggaggaataatactagataaaattgtccaaattatccatgcacaccagaagctcaaattgaatactgtagatggccagggtccacagtgttgttgtttttaatgggatgcagtagtgttgggtggaaagctgaaatgcctgacttttaaggttccttccaattcagaatttttatggttttgctgtaggatgtatgtgctcgtgctccattttagagcagcacggaaagccctcctggaggattcctccggatgaaagatttagggtggggtcatggtgtctgcatttgcagcctgtgtcatggacccaatgaarctagtgaggtgccagtttttctttgtgcatattcttccagtgtgtcaaggagcttggggtgcagggacctgaatgattacaccatcctcttcagatcatatctttgaaaaacgtgtcaaggtcctatgtccggggtttggagcagcagtgccagcgtggaacactcctgttgcgaaaaagccatgtgtgttggtaaagatggagaaaagcaggatgtggtcatccagtgagcactccagtggttgctccttctgtcagctctccctttcaagccgtcgggatcccagaagctttcactgtgttcctttttaacttgtacatttcatcatgtaatatacatgtttatttgtagagggaaatgcagagtatgtgcatgtgtgtaatacctatactcactatttcagacattgctaggtactttaatatctaggtacttcatttgattgattgattgattgattgattgagagacagagtttcgctcttgtctcccaggctggagtgtaacggccagatctcggctcactgcaccctctgcctcccaggttcaagcaattctcctgcctcagcctctgagtagctgggcttacaggtgcctgccatcacgcccggctaaattttgtatttttagtagagacggctatttcagtagagacgggttttcgccatgttggccaggctggtctcaaactcttgacctcaggtgatccacccaccgtggcctccctaagtgctaggattacargtgtaagccactgcacccggccaatgtctaggtactttaatgtgtaggtacgatagcatttattgctttacgtaattcatgcaacacctctgtgcattaggattatgatcctcattttataggtgagccacatgggagtgaggcgaggagggatggttaggttacrgttgtaaatggcaaagctgagataagactcaaaatcagtttatcttcagaaccattttgcaagtaagggaggatcccagatctcaaagtgcctgtatcagttaggatgcctttgtgcctttggttgtgagaagcagactctacaaactggcttatgcaggtgagggaatatactggaagtttgccataactgagaactccagaggcagaaccagcttaggggagattggtcagggctgtcacttgtctcctgcggtttcctaggctctgtcctcttccatgtgcttctcctctgcctccaaccaccgttggctcctccatcattggagtaactctggctcatgcccattggaatcagtcactatggcaagggagctttgattgtactggttgtgtaggttaacacgatggttttacacaaccatctgtaaaatttgggatggtgggatacctccccagacccagacttctggacaccctagatcgttttgggaagaagaaagaggagaaaatacctgtcaacaatgcccaaaggcagagaaaggtggagctaagggcttggtgaaggggagctgagaagggaggaggtgcaggctagggaaggcgaatgaactggctggaggggtgcccccttcttgtctttttcctctgcttgcttctgtgccaacttacatacctagccattcacgggtccatcaccctcttctgtcccygatgttctttgccaagctcccactctctttaattaacaactttggagatgcttttaraagagcccaagtctggccaggcatggtggctcacgcctgtgatcctagcactttgggaggctgaggcaggcggatcacttgaggtcaggagttcaagaccagcctggcaaacttggtgaaccttgtctctactaacaatgcaaaaattagccaagtgtggtggtgtgcccctgtaatcccagctactcgggaggctagggtaggagaattgcttgaaccagggaggcggaggctgcagtgagctgagatctccagcctaggagacggagcgacatcccatctcaggggaaaaaaaaaaaaaaaaaaaaaagcccaagtcttactgtgtcacctttaaggtaaaaatctcccctcctcctccacctggctctgtttctttgcattttccaaggtcttccacaagagggactttgctgttttctttctgcagtttctttaatggtrtgttggtatggtgcttttggtgggataattttacttggaaaataatgtttctgacccatgtccttctttgattgattttttaaagatttatattttgcttttcttacgagtcttctggattattttgggtgtttctctcttttttgttttccctgggaatttgagtctagcgggggctcaaaagaggttcatttckctagtggctttgcctggtgtcctcccagtcagaagtcggcgacgctggtcagtggtgcagccttctctccaaactctgtctgccttcctcttttctgatattctgaatccctagctgcgtattctccacttctcgttgaaaccaactcttagaaaaagggctgatgacatgttaaattagctactttgagtatgtatgtgtatggatgtatacccgagtaatactcaaactcttaatttgttttaattattatgccttgattaggttatttaaacttcagaactcctgtgaggtacatacaaatgccacattttacacatgaagaaactgaggcccagagatgtcaattgacttgcatcaagtcagtttagaaatagcaaaggtgggatttgaacccaggtagtctctggctccacagcctatgttcttttttttttttttaatactttaagttttagggtacatgtgcacaatrtgcaggtttgttacatatgtatacatgtgccattttggtgtgctgcacccgttaactcgtcacttayattaggtatatctcctaatgctatcwctcccacctccccccaccccacgacagaccccagtgtgtgatgttccccaccctgtgtccaagtgttcttattgttcaattcccacctatgagtgagaatgtacagtgtttggttttctgtccttgcaatagtttgctgagaatgatggtttctagcttcatccacgtccctgaacgcatccttttttagggctgcatagtattccatggtgtatgtgtgctacattttcttaatccagtctatcattgatggacatttgggttggttccaagtctttgctattgtgaatagtgccgcagtaaacatacgtgcgcatgtgtctttatagcagcatgatttatagtcctttgggtatatactcagtaatgggatggtccacagcctatattcttaaccactatgtctagtgtgtttctctctttgtctctctctctccctctccctcctaaaacttcttatacatagatccgttaatgtgtatatatagtcatggttgctgcaaggatcaagttatttgcgtctgtgtaaacctacatataagtaagtagtggtagtaattattatggctgttaatgaaatacttactgtataccagcaattatgctaagtgttaagtacttaaattctcccatgctgagctttcagcagccctacaacttgttactgtatttatcctactcctactttttagatgaaattgggttttaggattaatttataccagattacacagtttacaaagacggagactgaattcaaacctctttaaagactagttctcttaaaataggatcagcaacaactcttaccattcattgagtcctatgacatgctgaaggtaaaggaaaacaatgctgacgcagtctcacttcaagcatcctctgagggagtttggcctcattttatatgaatagtgttcctttttactcttgaaattgtcccattttaaggcckggcacggtgactcacgatggtaatcccagcactttgggaggcggaggcagacggatcacctgagatcaggagttcaagatcagcctggccaatatagtgaaaccctatttctactaaaaatataaaaatcagctgggtgtggtggcacgtacctgtaatcccagctactcgggaggctgagtcaggagaattgcttgaacccgggaggcggaggttgcagtgagccgagatcgtgccactgtgctccagcctgggcgacagagcgagactccatctcaaaaagaaaagaaagaaattttcccactttgaggaaatgagtctgtggtttctggatggataagaaaactgagtttagagaatttgtgccacttgtccaaggccacacagcagtaaaaggatagactggggttggaactctggtctgtctgaagaggccaggctcttcaccctgacagttgcctggcttctggtatttgctgccttcttgctcctcttcgagagcagttctggctttaaaaacaagttctgtgggcagaggtactccatgccccagcctgagcccttggggcccacctgggattggtggtgtctgggcgatctcagggttcccttctttcttccctccctcctgagaagaatcagactcagacaccatcttttgtggtctagtgtttgggaaaagacggctgcacagtctccaccagcatttgcaaattattcacaaattatatgcacagacacatggggcccaactacatacgtcgcagacttgaatgtgggtcctgggaagcttctggatatgtgagtttgggggttgggcatcccatctagcataaacttaccatcttcatgcttgcagccttgcaatatacaggccctgttttcccctcaacattaataaactttattttccctgcagttgtaggagacagaggctctatagaaaacttacaaatgaaaacatattcttttggaaaaaaaaattatggttatcaattccttctttattagttttcttttatttttagatccatttgcatgaaagcaagagattctcacaccaccccctctttgtatgattatgacagagaggcaataagaggacagattcttatgaaaaaaaaaaagttggggggtgcttgccttatttgagaaarcagagatctgcagtgatgaagctacacataccacatagcttaagagaggagctggaaaaagttctatttagggagaaggatttttcctgtgttcttgcgggaggtaggagggactctggaagtgacagtagctatccgtattctggaataaaagctgttctcctgagaaaagaagcaatattcctcacttctcacagcctgtgccgggtttcaggtttgggagtgggaattggacatttgaacctttcatttcctaaatggatttgcaataaataaaactagagttaaggcctcatttcagtaaacatgggggagctgttggaagctgctgctccctgtttcagacgattatctcccactcagtcctggtgggcattatgtatgccaggtgggagcggagactgattttgtccttcctcattgaagcctggaaaagtctagtatcttttatcagatgtggggtggttggctgtttccttttctcctccagccrtgatatttttaaaattgacagccccgttgtgatccagggtgatgagagagagactgacattttaaagtttcagaacatgtttttcagctcttctttggattgctaatgtgaataataatgccacattgaacacttatcctgtgcgatgctgtaggagtgtggtaaacatctcataaatcttcatggcactgctcgctgcagcatggccagtcgtggaactccctgcctccgtctcctcctctgggcacgctcagcagctttcgctgtttgggtggaaagctgtttgtggatattaaaggagatggtacttggtctagaagaggtgctcaatgtcagtgtcttctttagcccctcccctggccccaccttctcctttctttttcccgtggctggggttttggggaagtccctgaacacagtgagaaaggggtctgttttctcctgagtaatttgaaaatcttggctaagaatgggggagagaaaggaggrtgtggatgctactaggtgagggcttgggaactcctacatttcctatggaggaagagtttcaaaacttgtgtttttttgcttctgtgctttgtttttttttgttttgaatatgtgacttgattattctggtttgtaacgttgtctttaggaaatgaaagatgcctcattattttctgattccccaatatcctgccctcttaggggtttcctagtaacagattttcctggttagaccttgccctcctgtgttagttcattctcatgctgctaataaagacataccccagactgtgcagtttataaaggaaagaggtttaattgattcacagttcagcatcactggggaggcctcaggaaacttacagtcatggtggaaggggaagcaagcacatccttcttcacatggcgggagcaaggagaagtaccagcagggaaaatgccagacacttataaaaccatcagaactcctgagacacactcattatcacgagaatagcatgggggtaaccaccccttgtgatttgattacgtcctaacaggtccctcccatgacatgtggggattatgggaactacagttcaagatgagatttgggtggggacacagccaaagcatatcacctcctaacaagtataatcctaggttgtctgtggccatagtgcgttctgttttaccgaattgacgtctctgagtctgaacactggttctgctgctaagtgctcctggactctgaggctctgcatttaggctctctgggcatctatttctcacatagaaaagggaacagataataaaaaagcctaccctgtggggctgttgtgagtagtaaacgaggtaatgttatcaagtgcctgtcttagcatgcagtatgcacttcacaaataagacacataaaaatttstttttcccttggacacaagacttagagtatttttcctaggatgatggtggtagttgtgagtagtaatatgagtagcaatggcactagtgctggcagtaatagtggtagcactagtgctggtggtcatagaagtagtaagcctttggcttggcttccataatgaaagtctataatgatttctatataataatctctgctctttagcagcatttttccaacagaaatttatccataaagtgcccaataacctaatgataaggcattgttagcagtgagatattccatacaaatgaattttcagatgaagtggcacttttccctttaggcagcaacatttctaaacacaaaatgaaaccaaagaggcataatgattttgtggaaaatgttctaagctagtatttttcttcctttgcaaacagaaaagactgaaaataattaaatttttttgtaatatgactcagttcccctttgtgccatattataatccatggaaattactgagttgtgcagaagagtttactcctagggtatacggccccaaaggatcatgcttttttaattcttgagactgctctttgttcttcttttttaatttttttggccagccataaggatactacgcagacatgctcaccattcctaaacttcctggggaaagtttaaaggtggctacagcctttccagtgtacagcacaaagacattttaattttaatgatttatctcgctcatgagcttttctcatttacttatagaataaagttttcattcktcatttagaaggcttttctttataactagtacaagttataaaacagaccatctatcctttatattctcttaagaaatttgtgtttgtggtaggtaaaatgaaaagttactgccgttgtttttggtagaatttacctggtgttcaccttgaaaggatatgtgcttgtgggccttttaaarcaaaaacaaaataaaaaaaggattgaaacttctgaagttatctaaataaatattcttggtatgtattgctgtgaaaacaaaattcaacagagcttttagatgtacatgtcagttatatcttatattttgtagaacttgagaagttggcatgtcagattagtagatgctctggatgcggagtttttcaatctttgtgacaggtaggatacatttaaactttggtcagcttccggagaggcatagcctggtctttcatcatatatctgaaggcaaaaagatagatggaaatctctaagcagtatgaattgtaagtatttctgttgagttataaatacctcaaggaaaagaaccatcttagttttcttttattcacttaacaaatatatattggcttttgaagtggttgagtgtagagttctagagttaaaaatattttggacttaaagaaaaaaaaattggtttaaattcctgctgtatccttggatgattcagtgtaggccagtttcccttcacaatagttattgaggggctactgggtgtcagttgctatgccaggtgtattagcatgttctcacgctgctaataaagacatactggacagtgggtaatttataaaggaaaaaggtttaatggactcacagttcacatggctgggcaggcctcacaatcatggcagaaggtgaatgaacagcaaagtcatgtcttacatggtggcaggaaagagaggttgtgcaggggaactcccatttgtaaaattctcagatctcataagacttattcactaccatgaaaacagtatgagggaaacccccatgattcagttatctccacctagtgccgcccttgatgtgtggggattattacaattcaaggggagttttggggacacagccaaaccatatcattctgccctcagcccctcccaaatctcgtgttctctcatttcaaaaccaattatgccttcccaacagtcccccaaagtctcaactcatttcagcattaactcaaaagtccacagtccaaagtctcatctgagacaaggctagtctcttccacctataagcctgtaaaatcaaaagcaagttagttacttcctagatacaatgggagtacagggcttgggtaaaaattcccattccaaattggagacattggccaaaatgaaggaactacaggccctgtgtatgtccgaaatcatatggggcagttaaatcttaaagctccgaagtgatttcctttgattccatgtctcacatcctctaggtcatgctgatgcaagaggtgggctcccatggagttgggtagctctacccctgtgactttgcagggtacagcccccatcctggctgctttcacaggctggtgttgagtgcctgaggcttggtgcaagctgttgctggatctaccattctagggtctaaaggacagtggccctcttctcacagctccactaggcagtgccccagtgggcactctgtgtgggggatccaaccccacatttccattccacactgtcctagcagaggttctctatgaaggctctgcccctgtagcagacatctgcctggacatccaggcatttccatacatcctgtgaaatccaggcaggggttcccaaatctcaattattgacttctctttacccccaggcccaacagcatgtggaagccaccaaggcttcagccttgcaccctccgaagcaatggcctgagctctatgttggctccttttagccacggctgggacacagggcaccaagtcctgagacagcagaaagcagcaaggccctgggcctgacccacgaaaccattttttcctcctaggcctccaagcctgtgatgtgaggggctgctgtgaagacctctgacttgccctggagacattttcctcattgtcttggcaattaacatttggctcctcattacttaggcaaatttctgcagcaggcttgaatttcttatcagaaaaagggtttttcttttctattgcattatcaggctgcagattttcaaaacttttatgctttgcttctcttgtaaacataaattccaattccaaaccatatctttgtgaatacttaaaactgaatgcttttaacagcacccaagtcacctcttgaacgctttgctgtttagaaatttcttctgccagatgccctaaatcatctctctcaatcttctctctcaagttcaagtttctacaaatctctagggcaggggcaaaatgtcaccagtctttttgctaaaacctagcaagagtcacctttattccagttcccaacaagtttcttatctccatctgagaccaccttaacctggacttcattgtccatatcactgtcagcatttcggtccaagccattgaacaagtttctaggaagttcaaaacttcccacatcttcctgtcctcttctgagccctccaaactgttccaacctctgcctgttactcagttccaaagttccttccacattttttgggtatctttattgcagcaccccacttctgataccaattaactgtattcatctgttctcacactgctaataaagatacacccaagactgggtaatttataagggaaataagtttaatggactcacagttccacatggctgggaaggcaaaggagaagcaaaggcacgtcttacatggcagcaggcaagaaagcttgtgcaggggaatgcccttttttataaaaccatcggatctcatgaaacttattcactaccacgagcacagtatggggaaaaccraccccatgattcacttatctccacctggccctgcccatgacatgtggggattattacaattcaaggtaagatttggttgaggacacagccaacaaataataccaagtatggtggacatagctgagaaccagctggatgcttggtctctggcctcctggactttactgggcagggtttcatgaactctgtcatcctcatatccctttatagtgtttggccacatcttcttaagaccttgttatttacttaaatacattaaagatattaagaagtttatgtcattctctataaatagcagggaaccacaggaactaaaccatgttcaagtctggctagatgctgctactagccaaaagctatctgaatggaaactctcagttccttcttaccaagtgttgaagggctgtaaggacacactaacagtgtattgaggcttgcctggaatgcattagaagaattgtcaagggaggrggtaactttctcactaagttcttttgaactgagagatgaagatttttaaggctgatgtaaatatttgatttttctcattctgattgagctgagtgcaacatgttgggaacggcttcatgcagaaagcctgtggtgaatggggtctggaagaagactttggagttgacttggaaggaagatagtttggaggcaggactggtcataaaatcacctttatttgcttttgaaatattattttatatcaggtgtcaaatgtagaaatctgaaattctggaaattaaaagctgtttcagaacaatattgagatatcacccatgaagatcctgtcttggtaggaggagcgtagggaaaatgtcctgatcagtgcactcacttattgccagggacaataacatcaccactgagaataaggtcaccagtctaactagtgccccatattctgtaaaacttgcctctccagygcttttccagaggtttaggttaaccagcaaatcagaagtctcaaagatcttttctagttcctgcttgaaattgggtagaagataataccagctgttacgtggaagtatagcatgccattcacttaacgtggaatgaagcaaaacattctgagagggaagacctattacagtgcatgtgtaccattatcttactttttctttctttttttttttttttttgagatggagtctcactctgtcacccaggctggagtgcagtggcacaatttcgcctcacttcaacctctgcttcccgggttccagtgattctcctgcctcagcctcctgagtagctgggwctacaggcaggcgccaccacgcctggctaatttttgtattttttagtagagacggagtttcactrtattggccaggctggtctcgaactcctgacctggtgatccgcccaccttggcctcccaaagtgctgggattacaggcgtgagccactgcgcccagcctatcttactgttaagctgtaatggtgttataggcaggacaggtatttggtactgaggaaggctcttcaaggatgtgagaattaagctgagtgagacctgagggaaatgccaggggaccccctcaggaggggaggctctgaagggaggagaattctcggagaccctctggagggagtagggagagagagaggtccccaacctccttctgaggcacctctttataaggttggaatattttgtactgtttcctatctcttggagagaagagtccaccctttcccaggtaacctgtctcagctttggagaggctgagatggaattccagggaccaaatctaattaattcctcaaaagagaagtgccttttgggagtagcaatattgaatctcactttgatagctcctggtggagcaatttggagagaatatattggggatgcttttttccaattaatatgcttgaataagaactttggtgctcctttgcagtataaaatgaatgtatagtaaaaataagagcctttttcttctaagaagggccttattagaacttggaaagccaccttccctgtcttcccagcacctgaatactgtgccctacttatgcccaaaagacaatgkacttcttgaggaatttttgtaatttagaagcatgtttttgctacctacaggattaaaaaaataaaaataataaagatgctgtcagacttggcctccaggcaatttagtgctgcctgtggcttctggtactgtgcattttaaacagtcctgcctcttctcctttttatttttttaccaccctgccctggttatggcaacttaatacagcatgtctaaatatctaccccttgtttgcacagaaatagtgcacaaattagataaaatggcatttcctttctctcttgacagcttggaatttttttttaagtggctttgacaagattcagggccaaattatgaaatcaccaggtgaccctttccgttcatcagctgctaatgaacttagaaaattgagatctcatctggcagacaaactcattttgtttgacaagcagcttaaaagtatttgtaaatgaacaaattatgttttttttcccctccagttggccctgtgatcactacacatgggttttacagttttgtttgtttcttttttaaacttgtcagaggtctgtagaaaccaggcactgggtttcttcctgtcttgattcctttcatgttgtgcattgttagcctagggtaggtgattcacactagccactctggtagtaatcggttagggtattagaaagagtgctggatgtgaaacaggcaggccyrgggtgagatactgttcacccgttactcatcgagtgactttatgagttgtgtaacatctgaatacttcagttttctaattcataaaatggatggctaatttaagtggggtgtgtgtgtatatatatacacatatatacgtatatatacacatatgcacatatacacatgcatatatacacatatgtatgtatacacatatatgtatatayacatatgtatgtatacacatatatgtatatacacatatgtatgtatacacatatatgtatatacacatatgtatgtatacacatrtatgyatatacacatatgtatgtatacacatgtatatacacatatgtatgtatacacatatatctatrtacacatgtatgtatacacatatatgtatatacacatatgtatgtatacacatatatgtatatacacrtacacatatgtatgtatacacatgtatatacccatgtacacatgtatacacgtgtatatacatatatgtatatacacacacatataatatacagtatatatactgtacaaatatagtataaatacgtacaaatataaactgtctatgtgtgtatattatacatatatgtgtatatacatatgtgtatgtgtgtatgtatactatatggtatacatactgtatgaatatatggtatatatattgtttatgtacaaatataaactctgtatgtgtgtatataaataaaataaagattcattttgtgcatattagtacctgtgactgtctcctgaaagcagaacagacttctttgagggtagaatgccacttttattctaacttttcaatacattattgatcttgcaccggagcacctaaactctgaactggtttaaaaagtgaattagggcactagaaatccttaccttccatttttgttccctcaaatttaagcgagaagttagtagttctttagttaacttccaggagctcccacgctatacacaggccatatggtgacaaatagacattctggagtcagattgctgggtttatatttttgttccatcatttactggcttgtgacttcgagcaaattgctttatttcctcttctatacattggggatagtattaactaatttacagggttggattttagtaagacaacgtatgtgaagcactcatgtatgtagagcttggcattgcagaaagatactgctcagtatatgatagaaaatactactgcaagtcgtaatgttattggtttattcattagcagaaagcaattgttgcagttgttaaacaaaacgaaacgaaaagccattctaattaagcagagtctagtgagagctcagaggagtctgagttggttttaccaaagaggaggtctctgaaggatggattggaggtaatcttggatctgccatgcactaaaaggggaaaaagaaaaaagaaagagagagattgtcttagtgatttggaactgattggccttaccaacttggaagctccttttaaacacataggtcctttttagagcccattgaggaaagaccactctaatctccctctaccgcccactacttccactacttccagtagagcctggtggtcaataaccaccagggaagttagagcccgttctgcagcagtgattgtcagaatcatgcagtggcaccagcactgccattctcttatcctgcgaccatatccttggctgggttgcaagcaatttctcatatgtagtaggccacaatggatacttgtttgattaaatcaacaacaacaacaataacaacaaaacactgctcttctgtctggagagtacttttagtagacacctcttcttcctttcatgataactctccatacaaatttgtgttttttgagatggagtttcgctctgttgcccaggctggagtgaaatggcatgatctcagctcactgcaacctccgcctcccaggttcaagcgattctcctgccacagcctcccaagtagctgggattacaggcacccgccaccatgcccagctaatttttgcatttttagtagagatggggttttgccatgttggccaggctgttctcgaactcctgacctcaggtgatccaccgcctcagcctcccaaacaaatttttaaatatctcagccttctagtcccttttcccatgatttggctataatctcaaactgctcttgcaaattttttttttttctgaagaaacatagtgctcaaagagactctcatcactctgatgagagagaaacagatccagtggattaacgtgttttgctaagtgctgtgataggagacctagaaaacaagcttttggccctttatatgatcttgagggaatctcctgaccttttggatacttagtcttttcgtctgtaaattgagtaccatagcatttgtgtcacagcattacaatgccaattaaatcaggccgaagcactgtagtgtatggcctgacacgctacggtctggaaatttctcaggaaaaataagggtgtgatgagtggaagtggaacactccctctctctctctctttttttttttttttaaacttgattttgtttttttggagacagagtctcactctgttgccaggctggagtgcagtggcgtgatgttggctcactgcaacctccacctcccgggttcaagtgattcttctgcctcagcctcccgagtagctgggattacaggcacgcaccaccacgcccagctaatttttgtatttttagtagagacggggtttcaccatgttggccaggatggtcttgatctcctgacctcgtgatgcgcccgcctcggcctcccaaagtgctgggattgcatgcatgagccaccgcgcccagcccaatttgattctttattttggtagtagctaatctrtgtgatgaagccctgactcttcattgttctcrtgtcactgatgtaaaacaacaacacatttaaatgtgtgtttaaaatgtacaattcatataatgtacaatttagtggtttttagtattttcacaaggttgtgtgattgtcacaacgaattccagaacattttcctcactcccaaaagaaaccccatatgcattatcagtcactgccactctcctcttmttctagctcctgataaccatgttctgtctctgtggatttggactgggagagacataaaggataggggctactctccctcccgtcttaaatgcgtctcagtcatgaaccttgccatattttagtgctttaaacatttttaaaaatagttgatttgaggaggaggaggataaaacaaacagcagaacccaaaaagaagaactcggactccagacttaattctatcctttgccctctggctaactttggatatgccaattctttgtctgagcctcattttccccatgcagataatttacattgtattagagaactacctcctccccaagctctctttcaggcttaaattcagtgatcttgagtctgtgtgtgtgtrtatatatatatgtatatacacacacacacattgattttcttttaccatgtgctggttctttcagtctcttgctgctttctgttatccacggagctggcattgctttctatttttatcagtgtactatttaaatatagaaataaatatcttatgtatatctatttgtgtgtgtgcataaagcagtggaatttatggactaatgcggtcacttacgtaaattacttagcacggggtttggcacatactaagtgctagataagtattatttgctaggtgagtgatgggtcaccctggggtagaccagttgacatttgctcatatggaacttgttcagtgaattgtcctaagtgatcacagctggaagctgccttggtctttggatggggcttctgctgtctgcattctttcctctttgctttcactagtttctggaacacgtcagtgtgaatttttttttaaggcagagtctcgttctgttgcccaggctggaatgcagtggtgcaatcttggctcactgcaacctccacctcccaggttcaggtgattctcctgcctcagcctcccgagtagctgggattacaggcacccaccaccatgcctggctaatttttgtatttttagtagagatggggtttcacctcatgttggccaggctggtcttgaactcctgacctcaggtgatctacccatcttggcctcccaaagtgctgggattacaggtgtgagccacagcacctggccgtcagtgtgaaattatagatttggaaaaacaaatcctgtgagaagagcaatttaccgtaccctgctctcttcaagtgacgtgggaaatgaaaaacrtccaaactaagacaaatttattggataccaaaaccaccaggctattgattcttaaagccagacaacaaggttatgaattgggtgataaaaatggaaagcatttagcttgacttctaaggcggggcagctttgtgcgctatcgcagttattgggttctactgacagccccacaactaatgacctagcacttattaaccagagtgtttactctatgtgctacatctgtctaatgtgttgtgtgagtgagatatatctgaacaatttgattttgtattgaggccggggtgcctgagacttactctgtaactttgaaggctgcaagaacattagctaaaagttyttagctgcagcaaggaaagcaagaaattgttytaagccctaaatagttttgcactgctgcagaggagggatttatgtctcctgatgggttttggaatggataagcagatgttgtgtgttagatgttagagatcagttattgaacccacagttattttaatttggatgctgaaattcagagaggctgtgttcatcagggtcatagtcagttgctgactgagatttcctaaagcttggcttcatgctccttctttcacaccattcagactgttgaggcctgtgrcagctgtcaagacygtgctgtccatcctccagctgcctggagtgagccccactgctcttcgacaggggctgctggggactgggtatcactgaccccgtggaactgaaatgcctctttttgactctgtctcacagtggtttacttgtgtcttttactcgatggtgcaggtaactgttatgggttgaattctgtctccagaattcatatgttgaagttccaagcctcagtgcctcagaatgtgaccttatttggaaatggggttgttgcagatgcaattagttgaggtcatcctgaagccacttgggtccttaatccattacaaccagcgtccttgtaacgggaagtttggacacagacgtgcacacaggcacaatgtcgcgtgaaggttggagttgtgttgccacaagctaaggtcctaccaggagctaggagagaggccaggaacagatctttccccagcgccttgagagtgagcgtgccctgttcacaccatgatcttgaacttctagcccacagaactgtgagacaagtttctgctgtttaagccacccaatttgtagcactgttgttatagcagccctggcaaactgacacaatagcccagtgagcattctataccatgaaagtagaattaggagaggaagatacagtagactgtaccctcttaccaccccctagttcttctttttttaatttttttttaatttttttgaaacaagagttttgctcttgttgcccaggccagactgcagttgcgcgatcttggctcactgcaacctccgcctcccgggttcaagtgattctgctgcctcagcctcccaagtaactgggattacagcacacgccaccacacctccacatctggcaatttttgtattttkagtagagatggggtttcrctatgttggacaggctggtctccaactcttgacctctggtgatccacccacctccgcctcccagtgtcctgagattacaggcatgagctaccacgcctggccttttgttttaaaatgatcaaactgtcgctaggaacttgattacttctcactgtagagctgctgggtgccagattacaagctaggtacttcctggttccactctgtactattgtgtgtaatgtatggcatattatttaacctaccctgagctgtggttgtctgatgtgtacaataatgggtggaataatgatagacaaatattaggagtttggggtggattaagcacccacyatagagccagacatatataatgaaataaccaccsttccttgtgtggttctagaaccttatgtgctarattctagaaatttagratcattaataataacaaagataaatcccatgtatgcagagcgaagagatttaggtaaacttaagaaaaggcattcatctcaaacaagtacttacgcgcaaatgtttgtagcaaaactattcacggtggcccaaagtaaaagcatgccaaatataacatcacctgatgaatggataaacaaaatgtggcctctccgtgcaatggactattaatcagctgtaaaacaggatgctaggctgggtgcggtggctcacrctggtaatcccagcactttgggaggccaaggcgggtggatcacctgaggtcgagagttcgagaccagcctggccaacatggggaaaccctatctctactaaaaatacaaaaatcagctgggtrtggtggcaggcgcctgtaatcccagctactggggaggctgaggcaggagaattgcttgaactcaggaggcggagggtgcagtgagccgagattgcgccactgcactccagtctgggcgacagagcgagactctttctccaaaaaaaaaaggatactgcgctgacatgtgctgcaacatggataaaccttgggtacatggtgctgagtgagaggaaccagacccaaaaggccatgtgttgaatgatcccacatacatggaatatacagagctgctaactctgtagaggcagaaagcagatgttggttgccagggacgaggagtaagggaaaatgggaggtgactggttttctttcagattgatggaaatgttttagaattagataaaggagtggttgctcaacatcgtgaatgtactaaatgccatgaattgtacttgttaaagtggttaatkttatgttatgtgtattttgctgcaataaaaagaaaaagcccgtctcactacaaggatatttatgtggctcaaatcagggggtatcttgaaacaagggttaaagggcattgctgttggaaaccatcacacggggtacagttcaaggttcttggaatcaagagtccctgtgctttatccttatagagactttttctgtgacctgaggaaactcatgtttccatctgtctaaaagaatttctttcctgactcttttcctcctgtggtggctttggtgaccctttgatgacttctcctttcattgcacctcataactaagactgtgtcacaggtcatccctgaaccaattctgggcaaaggagatgttgctctaaagcatgagaccagtcatggtttatcccctgcagctacaggccccactcctcagcatagtgttaccctgtgtgactgaatctgcaatgtgttaacaaggaaagccccccaaaacaggggcatgactgttgggagggcccccagcagggcatcccagaagaaagtttcacattggcctttgggcctccacctaaacaagccgttcttgtgctcggcctcaaggtcattagtccttccttcctccctcccttcacctgccttcccttcmcctgccttcccttcccctgccttcccttccccttctccttctccttccccttcccctccccctccccctcccccttcccctccctccctctctgttgcccagactggagtgcagtggtaccatcatggctcactgcagccttgacctcctgggctcaagagatccttccaccttggcctctcaagtagctgggactgcaggcatgtggcaccacacctggctaatttaaaaaatgctttttttgtagagatgaggtctcatgttgtagcccaggctggtcttgaactcctaggctcaagggatcatccaatctcagcctcccgaagtgctgggattacagatgtgagccacgacgcctggccattgattgtcttaagcacagatcccatcattcctgctcggaaatctcgagtggctccctagggactgtggaaggaagttcagattctccttcactgagcattcaagtcctgtcccagtcccattatctgagtgttctctgtaccttttcttctggaaggagcggttggttgccacactgtgtggttccagcctttcattttttctaatggttctttctgccaggaatgacttctctctccttctcactcttttgaaattgtgccatcttctggctcagctcattttttcctgagaatcatgtgtccctggctcccaacttatgttcatgtttgtggtgtttgtgtctgcctgactatcctgtacactctcttgaggcccctcaagagcaggggcccatgtsctgaccatctctgcatccccattctcyagccctggacctggcctagcatgtaccccagtcagtaggtgccttgtggactgtagtgaatggcaaagcgtagagaaaaggtaaagcaatagctgtcttccctgtatcatttgrcaccagagatatttgtakgaaatctccctaggccttggaacttggaagaacaatacactgcacgttagacaagtcaggacccttcaacactaagggatgccagagtgcatttcccagtattggtccttgtgaaatgcttatgtgtatttgcttaagcagaatgaaaatgtgaggcctgcctgcttacgtcgtccgtttccagaatgaaaatcrgaagaacaaagatcgaaatactccaaggcagggcttcataggtagtcccatggatgtgattaagggctgatttaacattcagaagaaaaacataaaaaycagccttcytgaagctgtagtctgaccytgggaagaatgtatatcctcaggaaagataaatttgcrttaaagayctctttggcaatgcattgttgaaagaggttaatattgtaagtggaaaattttgattacttctcgattctttcctcccatttgcttctgtacctgtgtcaccccagagagatctctatgctagaagtaatgtccacacyacctgcctgcctgtggctcaattaaacttgagttcctgcccttttaaagtacaatccagattgtgtgcaacaatacaaagggtggaaattaagaaaactcattgggatgcagatcagtgcacttcacttccccaagccaagggagatgactctggaggaaaagataaagatgaccacagtgaatttgcaggtcatcttttgtgcatgtgcttggttgaaacatccttrgaacctttcagtgagggaaaggtcctctctgaagaagtgcttgccttaaaccaggktttctcagtctcagccttattgtcatttggggcataatccttctttgttgtgggactgtcctgtgccttgtaagatgtttattagcattcctgaccttgacccacccgatgctggtagcatcccaccctcctgagtctttttttttttttttttttaagacagtgacttgttctgtcacccaggctggagtgcagtggcgcgatctcggctccctgcaacctccacctcctgggttcaagtgattctcctgcctgagcctccccagtaactgggattacaggcatgcaccaccataccagctaatttttgtattttttagtagagatggggtttcaccatgttggccaggctggtctcgaactcctgacctcaggtgatccacccacttcagcctcccaaagtgctgggattacaggcatgagccactgagccccgccaaycccccagtcttaataatcaaaattgtcttcacattgccaaatgtcccctgggggtaaattaccccctattgagaaccactgacttagaggctccccatggggaaaagcagagttggtgtgggaaagtctagcagttaaaagaggcagcaggtggaaaggcagagaagtgtgaggcygcatagcagctttgcccatgtggtgttcctggattagaaggtgtgatttggaccatgccagggtatgaagctggaaaggtcaggtcgacagggatccgattttggaggcctttgctaccaaattgagagaagcacattcaatttgaagctggaaatcttggggttattcccagtgcctctcttacagctgtgggacctaagccacttaacctctttgaacctcagtgcccttctctgttaagtggagtcgcacagatggattgtaaaagttgagtgaattaaggccgtgtgaaagtgtcagtatggtacctgggtatcctagttgcccaataaatgttttcttctttcctaagcactgtcacatccagttaaatccggttctctatagttctgctgccactaactcctgctgctatttatccagcctgtattacggcaaagcttcctgggctgtctgcctcaactccattctcagtctgatgtaaaggtttagaaaatactgaaacctgcacagtccagcacggtggccactagcccatgtggctcttaagcacctgaagcgtggctacttcaaactgagatgtgctgtcaatgataagatgcactctgtatttgaagaccaagatgagaaaaagaactaaagcgcctcattagtaatgctttatattgattacatgttaacatgctaatatattaagcatactaggttaaataaaatattaagattaatgtctggctgggcatagtggctgacacctgtaatcccagcactttgggaggccaagggggacggatcacctgaggtcaggagttcgagaccagcctggccaacatggtgaaacccccrtctctactaaaaatacaaaaattagctgggtgtggtggcacgtgcctgtaatcccagctactcgggaggctgagtcaggagaattgcttcaacccgggaggtggggctttcagtgaaccgagatcgtgccactgcactccagcctgggccacagagcaagactccgtctcaaaaaaagaaagaaagaaagaaaaaaaaagattaacgtctcctattttttttaaccctttttttaagtcaactgtggagaataaggtaagttttgtaagagtggccattgtcttatccaaggaagcctattgattcttcatgagagaatcattttctggtgctaaattttgagacataatttgtttcataggggtagtctcttttgaaaaatggatatggtcccttcaagaagagcagtagcatattgaataatgtgtttggaggagtttttttccatccgccccyccacccccaccccacccttctggtagatgtaagagtattctttcctttttcaatagttcttccttttccaagatacacagccttgaggcagaatcagagcacatcttccccacctcacacatgatttgtggttatcaaagcaaacaaacagtagtgtctgtactgtccttagattttgattggtcgaacagctatagtcaatcaatttattttagtcctattaatactacatagcatctcatattgttgtttgataatcgtattttggatttcatttgatctcttgcaatccttgcaacaaccacgagtgcctgatattgccatgggctttcccagaaaaatgacgggaggctccaggataacaaatcagttgccaggctcctgcagcttgtatctgcagagctgatgcttgaggccaggtttcctgactcccagagctttgtaaatgctgtgaggcccatgtgaaatgcagactgtgccttggagtttgcttgttatataacagagacaagatgggcacaattcgggtgacaactaatgtgtcttgactgcagagctgtatgaaaatgggtggttgaggactgtgttggatgcctcagggggccactgccccgatctgtgacaccacagtggttctgaaggcaaatgtacatgtttctctgcagccagagaatttgacttcgcagcaggatcaagacaaactgagttggcaggagtggacccttgtggtcctttcaacatagtgaactcgaaattttcaatgtttgtttgagagcatattgcrtgcggcttttaaattagagttcacatgatgaatctttaatagtgcctccaaggccaagtgccattaggaagtgccagtttgacaggccagaggatcaccttcagggaggaaattccacagagatgctcgcgtggccccagacccggagggaggcaccagttgcttcctgtgtggtcattcccatggagcagggagaaggagagaaagttaccaaagtgaactttgcaaatgacctcacgtgcacgagagggtgtctgaggggcagtaccccattgcctcagggacctgtgtgggatgctgtgtggattccatttctcatgttacagatgttgtacagtcagacagctagttgctggacctttgttttaaaagggtttattggagcagtatgagagtgactgcaggccgcctgatgatggcacattcgttcattcattcattcattcattcattcattcagcagatactcactgaatgcttcccatgcgtctggatataccttgaatataaagtagtcatggtttatgcccaagtagagattaaaatctagtgggcgcagcagcgattaagcaagtaatcaatcaaataattgtttaatttagaaatttgatgagtactatgaagaaaaygaccgcagcacggtgatagacaaagttggggagggggctactgaggcataggattgtctgggaagagttctctgagttgacagcattcaagatccagtctagagggataaggatgcagtccagcaaagagcccaacataagcatttcaggcacagggagcacacttgcaaagaccctgaggcatrttccagaagtgaaggggtcagtgtggctggagtagagcagagagagtggccagagacaaggtcggagagatcgaggtcaagtcaggtgcttctaggtggagcaaagagtttggatttaagagttgatgagagacactgagtaatctccttttttttttgaggcagagtctcgctctgttgcccaggctggagtgtagtggcgtgatctcggctcactacaggctctgcctcctgcgttcacaccattctcctgcctcagcttcccgagtagctgggactacaggtgcccgccaccacacctggctaattttttgtatttttagtagagacggggtttcactgtgttagccaggatgatatcggtctcccgacctcgtgatccacctgccttggcctcccaaagtgctgggattacaggtgtgagccgccgcgcctggccaacactgagtaatttcaagtggagtttgaatgaggctgctaatgcagaagccacgggcatggggcgatggtagcttcgattcgtatagtggcaggagaaatggagagaggacgatgtatgcgaggcatggaatagcagaaatttgcctgaattggagattgcgtggattgcccaagatgagctgtttgagtgaggaactgagaatggctcccataatatgtggcttgagcaatggagtaaatgatgttgccctttctggagcaggtttggaggaggaaatcaggagttgaggtctgagatgcatgtgggtttatccagtgggtatataggaagaaggtcattgtacacatggacctggagctaagaagagaggccagagctacagggaggaatatgggagtcatcagccgggagattgttttgcaagctgttggcatgggggttttcacctagggagagaaagaaagtgtggatcccacattgaatcctggaatacccctaaaatttatcattcaggaaggaagaggtttgagaaaaaaaatgtatgaaataagtatctcagaggttggagaagtgagtttactagagaaaggcagtagcatttctgagcagttgagtgcccatttgaaatcagaaatgattaactgaaacatatctgccagcctgagagtgtgatttcctaccccatttggcttcacacataaagctgtgaagagcaaggagggttgcattcatctgaagcgttggattttcccaggctactgcagtctgaaacaaaaagggccaagggaggggcgagtacttacagaaggggattatagtaacaaaccgtggcagcatctacgctgaacaagagagaatmcaaaaaaaaaaaaaagcaaaaaaatagacctggatagagagtatgataaagaagggcagtggattggggatcatgatgacagtaaagaatctatgcaattgtagccttggagggctggcaacgggattgtgggagattgtgtgggggactgtgggggatattgacattttaaaccatgcaggttgtgctgctttgggtgatgacaaggcctagaatgtgaacctggttaatgtgaagtggcagatattttggatgggcattttcatcatggaagtaagtggagaggaggaagaatgtgagaatggtcacgcggagattacagttatcaagaatgggaggagtaaatgacctcccatttggattatgggcagtttcttggtgtgatgtgggggattgtatgtacacacacatgcacacacatacacataaaatttttttttaatctgcagtagcaatataggatattgcctttcaccttttttgcttttttattttctattttttagagatagggtctcactctgttgcccaggctggagtgcagtggtgtgatttttagttcactgcagcctcaaaccctttgctcaagtgatcatcctccctcagcctccggagtagctgtgactacaggcagatgccaccatgcccagctaaagtctttacatttttttagagttggtaggtctctctatgttgcccaggctggtcttgaactcctggcctcaagcaattcttccccctttgccctcccaaatgttgggattataggcatgagccactgcacctggcatgtctttcaccttttaagttcagggaacagtttctcctggctacacatacgttatcagtgcaatgctttatgaagctttagaaatgagctgatgactttcataaataatgaaatataaacatgacattattttagtatcttcaaacaaatgatctgaggatgagttacacattttaatatcaacactaacttgtaatttgtacatttgcattggctatacatgcaaaaagattattagctacaatgaratggattccttaatatctatgacattctaccttgctaatgctatagaataacttgcactttaaagtacatttgcacactttgcatattatgttctatgattgcttctgggttttccatacagattatttttgttgatattaaatggaaatcgtagggctgaaatatgctgttcttatgtgaagtaaattactataacctgttggcctaaaaaaaagaatgagagctgtgaccagtagttgccaaggwcagggaggacgatagtgagccacagtggaacaggggtcttcattagagagagtggcaggaggatccaggagagacagctggaagccagaaggacagaggcccatttcttttcccttagttgggtacatgctttgcaagagggtaacagatctttcttttaggggaagcagtgatttaggggacagctccactttcacataaaagcaagaggcagaatgacgtgagaggaaggaggttgaacataaagaggagttttctgatctcatagtgtaagttccacagcattccatagatggacttggaggggaagggtgggctgaggggtatcgtgtgattggagtagtttgtatgataatgaatatccagtgagactgctgccgtgatggagatagtcattgatccattcaataaatatttattgattagcttcttgtctatatgctagatactgtgctagtaatgaacaaggcagcagtgggcaaaatgaacaagtccctgcccttgtgacactgatggtctgataggggagatagaccgtaaaggaaacaatacgagaatttgcgtgccaggatttccaaccactaagtcagtgtctttagcctctcttagtctcagttttccatttggtaaggtgggtgtaatgaagtgggtggtgctggtgctcttcagtcagtattcacttgtgggggaagtttttgatgaaaagtcgggcacatcatcagagccaaccctagtccgtagatgtttttgtttagttagaaaaaggcacgtgttgagaaactctgctttcatctcttagaaagctgttgtaacaaatttgcaatcaaggaagtctaggatgtgaacagtttgccctactgcactggcggattcctgccctggtgaagtgaggagcagagaggagaaggggtggccagctctgtttattaaccagttatttactaggtgctttagtacaggcttctcaaacattcgtgtatatatgaatcacctgagatcttgttaaaatgccagttctgattcagtggggctagggtgaggcctgagattctgcatatctgaaaagatcagctgatgctaatggctgttggttcaaggaccaccctttgagtagaggtgggttrgtgtaaacattccttggtcttagatgctggtctcagggagaggcttaaaactaaccctggaagacctagatcctttgcccagaaggggttttagtcgaatgaagagagatcaagtaatgcacaggaaatgattagaagataattaagtgattaggagtgtgctgctgactcctgttggtgttgagaagcaaaaagggagagcctccgggactagacttgacagagaagtcctatagaagcagtgaagacttgattctattgaggtcccagagaggaggaaagacatctaggatacagtaggcagggcgggagactgtgtgtgtgtgtgtgtgtgtgtgtgtgtgagcgcgcgcgttggattgtggcttgggtaaaggtgtgcagtaggaaaataataatgacagtaatataaataatgataataaagctaacatctttcaatggtccatctgccataggacttggtttttttttctttggagtgggacggagtctcgctctgtcgcccaggcggcacaatctctgctcactgcaagctccgcctcctgggttcacgccattctcttgcctcagcctcctgagtagctgggattacagacacctgccaccacgcctggctaagtttttgtatttttggttggtatggggtttcactgtgttagccaggatggtctcaatctcctgacctcatgattcgcctgcctcggcctcccaaagtgttgggattacaggcgtcagccaccacgcccggcctataggacctgttttataacaaaacctcggtgatgtccagctctttctcttcaggtgctgggacagcaccttgtaagaaaggttcactgaagacgagtgacaatgtgtgagtggcaggattcaggcaatcttctagttagaatcagtggtccaaatcctcccactgttatatgcacctaggatcagtttgggatcctaagcaattctgaagggtttgagccattttgtttccccatatatgtgtgtgtttgtgwgtatgtgtgtgtatatatttttttcttagatttttattccttcttcatgtgcagtgtttctagacaatccacacatcctgaacacccatgaaaaattatttctaacatccatgatgctaattaaaagacagcctctggtgctgatgagagatagctggcgcacacgcttggaatgtaggcttctgactggagtctctcaaatggtaactagccacccctggagggtgtattcccaattaggacacgagagatgttaactcactgcactgagcttgtaaattaaagcttatatatataatatatatgtatatatattaaagcttatatatatacatatatatacatgcatatatatgcatatatattttatactgtctgtgctgaggtattttgaattgcaagcaatataattaagacatagagatcaaaacttttaaataacatttatttatgagatggagtcttgctctgtcgcccaggctggagtgcagtggcgagatctcagctgattgtaacctccgcctccccggttcaagcaattctcctgcctcagcctctccagtagctgggattacaggcatgcaccaccacgtccagctgattttttttatttatattttttagtagagacaggatttcaccatattgcccaggctggtcttgaacgcctgatgtcaggtgatccacctgcctcggcctcccaaagtgctgagattacaggtgtgagccactgtgcctggccaatttttaaataacttttaaattgtaaaagcaatgcaggctccttgtataaaatttcaggaagtatatatatatatatatatatatatatatatatatatatatatatatatatatatgtatatgtttaaattagtcatattctataccaaaagataatttacaacatttaagcctttttttcttatataggtatataggttatttgtacacgtatataaaatttattgctttggactgaaggatacttgtgatcacattatataatacatttagctttgaatcctgtgtttgtagcttaacagatcagccaggcatggtggctcatgcttgtaatcccagcactttgggaggccgaggcaggtggatcacctgaggtcaggagtttgagaccagcctggctaacatggtgaaaccctgtctctactaaaaatacaaaaaatagctggacgtggtgcctggcacctgtaatcccagctattcgggaggctgaggcaggagaatgcgtgaacccgggaggcggaggttgcagtgagccaagatcacgacattgcactccagcctgtgccacaagagagaaaccgtgtctcaaacaaaaacaaacagatcatggtgatttttttgggttcatacaatgttcttcataaatgtaaatttcattggttaagacagatgggagacgacagatggagtacatgtttaggaggaggagttgaccagcttggccgaagagttggatcttggagttgagggagaggtgtttagggatgactcttagacacctgggttaacaggtggggaggcctccctcacaccagggagcagtagggagacagcagattagaggctggttttcccagttaattcgccaacatttgcacatgttcgtgatgtaatttccagcccacctcctgtttcttccttccgttcttcttgtgttgatttctgtgttgacttcctggagtaacttctgatatagattgagatttttcttraaaatgtgtttttagtacacagaggtgtcatttaaaagtgaaattcatgaaggaatattttttacctgctgggtttaatttcagatgcctgtgttatcataaaaggggaaccaccatagattctgttttaaaactttctacaaattgtatgtgttgatattaacttctgcagatggagagaggaaaagaggaaagtaagtatcttattaaagagtttttttcccagtgttatttgaatattattaatgccaaatgagttcagttcctatcctcctcccttcctttaaaagtttaaatttgtctatarctttttttttttttttttttttttgkgagatggagttttgctcttgttgcccaggctggagtgcaatggcatgatctttgctcactgcaacctctgcctcccagtttcaaacgattctcctgcctcagcctcccaagtagctgggattacaggcgcccaccaccatgcccagctaattttttgtatttttagtagagaccgggtttcactatgttggctaggcgggtttcgaactcctgacctcaggtgatccgcccgcctcagcctgccaaagtgctgggattacaggtgtgagccactgcacccagcccttgtctatagctttttaatgcctttctattgtacttttttctggaatgagagttaacagttatgatatatttcaccctgggaaagaaataatcataatattcaatatgaaggatttaggttaaagtaaaaggaaaaacaccctctggcaagagttcttaggatcaattgctgagggagagcagagcctgaggtgtttttgcctcttactagtagtgtataatccttggccagttaattaatctctctaggccttaattttctcatccgtacagtggggactggaaatagtgtttatctcrtaggttattttgagaattacataagcagctatatgcaaaaaaatatagaaaagtgcttgacatataagtgctacttactrctagttgccttgacttattgctgtaagtaaactgtgaaaacaaaaattgtgattttaatgttgtgatacagtcagcccttcatatctgagggttccacattcacagattcaaccaactgtgattgaaagtcttcaggaaaaaaaacggatggttgcaactgtactgaacacgtgcagacttttttgtcgttctctaaacaatacggtataactatttatgtagcattcacattgccttyggtattttttggttaagtttttaaaaaatttattattaccattttgagatggagtcttgctgtgttgcccaggctggagtgcggtggcacaatcttgctcactgtaacctccgcctcccgggttccagtgattttcctgcctcagactcccaagtagctgggattataggcacatggcaccacacccagctaattcttgtatttttagtagagacagggtttcgtcatgttggccaggctggtctcaaactcctgacctcaggtgatctgcccacctcggcctcccaaagtgctgggattacaggcatgagccacctgtaatacccggcctgcattaggtattataagtaatctagagatgawtttgagtaaagtatataggaggayaggtgtaggttatatgcaaatactatgcccatttgtatgagggacttgagccatctgtggattttggtatctgtggggggtcctgaaccaggccctcacagatccctagggagaacggtaactctggaaggagaattgagtaggtggatccttcaggtttaaatcacctatctggcatattgggcaatacttgtttgttggaatctgttttctacccaatcctgtgggggaaatgtgggagtagagagagatgaaaacctcattaagggtcaggtgcggtggctcacgcctgtaatccccgcactttgggaggccgaggtgggtggatcacaaggtcgagagattgagaccatcttggccaagatggtgaaaccccatctctactgaaaatacaaaaactagctggacgtggtggcgtgtgcctgtaatcccagctactcgggaggctgaggcaggagaatcccttgaacatgggaggcggaggttgcagtgagctgagatcacaccactatactctagcctggtgacagagtgagtctctgtctcaaaaaaaaaaaaaaaaaaaaaaaaaaaaaagcaaactaattaaggctgcttttctgccctccaggaaggaaggattgcccctgaaatgtacttaaaatatctttggtaagcacttcattaaaggctctctcatttgagcctcaaagcaaccctccaagataaagggtatcatcttaatttatagatgaataaggaagcttatccagagacaggggacttggtcaaggtcacagccagtcaagtgcagcatctgggcttgaacccacatctctctaactgcacagccctctttttctgcacttcctgctcctaagagattyacgggacttggtggttcttattctctgtgactggtggaatgtgtacgtagggtttgttttccatgctttagactgaacattccctagaggggactttttttcaagtcaacattctctgttcaaaaggattttgcttttttcagttttactttctagtctacaccctctagccccgtggtctttcatctgttccaaaagaattccatttagaaaatcgtgtcagattggttgcagaagcaggctcagcattgacagttgtgatcggctccattaggtgtttattattggcaactcactgaacataaactcctgaagcttgagagggtggcctttggatagaatctgattccatgtattcatttaacagacagttatcaggcacctgcagctgacaggcaatatgctaagttttaaagaatgcaaggtggatctgatggggtgggtatctgccttctggaaatgctaaggctggtggggaaaggagtcagtccaaccagaccaccttcatggcggtataagggttacccaagagggaaggatgcatttgggaatatggaaggggagaaccaagccagctgttttatagacatctgttccttgggaatctgaagctttttatagctgtgtgcagtgggtgagttccgctctgttagggaagcaccatgtgggtttatctttctttccacctatagtcagcgtgacacctatgtcaggaggtgggtagagatgaggtcttaggrtccattggttttttaactcctttrtaggtttcatgattccctggtcaaataatcaggtgaaagatcatgggccatccactttgtctgcaccaacctgctccctcttccgttgacacatcacggccagtcttctgccgtggtctgaggatatgccctccccaggctgtccgtttgttcttatcccttctctgcatgttttgatggtttctgtgattctctggacctcttcttccatattgagggtggaagctatgaagatagtccctagtgagtgtgtttaggctttcagttgtgactagggtacagtcccatgcasatggaggtggtggcctctcccatctccttgccttggcatrtgctctttagtcgataccattgcctttctcagtctcctctgcccagaatgctggaactgttctgccatcctgaccacgcacagggcagtcagcacctttatctgcccttccagagtggtccatgcacatctcagcttggggttgttatagatcttttctgttggtctctttcattagactacactttttgaatccatcctctggtctagtcytttttttttttttttttttttttttttgagatagaatctcgctctgtctccctggctggagtgcagtggcgccatctcagctcactgcaacctccgcctcccaggttcaagttattctcatgcctcagcctcccatgtagctgggattgcaggcgtgccaccataccytgctaatttttgtgcttttagtacagacggggtttcaccatgttggccagctggtcttcaactcctgatctcaagttatccactcgtctcggcctcccaaaatgctgagattacaggcrtgagccactgcgcccagcctattctagtcttcttttgaaacacagcacgtggttcatacgtggtacataacaggtgctaactaaatgctcctttaagtatgttagttcaggtctcgaagttaacctrtactataaattgtgcgtgtgtatgtgtgtgtgcgtgtttgtgtgtgtgtgtgagagagcgagcttacagtttttgttatttacttatttatttattgtctcagttttgaagactgcgagacggcagcatcatctcttgggatgaaaggttagcaggaagcctagatcagttgaacccctttcaggatctatgagatatttctcttccataacttacacccatctccagtgctaagaactcaggccttcctctttgctcttcctttcagagagtattatgagggaggccgaggacttcatgctccggacagagaaacggcgctgggattagggattgccacttctgagaggatgctgggaatctgcagggggagacggaaattcttggctgcctcgttgagtcttctctgcatcccagccatcacctggatttacctgttttctgggagcttcgaaggtaagaatggaagccaaagtgagagggaaggagggaagaaagggaacattagctgtcatagaaccctagaaaagaaactcaaagccatctaataggaatatgtatttccagtcatgggaagtgacttgtctagaatcacacaggtagttggcagcagtcaacagtgtgaggagaaaaagggaaaaacaagcaaaataaggcataccttgatgtagtgggagtgtggtgggtacagaaatgtcaaatcaagtcaattactttgtcgataatgggagaaaaggttgggccctggagaaattactgagctattcatggagccatatgtttcaagagttggtccatcttttcattcatttattcacccattcaacatcgtggtggtggtggtggtggtggtggtgttttttgtttgtttgtctggtttttttgttttgttttggtttggtttttttgagacggagtctcgctctgttaccaggctggagtgcagtggcgcgattgtggctcactgcaacccctgcctcccgagttcaagtgattctcctgcctcaacctcccaagtagctaggactacaggtgcccgccaccacactcagctaattcttctatttttcgtagagatggggtttcaccatgttggccaggatggtctccatctcttgaccttgtgatctgcccaccttggcctccaaaagtgctgggattacaagtgtgagccactgcgcctggctgtgttgttgttattattggrtgcctgcactaaacttggtgctgagaatatggagataacagatctggagattcacaggatagyggaggagacagataggctaagaaatgatcgcggcacgttgcgatgcgcgttgtgatggaggaaggcagggtgctgtgggagaggtttgttggagctgtcagacctgggctggggatgaaagatgatcagttacatgaggggccgagcgcagggaggcaacaaaggatttgctctccccaaacaaataaaaacaaatgatgatccctgctactttccagaaatcagtgggaacagcaagactcaccatttttctagccagccgtttcaaatacagtgcaatgttttgcctgtgaagatggttttctaggcttcagagagagagggaacggcagtggtgaagagctgactttatttttatttacccccacacttgaatttcagaaggaagatctcaaatgaaaatctgtctcaaggaagtcacaactgtgtttttaaacgtttcctttatgcataattttattggcagctcaaggctaccttttaattaggatctccacttcactttctgagatttgccttgagttagctagactgaatataaacaaggtgaaactgtgtgcctgtctagcagggagggctcaggatgctcagcccagtgccgaggccaagtgacacacccctgtccctgttcccaccctttaggtgcatccctggaacagtcagaaccttcatctaagcaggtagatagagccaattatgccatggcagtggatgggaagtttttggaaaagggactagagagaggaaggggaggtgatgttggtcttgatgtaaggaaacattctcccagagatcatggaaaagccctttttataaaagaagttagaggtaccacccgtgctagtataggtttaataagtagaacattgacttttaactaagctggtaataataataatggtataacaaggacagtgatgacagacactgtgattctgtcatcacagtgatgacgacagtacaaacaactagtattttgagtatttctacaggccaggtattgttataaggacttctacatatgtttactctttcttcacaatgattctttgtgccaggtgcgtttaatacacctgttttacagatgggggggatgaggcagataagcttcagtgatctgcccatggtcccagaggtggtcaagatggagcctggattggactcaagagcttgagttgttaactgtaataccatgctatagattggggcctcaatgagtgattgaactttggtcagggatttgacagggtgtcacacaatctgggtgaggaaagttgtagaattttgatttgcactctttggcagaaagccaacccaaattgatttttggtgaaaagggaatttgatagttaataggatttgtaagttcagaggtagggcaggcttcaggcagagttggatccaggggcttgtagctaggtctccctctatccctttgttctatttttctctgccttggtttttctcagggtgactttatctacatagaggaagtttcaggcttgcatcctgtcctcaccaaccccagtagaaagaggattttttccttttgctaattcactaatattgcctctgattgaattgcctgtggtaactcctcctgaaaccagtcactgcggttatgggaggggagtgagggaggctggtacttttttgttaactttaagccctgtgcctatttctggtcacaggatgatggagagttgcttaaaacacgctgggtgagattgggtgactgggatggccaccaaaggcaaatggcatggtttcccaaaaggaagagattagaagttgatctggattatggagaattcataactgtctgtgtttatggttagatgtgttgatggtcaatttgaaggcagcttagaaccatcgtggccggtggagtgaatgtgatcactaactttgagcaatttcaccagactggcagatagattatgggaaactggaaagatcatgaaaatactttgaggcaacatgacagactgggtgtaggtgctgtatctatcaacatgatcctttagaatgaaccccacacttgggaccaaatcacgagctgcatttagkaggggctgggtgatgtgggcatgttaacacagtattttagctaggatgacagaggcaacagatttctgttactgagtgtcagttagtgtgcattcgggctgccgcatttgtatttgtggactctatgctgtaaggacaatctagatgaggcagcatgcttaggaaaatccaggtgagtgacagtgcccrttcaaatctggttatgtaagaaatggtgggaagaattgaggatgtttaccttggaraagcagaggctcagggtgtacatgctcagcttcagcaaacagacaaagggctgtcccctgaaagaaagattgggattgctctggtggccccaaacctatggagggacgtggcaaggagccagatgtcaagctcctcataatgaggatcatgctgaccagagctggaatgagctgcccaggaggtggtgaaatacctggcatgaaagatrcagaaacacaagtccagtatcgtgggagggagctgagcgagacaggcagttacrcaaggtgacccatctgaccctgcctgacccagagatcctgaggctctgggaaagtctgagtatttatcagaacacaaaggcaatgcctccatgaagctccctgctggttgcyrcagacaacagtgcatttcccaaagggcccgcagagacgttattttctttgtaattaaacatcacmacaacgttrcaatccatttattgacacccttgagtttttggtttcgtggcaggtgaagccataaataaggggcagagttgctgcctgtattcatggaaatactattcatactttatgtgggtttatttattttttgactctgtttaatatcaatggacctcctgagagcagagccaagaactccctctgagatgtggctgctctcagcatagggttttggagttggattacacgccgcagcatgatatattgagagagccctggagggggtcagctgtctcaggatctcaaatcacctcagccagaggagctggatgatctggggcacacttgctcttcatgstaggccttmgtttcttccgacgtgaaatgaagttgtcgagtgcacttagyagggtgccgacattctacctacaagcttctgattctaacgtctgatgtaagtgaactgaaaatgaccagaatcttccccgattaaggggaattatgacactaagagggagtcggcttaggcttactgtgatttgctcctgagcatggaagcaggatcaatgcataaatgttatggggaggcaggcattgtctccctgtaagaaagaacacctgtttcagcgactcagttgtcaggcatggagttcaccatctgggaaagagatgagattcccattccttgagacaccttttgaaggcccagtgacctctggtgaaggacgctcatcaggtggtgtttttgttagtgcrttaaccccttagttcttaaacccaactccttgctttatttctttcccagtccacctttctttctctaacatctcagtcagcattcccagctctacgccgttcaggccctaaacttgggagtaatcctygtctcccttcattcactccrtgtctcggttgccacctcctgttgagtctaagctcggccttgtagctgcgtcagttgtttcccatctttcaccactgctgtcgccctggctctgccactcctcctttgtgatcaggactaagcacaacagcccactttcttgcaggtctgcttcgttcttcagactcctcagggctgaatcagagcaccgctctgctccttgtcagcccctctggcccatcccctaatccccaccatmctgcctcscattatctggcatcctctacccagccacgccagattcttttaagtcctggtgtacatcgccctctgtgggctctgctcttcccacctgttctttcttctccctgacaccctctattgctcttacttccttcctcttctttgtctggctgcctagatccttgggtctcagctgaaacacaattaattgctcctgacccttaactagcaggcttccttggctccctatttacctaactccttgtatgtacccttaatactcagggctctttatttttcttgtttttataatcttttgttttcacagcagatttacaagctttgggaatggagaaagcgggtctctttagctcgcccttccacctctagcacctactgtagtgccgggagaagatttggtccccaaatgtttgttcaatgaatgagtgaacgaacacatgtgccctcctccgactttgagtactgacaggtctcatcattgcctcctggatccactgtggactccttaccatgactctggggtcttccacaattgttttttccccaacctatactgtctgtcttcagggtataataccctgttgaactacctgagraaactatttctctgattcttaattttcactcttgcggtcttactgcccactattcagttcttttttctgtaaccctccctcccagccaacaccttcaatgcccatattcaatgtcattttcccctaatgccagatcccatgtggaaacatctatgaccagcagtcatcaagagatattttgcttgtttgatgtctttctaaccacttacctatgagtttcttgagagaaggaagtgttttattcgtcgttacactcccagtgtctaactgagcactcgctcctaatgtgtccttagtgaatgttccctgggtaggactgtggtattgagggacacaggaaccgctggtagggaagggctcttggtgctgtgagcatctgtgatttttgagacctgaggacgtggctcctttcatttggtcgtgatgttaattccgggactggagtgaatctgctcaactatagccccatttgaatttagagcatacctgttattttctatcagaatcaccttttctcagagcccagtgggttttattgtgggatgtggttcttcttttctgtccatcaaggagatgtgttcggctattagagacttatcagcatgtggaaaaagggtgcttttcagccgttcagaaaactcttcacacatgctgccctctgataattcataaccagctcggtgcaaaggtttcccattgtcagggaggcagtccgggacaatgtgggtgttatttaaaagcaaatgtcttcagaggatgtgaagtcctgaacacttaaaaccagtgtcatgaaaaggcagaggatcttcacttctgaactgatatcagcctgcacccctgttttgtcattcctaaagcctgagttccctgttgcttccatttttatcaacatgaaccccctctgaaatgaatgtttttgagtgttgtcacagtaaatttcaacagaaaaaaatacggttccgatactgggctattttgaagactggcagtgagagtgaaagaattgtaagttaaagctttttctttgccttattattatgggggaatcccagggcacttgtgtggtggaataggcrggatgggggtggtgcattttatccaaggagggtttgtccagacatgactgattccccagccctgtgtctgctcccccatccctcagcccctcatcccagagagtgtgctggaaggtctgggaagtcagattgtacatggtattggtgaataatctgctggagctttcagtatcccccaagtctaggctatgcagcagctttagcaggaaagcctatttttgctgtcctgccagtggtccaaatgtatcatttagtaaggatattatggagtataagaacataggatgccgaatgcaaaatgaaatgggacttataatacaaaagttgtgtttttaaaaaattggatcaaaaatgaagagctggccgggcacggtggctcacgcctgtaatcccagcactttgggaggctgaggcgggcagatcacaaggtcaggagatcgaaaccatcctggcgaatacggtgaaaccccgtctctactaaaaatacaaaaaaattagccgggcgtggtggtgggcgcctgtagtcccagctacttgggaggctggggcaggtgaatggcatgaacctggggggcggagcttgcagtgagccgagatggcgccctgcactccagcctgcgtgacagagcaagactccgtctcaaaaaaaaaaaaaagaactttttcagccaatgtttaataagtgttagtgctgagcttgagcaaaatcttgcaacaaatgaaaatgtgagcatgcaagtgggctgctctgaatagtgcccaggtgacacatgcatcccaaagaatgcccagtgcatgtgtctgtagttcttaccttgggactgttaagagtctctttaaggtcttggcatctgagagggcagtaaagtctatcccaattatttgcttgtgagatggttacaaagatgacctctactttccttttacttttttttaagatggagtcttgctctattgcccaggatggagtgcagtggcgcaatctcagctcattgcaacctccgcctcccaggttcaagcaattctcctgtctcagcctcctgagtagctgggattacaggtgcccacccccatgcccagytattttttttgtatttttagtaaagatagggtttcaccatgttggccaggctggtcttgaactcctgacctcaggtgacccgcccaccttggcctcccaaagtactgggattacaggtatgagccactgcacctgacctgacctctacttttcttatacgtagcctttggtcttaaaataatattggctatcctgctagggtggaacaaataatcctgctgcatccattggctgcatctcctttaagaggtcatggcaagaggcctggaccaggaatcaagaaatgtggttgccgtgagtcccaacatgcaacttgtatgagtttcctgtggctgctgtaacaaaccaccacaaacttagtggcttaaaaaaaaaccatacatttattatcttacagttccagaggtcagaagctcaaaatcattctcactgggctaaagtcaaggtgttggcaaggctggttccttctgtaggctccagtaaagaatccatctcctggtctttttaagcttcttgaggctgcccgctttccttggcttgtgacgccttcctccatccccaaggccagcagtgtggcatcttcaaatctttctctctgatgctaacctctacttctgttgttatatctccttctctgactgtgactctcctacccccctcttattaggactattattattattattactatttttttgtgatggagtcttgctctatcaccaggctagagtgcagtggtgtgatctcagttcactgcaacctccgactccctggttcaagtgattctcctgcctcagcctcctgagtagctgggattacaggcacgtgccaccacgcccaggtaatttttgtattttttgtaaagacaggttttcatcatgttggccaggatggtctcaatctcctgacctcgtgatccacccgccttggcctcccaaagtactgggattacaggcgtgagctgccccacctggccagacccttgtaattatattgagcctacccagaaaatccaagataacaaccctgtctgaaaatccttaatttaatggtactggcgaagccctgttggccatggaagatgacatattcattggccatggggattaggatgtggacatcttttggggggtcatttttccgccttccataccactttcccacagtcccatgctcccacattctctccatcctcttcttgtcctttatggacagagcagagatggtgtgccatgcacttttcatatggacatctcatccttcccttggagttttgggttcttgcatttgaatttgacatatatgtatccaacatttcatttacagctcatgagaaaggcactgtatttagatgtattggtctgaattgtctgaatgatttaagaccataatacttcatctatgataggtgtttaatcagtaactgatgatgcgttaaggttttctgaaaagataagttcagaatgtctgctctttgttgcaggtttcctggttttaagtcaattttattttattttttgattttggataccaatttaacaaaaggagggaggattttattcagagggtccttttgatgtttgaataggtctcttaattttaagtaaaagatagccatttatataactactttggaaaacttacccaaagtattaccaagcaaagccaagcataccccatgatcccttagctctacccctagcaatacacccaagagaaatgcatgtaggtggaaacaaaagactagtactagagtgctcacatcagcgttatttataatagcaccagacaggaaactatgaaatgttcatgaacactaaaatgagaatagtggggctgggtgtggtggctcacgcctgtaatcccagcactttgggaggccaaggcaggcagattacttgaggccaggagctcaagaccagcctggccaatgtggcgaacccccatctctactaaaaatacaaaatagctgggcttggtagtaattaggtagtaattagcatgcttgtagccccacctactagggaggctgaggtaggaggatcgcttgaaccctggaggcgaatgttccagtgagccaagatcatgccactgcactccagactgggcaacagagcaagactctgtcttaaaaaaaaaaaaagaatagtggcacgtttatatagtgaagtactatagagtgatgaaaatgaaattactctcagtattgagcaaaagaagacatacacaaaataatacatactataggattccaattataccaagttcaaaaacaggcaaaaattaatgtaggctcttaccaattcagatggtggttaactctggtarggagggtagaacagagactggggcaggccccaaggaagactttgggatgctgctaataatttaattttaatttttgtttgtttgtttttgtttttttttttttgagatggagtctcaatctgtctcccaggctggagcgcagtggcacaatctttgctcactgaaacctctgctccatccccaggttcaagcgattctcctgcctcagcctcccaagtagctgggattacaggcgtgtgccaccacacccagctaatttttgtatttttagtagagatggggtttcgccatgttggccaggctggtctcgaactcctgacctcaggtgatctgccctcctcggcctcccaaagtgccaggattacaggtgtgagccaccacgcccagccttaattttaattttaacctgtgtgatgactatatagctgggctcactttatgataattcactaagtatttcacttaggacttgttcatttttctgaatatgttattttagttttcaaaaaactatgcaaatcttgatggtagcagaatttgaagtgattttgtaggttttgcattgtttttagatgagaggaattttcttaacctttgggatatgtgaatctatgtcattgttgggctttgaagttcaaatgctttttaagaatgaaacttttctttagagatcattgtttaacacttctatgtaatgacattggcttttttcctttctgatataccatttggacagatattcaccctatgagagtggatcacagcactgatttcaagatctgaaatttactcataaaaaccctaatctgtatgagtgttttcatcagttggaaacaagaccagtattcttaccagctcttgcaatgacacggctctaattaatactaaaacaatattactgcttgatattgaccccaagccacattagataatattctcctttgtgttattcaacaaacatgcattttcataaaatccttattcctggaaatggaaaaaaaaaaaaccttttattattgtattgtggaagatatagaaacacaagaaggaaatgtactatttaaactataacaataatggaaactgtagcaatcgtttctatttatcgcatgttaaaccaarattggctgcatctggcttgcacttgtgttgggtttggcccgcctactgcttttaccatttttgaatttgttgctaatggttaaatattgggagattgcacataagaagtcatgatttttggctttccctaaaaaaagtgaaaagatctgcaaaaccagaccctcatttcatcatagtagctactggctggagctgagtactggctgtccatgtgcacagtgctcggatgatccattttgtcacgatctccatccttccttgttgatccttgtgtcatccctgcactgtcgtttacatagaacagaattgagagggaagagcttctggtatctgcgtatggcagtggttgactctgtctggctcatttagactttgagtttccaccttttggcctggtgctgggctaggaattttacacatattatctcatttattcccccaaacaacttcatccttgtcccattttatagatgaggaaactaaggctcagggacgttgtaccgtttgagcaaggccaccaagatagcaagggagcctgtccttgtctaaaaaggtcctttattctgcagtcactgaagaacttgcagatatagaaacaactggtagatgacatttcaaagtcgatatgctcaagctttagacaaggacgagacaaaccctgagacaagtgaaaatggggtatcttggacaacagagaagacatgcgaacttctgtggctagcaggattcttataagccagtataacgaaaaaattcagttaatcctttaatgcagtttgcattttgtttctgtcatagactcatataatcaagagaaggaacggacatcaggagtcatctaggctggcttacagcctaaacagataaaacttttgaaaattacagaaggactttttatagggcaaatgttgatggttgggggaacatagcccccaaggacaagtggatgggagtttgaattttagtagacatcatttaaatcacagagtgaaatagacaagttactcaacatcattgcaggtcagtttcttctccataaaaaggagagcacagggctgggcgctgtggctcacagctgtaatcctagcactttgggaggctgaggagggcgggtacctgaggtcgggagttcgagaccagcctgaccaacatggagaaaccccatctctactgaaaatacaaaattatccaggcgtggtggcacatgcctgtaatcccagctactctggagggtgagacaggagaatcgcttgaacccaggaggcggaggttgcggtgagccgagattgtgccattgcactccagcctgggcaacaagagcgaaactccatctcaaaaaaaagaggagagcacaacctgtagcttacaccgctgttataaagactaaatgacctgttacatccgacagtggtcatttaacaaatctttgtttttcctttcattctcatatttttctagaatcctggaaagtctcctgggagggatgcaaaaacgtcacccacctggtccagagagacccttgttttacaactgaggaactgaaacctagagaactgtgatataacgaagctcacagcctcagcagccttcttcaggcattagaaaggggcagggagagacttcctaacatactgcagctgtggtcataaatgcactggcacttccttgtgaatgcattggccatgtttggagaaaattaaattatttcatcaaaatgacctgtagtgagaactttaaagaacaaagaggaaagggccatcctctgatgcagagtttaatcactttcctaacagatatgttggatggggctgtctaagtcccagtcctccttttaaatgctgtgtgtccacattgagtcacttaacctctcttaccgcaaattgactctgcgtaaattgggggtgctgttgagggtttttgcaagatgaaaacgagtccatggtgcctagcatgaattaggtttgcagagtcattttgtctcagcagctgctttggatatgttgactgtacttctggaagcaacaggtcgctcaaggagtcaacagagttgaatatttaaagctacgggatgggaggtggaagtggagatgggtgcatcacgaggtctggagattgagaccatcctggccaacatggtgaaaccccgtctctactaaaatacaaaaaattaggcaggcgtgatggcgggcacctgtaatcccagctactcgggaggctgaggcaggggaatcgcttgaacccgggaggtggagattgcagtgagccgagatcatgccactgcacctcagcctggcgacagactgagactctgtctaaaaaaaaaaaaaaaacaaacctgcattgataggaagaaccctggccatgccaagattccttctttctggggtggagccttagataatggatagttggcttttttttttttttttttttttttttttgctccagcagagggcacacagtgccccatttctggcacacagccagtgatggatgcttgaggtggtgtcccagctgggaaccctctccattgcacctgttgataacaattatgattcatttgcttggccctcttggacatgagctttcttgatacagtgaaataatccccccataacctaattagggaagaagggtttaccatttcagatgaggtcactgagcgccagtgccattgggtggatcaccaaggttattcattcattccgcacacacagtcaggcactgtctagggcactgggcatagagccctgagccacatgggcaagtcccctcttctcatggagcttagttttcctagtggatggagagagatgatgatcgaacaacatcatgctctgctgagtgttgataagtgcaacaaagaaaaataaagcaaagtgagatgatagtgccagggcaatgggcttggtgaggagtggggaaagggaaatgctgtgttaatagggtgatctgggcaggcctctcttactggtgacattaagcagagccaggtggtgaggggaaggaaaagagtttcaggcagggagaagagcaagagatggagagtgcttggtgcttttgtaggatgccaaggaggagtctgggtggctggagagaaagagaagagaggagaagcaacatggtggatgaggtcaggaggagaagcaacatggtggatgaggtcaggaagggtaggcagggacctgtcacacaggcctgcaaagtggatcttggcaccttggcctctggcttctcattccttgctctcctctcctcgggaagcttagtcctttcaatctggacttgcctttagctgctaatcaaagttcagaggaacctgagagagtatttcctcttcttgcctataaggaggtcacctagatctctggttccagcatttgctagatgataagaatcacctggggcatttgtttaatatatagacttccagtccaccccggggcacttaatgaacaagacagcccagaatcctgccctagatctactaaatggggttcctcaggggaggtgcccaggtgtctgtattttgaacaagtgcctctcttctggcccacttgagaagtttgacctggattaagtgcagcctctgggttcctggtctcagcgccccctcctcctctcctgggctccaggacttggatttaataataaccagcatggtaacaacatcgctgatggagtgcctactgtttgtcttgcacaacagcctcactccctattttatctcctctgacttaaatcttagttttcacaccaagtgcctggcaaatatattgtttgtacttctgttaatcatttattatgttgaattgcacttcatttatatagcatacttcctttttagaactttcctgtggactctaataacattgcctacaaaagtgcccagcacaaagtgccagtgccattgggtggatcaccaaggttattcattcattccgctggccaagtcattgttattattatttgtttggatttcacacactccagatagtgaggactcacctttccgtagtcatctccgaatccttagtctttggcaaaatacctgaaatagagtagatgctcaatgaatcttgaagtgccagaaataaaaataatattagttactatttatggagcatttattgtacatcaggcaccaagtccttgacttgtagtaactagtttcttcctcagaactgtcctatgaagtaggtgctaatattcttattttgttttgagacggagtcttgctctgtcgcccaggctgcagtgcagtggtgtgatctctgctcactgcaagctctgcctcccgggttcacgccattctcctacctcagcctcccgagtagctgggactacaggcgcatgccaccatacccgactaattttcgtgctgatattcttattgtgcagatgggggaacagaggcacagagaagtttgaaaataggtaaagctgagattgaacccaggcaggcatgccttgtgtgatctctctaaggtttctttcatttcttaaatgggtatgattctagatctcttttttttctatgtaaggtcgctccctcctggttagttctccacagggatcaggtagagttggtcctctccctatgtgtgaataatgcctcacagatcctaggaaatgtactaggtcggaacttccacccaggctcagtgggctcggttgtgtcttttatcacttttcaagccatgcattttctttgcctcctgggatcctgtgccagttgccttggcttctgtggctgatggatgattggatccagcctttcagggcagattagggtcagcctgctccaagcagtagcgagaaccgggccctcgcctttcctttcctagaagctgtatctgtgagttaacgcttctcaaaatgctgcacttagctcacttgagcgcagtttgggggcagattggttcttggactcttcaaatccccagtgcagacatgaacataagccttctgggtgctcagattgtcagggcacacacacgcactggttctgagccagcactgaaggagacaggtctgacagagacgagcacctcacccacggcttaatttcatgttttggataaacactcagaggtgagtggcatgaaggggcggataagcaaagatcaccragagtgagtatttacaaaattttttcattttgctctcaccagtcttcttcctaatagctcttgctgctctgatggctctctgacaaatagaaaggaggctgttttccctctggtccacacctttgctccaaacagtccctgtattgcattccagatgcttcagtgacaggtagtcatcagaaagagacccttggattgcatattttcttggcttcttcgcttgttctgttccctgggtgaaatccctcggctccttcaggctttgaggcaattccttccctcggtccttagtgtgggataatagaaattaacacttggtggggctttgccgtgtgtgctgctckaaagcacttgcatttatgttcrtgacacatcacccagggaggcactagcatcaccctccttttagagggaaaggcaggtgcaggatgttgagaaacttgccctargtcccaacctgtgagtggcagagccacttgtgtggcctggagcccacgttctcacccaccatatatacagtgcatcttgctgcctgtctttcctccttctcctccctcctttctatgacaatcatttggctgtaggtagttcctcctctgtgctgagcactgtaccagtcagtaggaaacagggacaatgaggtgttttccagggcgtgagcgtggcagagccatccagaagtccaagtgtgtccccggtgcaatgagaacacagtacataaaacctaatagggccctgtagggccagaggtcaggagagggcatcacggcagcaggcatgctctgaggacccatgggaaagcacgttgtcatttaggaagacacagaggagccacatagcctgggcaagaggaagactagcagctcccaggtacgccaggcatccccattccattcccatcacagaggagcatccacctcctgggagtggggatagtaggactggagcggacaggggctttgcagtcagaacactcagggtttgaaacctgtctgttccacttaccagctgggtgaccgtgggcttgtctcttgccttctcatgtgtaagtggaaacaacaataccgtcctcacagatgtatttgaaagtctaaagaatgatgagttttgcaggcaactgacacatattaagttctcagcaaattgcagatacttgttttattcctttcgtttttgaggagatcatgtattgataaacttcagatctgtgattgcaaataaaatagagtattaaaaaaatctgttgcggcacatagttgttgctcagtaaatataaagcaaaggcataatttgcacgcasttggactggattcacagccagcggggcatgatggaaaaagcacaaaatgagaactgagagtggctgagtggattgctcagggtcactcagctggtatgtgaaagagctcactttctcattgaatctccacaacagccttgtgagtcaagctgggctaacgttatctgtctcttagagaaaattaaaacccagggaaggtgaatgtcttgtgcaagtcaaattactggattgtagaataatgaacttcatcactaaatagccatgtgacaagtcgaggactccctttcatcatctgtaaaatgggggtggtgatatctgccctgactacctcaaagagttgtggtggaggtcagatcgaagagcaataataagcctggcttctatatagagaatgatctatggtggacaggaatttaggccagatcaccggctgggtagccaacatacttttacagagaagcagtgaggtgacctgaacttagatggtggtagtggcaatggagatgaggcagaagtggctgcctggggataggttttggaggtagaggttttaggccttggtgatgtttgggttgtgaaggagagagaaagaaagagtcagtgatgactccaggttttgacctgagcaaatggatactggcagagaggtcggtgggaagagctgtgtgggacgagtgatccatggctggttcaggacatattgatagctgatcaaagatctgacagtgaacttccaacacgctcctacctgggtatattaagccattcttgcgttgctacaaggaaatacctaaggctgggtaatttataaagaaaagaggcttatttgactcacggttgtgtaggctatacaggcatggcaccggcatctgcttggcttctggggaggcctcagggtgcttacaatcagggcgaaaggcaaagtgggagcaggtgtgtcacatgaccagaggagaagcaggagagagartacggggaggtgccatacgctttttaaacaaccatatctcacaaggatcgcaccaagagaatggtgctaaaccattcatgagaaatctgcccccatgatccaagaccctcccaccaggctccactgctaacattggagattagatttcaacatgagatttggaggggacaaagatacagactttatcactgggtgttggaactcttgaaccagtgacatccaatagtgaggtgagctagaagccagtgtcaaccatctttactaggaaaattaaaaaaagacattatttggaaagaaagatagggatgcctttttaaaatttccagtggaaaaaagacattgtacttttgtttttattataaagaaaaatctggttgaagtaaagctgaagcatctgcgtggttttattaggcagtgctctcrccatgtggtagggtagaaagtgcaggggttcttgcaccagaagacctgggccctgaatctgatgctgcgacttgctggctacatggccttggaggggtcccctgacctttctgaacctcagaccaagtgggctcctagtccttgctttaggggctggtatgccaagtaagggaactcatactacatgacagttccttgcacacattgtgctcggtgcacgaaggttgatgagtgagtgatcgcctcctttatgagaacaggatagaaaagaacagctacatcatcacatgaagagtagtcactgatgcttgtggagcacttgctatatgctaggtgctgttctctgtgatttacttggattaactcattccatcctcacaaccaccctatgaggctggtcctattatccctgcttacaggcgaggaaactgaagtatacagaggttcaatgactttcccaaagtcactcccctgggaagtagagttggggggactccagggctcaccgtcttgtctccagggaccatgattttgcttaccaggctgtattgtctcagcctgtaaagaggaacccttgttagccccatcttacatatgagcaaactgaggccccaaatggttaaatgaactgcagaaacacagccggttggtgacaactggtacgttctcatttgtgagtggttaaaagtggggtatctgaagctggttctgctgggaccctcagccaaggagcagttctttgcccgaacagaggctccatccatctggagggtgggcatggaacccactcacgttctcttgcacacccctcctggctctgggctttggaaaggttggatttctygcaaggtgattgcaggacagagctctttcttcccgctgccattccaggcgcttggcctgtgctttctcagtgtctctgtttctgtgcagtcgctttcacggggtcctcacctcatcctgcctgtggcatcgtgagaaattatggtcatgggtatttgcaggctgtgttggtgctgccagaagcctgctcttctcgcaactccaagcccagcggtgttgggtgcagttgttggctccgcatttctgcacttggctgcagcacacttgggtgtgtaggagagtctcagctccctccaccagaaatgtttgcaactaatccaggtgactaatatttgatgcttcagttgttggtctttctatagatatttatattgctatcaacctgtgccttgaaggttaaaactggcttttgggcctctttaaaccatctcctgtgctttgcacttagtgggagtgcattcagtagttgaggtggtgttcctatttctgacacttaatttgcatttttaacctacccragggagcttgttattgcatgatgtatcaggtgagctattgtcaagactgtaatctaattaaatgctggggtccagaagcctcagtgcttataatgttgcagcgtttattccacacgtgtggccttcgtgctcagagtgctgcttatcatccacacagcagacatattttgacaaaggcttgccttcttttatgaatcccaaactagtagccttcacatttgcaattttccttctatttaatgaagtggttccagatcattctgtgacaatcgaaggtaaacattgctctgcacaaggcctactcttctgggattcttccatgcctctttcacatttctcaaactctcaggcccaaatgtcagatggtgtgggatttggagagtcgggaatcctgagcatatttgagttgaaaattcacacagagcttgagtgagtgaggatggcggtggcgggggagggcatgaactgtttttgcttttatttaatggcgcacctttgagaatgatcttgtggcttttgagcaggttgcaggacttcaaggtctccatagtggtttggtttgcacctttctttttggatgtggaggtttcccctaggtggccagctgattttttggtgcctccatttatgccctaaccccttctttttctcttagatcattgcataccgagcacatatttattaagtaccaagtgtacgtctgatactggactagagtccgagaaagacactaagattaagacatagtttctgtcctgatgaaaattgttcttttgttagtcttaggtgataatgaccttttctgaagataataggtcctcggaggaaaccaggagatgagatgatggaaacactgattaatgagtaaaaagggaaattatagaaaggtgggaagcaagaatttaaggctgagagcaatcttcttttgcagggaaggactcactattgccatttagcatacttgctataatagaagtatgtatgccggtgttcaggaatccagaaaaaggggcacctaagtatctggggacatccaagaaagctttcrtggaagaagatgcctcctgggctgaatcttgaagcatgactaggaataggccaaggagaggagtcagaagaccacgcttgagtcctgccattgttgggctctccaggaagcgatggtcaaggtctgtgtgctgagatcgtatgccagatgtggtgttagggatcggcatgtttaacccaatcagtcagatgatcccagtaggaaaagcaacacagcaagtctgaaacactgtatcataccacacagtgcctcagctctcaaatttctctattggcttttgagccctgcrgaaaatcagctgtgtctttctacattcagggggtccttctccgcttctgtactcataccttgaggtgctctcatctcatcccccgcctccttccatgccctcatctttggctctcagtgattctgtattaatagcagcgattaaactgcctcatctcatcagggaggagatattaatcttcatcaggcccaaggaagagcttaattttttcctgctcttctcctctccccaggctgccccactgagctcaggcactgtcagctgcaccactgtctgtgggacatttagtgatctgcttctgcagatgcgtttcagtgagttcacttctctgactccctcccttagcctccctgcacccagagcttcacaggctgttattgaagaccactgtcaggagagggagagaaggggaaaaatactccctcaaatagaaattcccaacttcattgtcttgcgyggctgcagggtaaattagaccaggacagtaccgcagctgraagctgtaggttttttggtttatgaaatcctattcagcccttggagaagtatgccttttttcatgctatgattctgcagttagctgtgaactgaggatgtcagatgcccaggggcaggaacaggagacagggaggctcgagagttcatcaagaaattaggatggaaaagagctattcccaaagccaggcatcccaggctggtcctgccggtgtgcaccaacagccagtgataactcagcgcccatcaagtttctacacgtgcccagtgagcccagggctggcacggtaaaggacacatggtatctcttttaatcttgacaaacttgcgaggcatgtactgttattccatttttccaataaggaaactaaggcctgagagagtaagtacstacgctgaggttacacggcttgcaaattttgtcttygctttcttcactcttcctgtcatactctgcccactgtatctaggatgactgtataatgtcttgtccaaactggaacactgttaagaatgcgggggggatagggacatacatggggacatacagtttccagtccatggaaactgggaagcatggtctctctttttttttttttttttgagacggagtctcgctctgtcacccaggctggagcgcagtggcgtgatcttggcttactgcaagctccgcctcctaggttcacaccactctctggcckcagcctcccaagtagctgggactacaggctcctgccactgcacctggctaattttttatttttagtagagacggggtttcaccgtggtctccatctcctgacctcgtgatccacctgcctcggcctccgaaagtgctgggattacaggcgtgagccaccgcgcccggccctggcatggtctcttacgactgcccaaccaggaggctgagggatgcttcgtgctcctttggaagcagagctagccagatggacactattcccccttcctcatttccctgccctcctctcctcccatctgagccatctgaggcccctgagtgccctgctggctttccaaatgcctgatgctagagagcctgattagtttgctttcacaatgaagaatctcaaataaccactgccccttcgcccagcaagcagccttcatayccagaccacctcctaggatctatttaactccctctactctgtgggattggcctttgttcagcctttgagcacacctgggttggggaaatggttatttttcccagaatgggctttatttgcattccacgagcaatcttcttactcggagggattcctgggacattaaattagcagaaaatgacattagcgctaagaaccaaattcgattacctgaaatacatgtattattgtaagaaataaaacaacgtcatctccacctccacasccccagatcataccctcacactgaattgtattaatgccagtttccttttagttgctggctttgtgtgtgtgtgtggcaggttgtctcaaaggcacagagtgtataataatagtacatgtcagcacaaggcaagcttgtgcagrgtttttccccatgtaatttgccggctcttgtggctgtggtgtgtgaatgtgagttctggcagaggcttgtacactctgcctttacccagccccatctccctagaatccagccacatcactactcactttttcttcaacttgacagttatttttaatgccttcattgttgtcccactctttgctttttctccaggaaagattctacggtgaaagctccacccacttcccccgtacttgaatccttgggagacttttcactctttgctcctggaggcctctgcttattcctctgttagcgctgatctttaggtagagtgctttgcacacggttggtgtgtgatatgtcctggaaaatggaacagtgatatcactacctcataacgctgttatggacttaagtaatgcacctaaagcacaaaaatagagccaggtgtgtagtaattaatattagcagttaacgcttgttatgactaaatgttgggaaagtgttaaaatgccaggacttagcgtgtgttacttccacaaaactgacagctctgggagggcaggggtgtgtcgtcttattcaattttgcatccccaaagccaaagccagagtacctggtaaatgctcagtgagttcagctgagtgaatgagacaaaagcccatgtggggaagggaggctttgaagaagacattctattccctgtatacctggggtaggtttcgagggtggaatgtagggcctgagattcatcagaaacagttatgggacaaataagaagcaaatgacgcagggtcatttcaggctgctgcacatctgaatctgactgtttacgtgggggtgccacagtcttctgtgaagagaggggaggatcccttctgacctacacagcatccaggtcttcgtgcatgtcagggaggtttgacctgtacatcttttgtgggaagccagagtcatytgttgacattgaggcagagaacttgctctgagtccatcgatgcctgaaactccttttgtgaccatggcaagttatttatctcctttctagaatctaaaatatggtggcttgggatcgggggagttaaaacacattttttatggattgctatcctctaaaaagagtaaaaatgaaaataaagtaaatcaaccaaaagatcagagctaaagctgtgagattcttagaaggaaacataagagtaaatctttgtgactttagattaggcaacggtttctgagatatgacactagaagcacaaccaacaaaagaaaaaaatagataaattgagcttcatcaaattaaaatcttttgtgtttcagagggttccttcaagaaaattaaaagacacaaaataggagaaaatatttgcagtcatttatctgataagggacttatgtacagaatagatgaataactcttataacttaacaatgaaaagacaaataagccaattaaaaaattgagtgatggatttgaatagatatttctccaaagaagatacacaggttgtcaaaaagcacatgaaaaaatgctcagcatcattagttattggggaaatgcaaatcaaaaccacaatggtataccacttcacactcactagggtggcggttatcaaaaagaaataacaagtgttagagaggatatggagaaatcggaacccttatacattgccggtgggaatataaaatggaacagccactttggaaaacagttgggtgattccaaaaaaagtgaaatgtggagttgacatgtggcccagcaattccgctccaggtatctatgcccaaaggaactgaaaacaggttctcaaacaaaaacatgtacaaaatttttcaagacagcattattcatgataaccaagaagtgaaaactacctgaatgtctatcagttaataaatggataaacaaaatgtggtctagccatacaatggaatgttattcagctattacaaggaatgaagtactgatacatgctataacatgggtgaaatttgaaaacacgctacgtggaagaagccagataccaaaggccacatatgtacatgtgattccatttatatgaaatgtcagaattggccagtccatagagatagaaagtagattggtggttttgaaggtttgaggaaggcgggaatatggggagggttggggtttgttttctgggtgattaaaatgctayggaattagatagcrgtgatggctgcacaactctgaataccctaaaaaccactgamatgtacacattaaaagggtgacttatttggtatatgaattatatctcaataaacgtattatttaaagaagataaatggagctgctgaaggcaaaacaggaccaggagacttggatcccttcattcaccagttctttcaaccctccctttcctccactgctggggtattttctgagatacctttgttggggaggaaaaaaaaatcaatttttccctctaagttcttagctaggacggacctctgtaacaaaagatagattaacaggagaaaatcaaacagaagtttattaaggtgtgcatttcatgtatgcaggggggacacccagggagtgcatggttctcaaaggggtggtttagaaatccagcttatattgcatcttcaacaaagaacagtaagtttttaggtaagtaacaaaacaaaggaaaaaggcttcgagtccctaggtgcagcaactgtgggaaggcaaatatcaaatacatgggaatttgttaagcagattcctccagtgccttctcctggctgagaagrgccaaagcttctttcatgatcagcctttgtccttcctggaagaaggagtgaagggacactgctacctttgtaaactgatgtcctgcttttaggcagggcagagagcttttgttctgtttcttctcagttgtctcttattcaaaataatgcttttgctaaagtgacatattttgggctggcagattctgatctcctacaccttccaagttccaggaacatgttttggaggacttctatggwtccttccaacttcgatattatgtgtttccaggaaacaggtgtgaggcattccatggtagccagaggtagcatggaagatgtttccttttgcctatgtctctgaaccccttactctgaaggggcgtgaccaccgactctcccagtttaaacagaggtgggagaaggtctttgtgatgactttccacttagtttatagaccagtcctataccagagctgaggccaggattattaggaaagagaagcatgaaccccaaactcctctccctcattgaaacatgaaagctaaacagggcttccatgcaatttcccaggacaaagagaaacaagcaagagagaaagcaaaaagccctcccgcagatgaacaaagagtgtttcaaagcacaatactactgttgttttagttcctctcgtaaaactcttcagtggtctctcactactaataggatgaagtccagcatcaaggcctctcatcaccagtgtcatccctcacctctgcaccagctcccccatcccatggtctcccattctctgttcctttgaccacatcagtaccctcttctgccgtccttgtaggcaagctcatgttcgtctttcaagatccaacacatcactatgatatggctagaattgtgtctcccacaaaagatgttgaagtcctaaccccctggtgcctgtgaacgtgaccttatgtggaaagagggtctttgcagataatcaaactaggatgaggtcattaaggcggctgtaattcaatttgactgtgtccttgtgcagaggggaaatttggacacagaatgacatgtacagaggatcagatgatgtgagacacacggaggatgtcatttagaagctgaggactcctgaggttactagaagcttggagaaagccctaagcgtatccctccctgacacccttcagaaccaatcctgttgacagtttgatctcagtctcctagcctctaaaactgtgaggcagtacatttctattgtgtaagccacccaggttgtgattctttgtttgttatggtagccttggaaaacaaatgcccaccatctccatgaatgctatggtctttctgcttctccccagcaagccattcaacaagccgtgtcccccagcactttgtcgtttgattattatactaaatttacattatattcactgctgtttgtctatctccctaaatatactgtgatggcaaggtttatctctttgcattcccaacaactagtgatttacctgtcacttaggaaagatgtggctggatggatggatagatggatagatggatggatgggtaaaaaattagtctcttgatttcttcattccaaaagagaaaagccaacctgtatcaaagctcaaagtttcaaatgcaaattaacatgtgaaagatatatgtgtcatctctatttgagtctctttggcaggcagtcttaagtatgcatttcccagtgtaaataactctggatgtgttaaaaagttcaccagtgtttaagttcattaaattaatgttgtcattttgagctgccgagtgtgttgcaggttgtaagctgttcatcacatttctttaattttgcagtagtgtcatcttcaggaatgtggggtgtattaaaaatagaagagttattttatatcaaagagcccaggaccaggaattaaattactagagtctgccacttaatgctgtgtggcttttattgattccttcattcaggaatgcagctaaaatctgagagccggccttctgccatggactctgtcgggcatgagaggtgcggaggtaaaagcaccagcttccaccctcgagtggcttaatactctggggttgttgcgagatgaatgaagccaaattcatgagcagaatggtaaatgatatgggggacattatcataggcggccatggaggcatggatagagggcacccggctscaagttggtcatcaggaagggcttgatacaggagatgacatgaacacaggaggtgctttgcctgcccacaggtgagggggtgggtggtgtttcagactcatagaaaggcgaatgcaaagaccctgaggcccattctgggacttgaaggcaaatccctaggaaaagggccgaggtgaacggctgccacaggagagtgtgcgagtagactctggtggtgagtgcttcaaaggtgactgcaatcttctggatgcagagattccagggggcttctaatatatgcagccctatacattcaatcttttccccatttgcgaagaatttgcttacttagactttcattactcacctattcttccatttctggaacacagactctggtgtctggtactatgctcagcactgtgcatgtgtcagtgactcaaccaagcgtcctggagtttctgtttggagaggaggcctcatattctctgtcaacttcccaaatcttgttcactgcattcctggatcataggctggttccttctccccgcttctcctgcgaactcctgccccagggcctttgcactggattctggttctgttctactgccctttcagatctactcattcttcttcagggcatccacaggcttcctggcccctcagctyccttttgtgaggtcttctgcagaagatcagccagaaggaaaggagggaggccagggattccccagccccgcccgctccccgaggctgcttctctgtgggcagaaggaacgaagcaatgaagaccacagctcctgcacacgacctttctgtgctgttcttgtgtctcatttctgatgtcctttctgggaccacttcaggcctagaggtgacatggtgcctactatcactaacctggggctaccgaagctcttgttgtttccgtaagccctgcttttcttttttgtttcatgaatttactgcataatagataaggtgatttcagaagacatagtatagctgaataaaagcaaggcatttgaatgcttaatcattattttcctgtagcgaaatatggtctgaatacaaggacttttaagtagattaattactgattcagtgactatatctaaagctgccttgtttgtttttaaaacgactttatagaggatgaaagacatacaaaaagctgtacatatttaatgtgtacaacttgatgagtttgcagataaatgtacactggtgaacccattaccacagtctataatccatcacctctgtttcctgctgccctctttatttattattagtgatagggcttaacataaatctaccctcccagcaaacttcgaagtctacgatacagtattgttaactataggctctgtgttttgcagtagctctgtaggacttactcatcttgtgtaactgtaatattgtaccctttgaataatacctccacatttcttcctccccccagccccaggaagcaccattctactctgttattacacgctcttcaaattacccagtttgagtatggcatctttttcctgctacagctctgacgaatacaactagccattccctttcctgaatttaacagctctgacgaatacaactagctattccctttcctgaatttaacctcctcagatatccaagttttgccccaatatcactatctcaataagttctctcgggtcattctacttagaaatgyaggccgggctgggtgcggtggctcatgcctgtaatccgagcactttgggaggctgaggtgggcggatcacaagttcaggagatcgagaccatcgtggctaacatggtgaaaccccgtctctactgaaaatacaaaaaattagccaggcatggtggtaggcgcctggtagtcccagctactgggaaggctgaggcaggagaatggcgtgaacccgggaggcggagcttgcagtgagccaagatcacaccactgcactccagcctgggcaacagaacaagactccgtctcaaaaaaaaaaaaaaaaaaaaattgcaggctgggcgcagtggytcacgcctgtaatcccagcactttaggaggtggaggtgggtggatcacctgaggtcaggagttccagaccagcctgaccaacatggtgaaatcctgtctctactaaatacagaaaaaaattagccgggtgtggtggcgcatgcctgtaatcccagctacttgggaggctgaggcaaaagaatcgcttgaaccagggaggcgcggaggttgcagtgagccgagatagcaccattgcactccatcctgggcaacaagagtaaaactccgtctcaaaaaaaaagtaattataataaaaataaaataaaatagaaatgcaaccccctctccacttctcatcattcatccctacttaatttttctccttaccactttttaatatgttgtataatacagtcatattacagttgacccttaaacaacatgggaactagggacactaaccccctgcacagtcaaaaattcgtgtaagctttcaaaaacaattttatggatacatagtaggtgtatagatttacagcgtgcatgagttgttttggtacaggcatgcaatgtgaaataagcacatcgtggagatgcatataacttttgacttcctgaacatttgactcttgataacctactgttgaccagaagctttaacagtaacagttgattcasatgtagtttgtatgtatgttatatattatatactgtactcttacagtgaagtaaactagagaggagaaattgttattaagaacatcaaaaggaaaatatatttactatgtattaagtagaagcagatcatcatagaggttttcatcttcatcttcatgttgagtaggctgaggaggaggagagattggtcttgctgtctcaggggtggcagaggcaagagaaaatctgtgtatttgtggactcatgcactttaaacccgtgttgttcaagggttaactgtattttggtctctgtctccctcaacacacacacgcacgcatgcacgcacacacacacgcatgcacacacgcacacacacacttcatgagggcagggacttctgtcatttccataccccaacaatgagactcatgcctggcatcttataggtcctccataaatacttgatgaggggagaacgggtaagcatgagagcctctacatgtgtgtacgctaactcatttgcttctcttgacagccttcctcaggaagcagagataaagatctttgcaactgtaggaaccaaggcttagggaaggggctagggccaygtccatcctgtgttcctgttgttgatcttcattgtccttgatagcgcctgttgtttgggaatgggctttgcaggcccttaaataagggcacccagctctttgagggattggtggcattttcagtggaagtaaatgaaaagcctcctaatgtggctactttgaagcagaccagagtcattggatggaggaagtctggtgtgttataccctaactgatcatattattagcatatttatctctcatgatattgagcacagcaagtaaatttgattcctcatcttctggaatgcattagtgatagtttatatcccttgaaaggctgaagcttaacccatttcccatgacattgttcaatgtcccttctgtcaaaggagagagacctaattcaactcatgtctttttctcttccttctgaggctgctgccttaaaattggatggttgattgcagtcagtatctttggctgtgacttcatgtaattatttccttcccaattcctttccccattgcatattgccttttgcttaatctgcactttggtgttctatatacatgtgttttaattgtaagttaactcattttgggggagggcaggaattaaggtttatattataaatgaaacaagaattcttatcactatatcatcgtcagttcatcatctctatgcattattttatgatgacactacataaattggtttcttttctgaaataaaagctcattccaagaatgcctttttttgyggggaggggggtgacagttaatacctttgagcttctggatctttttacaaacattatcagacaagtaaagaaagctggatattatttctttggcaaagtagagaaagctgaggccaaccgcaggccaaggactcactcacctaatactatatttactcccttcctctatccgtaaccgtgtgtttgtagacttgataattattgagtgtctacctcatgggtgtagacctatgggtcctgccctctagtagctagtgaggaagtgggacacagcaggccagtctagtatagcatcctacctgcctaacaggcattgcctactgggagtgtgtctgtcctggagtgtcagggacaacttcccacaggtggtacctggaagaaatcccctggaaatgtgtctctgttgttggttttttttttttttttttttttttttttggtggtaggggtggagacggagtctcgctttgttgcccaggctgtagtgcagtggcgtgatcttggctcactgcagcctctgcctcccaggttcaagcgattctcctgcctcagcctcctgagtagctgggattacaggcatgcacccccgtgcctggctaatttttgtatttttagtagagacgggatttcaccatgttggccaggctggtcttgaactcctgacctcaagtgatctgcctgccttggcctctcaaagtgttgggattacaggagtgagccactgagcctggccgttctggaaattttttaatttgtgggataaagagtctgtaggctggaggaatagcctgcatatgtgtataggtgtagatgatgaatacgggatactacaagtggagttggggctactgaagtagacaggagccagatcatatgaattgagtagcacagttgatgtgaagtcatttcaagggctttgagcaagacattgctggatcagacttgggttttctctctgtttatatggacacttggcctttgatatcagggcttgtgagtgcagatccatctacctgacccctgaataccccttacctgtccccagtcctttgatctcacctctcctccctgctgatgtctttaatgctggccctgctctgctcaaatctcacctgccctaagaagcttcccctgacctttccaagcctsaggaagtccctgccttccctgactgtcgttgccttggytttctgtgttagccatttagagagaggaactagtttcaggtcccagccttatcagccagtatatttgtgatatcacgtgtatcatgtgattcttctgggtcttactttctgcatctataagatggacatgataataatactttccagaccaagaagataaacagacatacatttgtattcttcctcaagcaaatgtgaatttgtgctagatcaccttcctcttaaacgacattcctggtggggattgaagccacagggctctagtaagctacatctctctccacgttctgttttccatcttcactgacattgctgtagggtggtgagagaaacagggcattagatacactcttttactttatttggtttagcaaaatattagcacctttatgggtcttggttcctcattgcgatatatacaagagtaatacctactacctcctttaatgagagaattgaatcagatggtgaatggatcaccctctgttcagtgcccagccccaaacagatgctaattaaatggcttaatcaaaccagctcaggctgttactggatgtcatcccttggcacagtctgacatttcttgattcttgttaacagccctataacaatattgtcataagaaatagaaaacatcattttctttagggaccaatttggagcccatccataactgtcttccagctcctcctggcttccccctgtcaccttgaccttcagggagccttgtttctgctgccggcattgacccatccgtgctagccatgacagactgattctccctacccggcttttccaaatctactcacwtctcatctcaaaacctctttctctcatccatattgccttgctttctcattcctttgccatttagtaggtaatgatttctattaagatgatcatcagsatttattgagcagagaggtagatattgacactgactgggaggcatgatccgagtggggagggaattctgtccctgcaccccaattcccccagtcttgcctgctgcttataaagttagctggagtcccagtgtagtgccccatctgtgcagtagggaaattgcccaccttggggctggccaagtaatggaagcttcacaaatacaccatattaaaaaggactttgcacatctggcattagaatatttccagccctggctcagtgcttggcacaggtggctgttcacagatatttttagaagcaaggaaaggaggaggggaggagtatatcataagacatttggcatctcctgcctttgctgagtaaaggggaaggaatttaggatttgtacggtgaatattgccacgtgtttacgagtatttatataatgctaatatttcagttgcagggaaaaacttgtcctgaagatgttaaagctggaagtcagtgatcttctacacctcctggaattttatagctgtgtgctctcaggtttagagtcaggaggggaaggcccagggccatgtgtcatttcttggcagagcttggcttaggactacttttcatccattccctgttcttttccatatttcccagttttcccatttttgtctcaatctgtctgcctgtctgttgcactctacccatctacttatttacctgtcggcttccactgtgctctagaatgttgcccactgtgatcttttgggcaagttaatgtctcagggcccagtttcctcaactggaaaaaaaaaaaaaaaagagtagctgtgaaaataaatagtgatttataagcgctagattttgggggctggagaatccttcyttatggggggcagggaggctgtcttgtgaactgtatgacattttgcagctttccgaacctactatgtaccagcagcatctctcccctgatttgtgactccaaaagtgtctccagacattgccaaatgtctccgcggcaggggggcaaattgccyytggmtgaaaagtactggcacagagtaagcaattattaaatattgttttaaaaaaaacactgtcattatgactattctgcagttatttaatttatctgaaaagtgttcatttggtgcttactgtatatactgcagagctctgagccgtgagaggcaagtggaaaatgtaagcctgatgttcttgctttctaggagattacgatgcggttcacagtcacacacctgtggatgggcttccgagggggctttgaacgttttgtttcaacctaaatttagcaaaaggacaattgtgaggcttgagaggcatgtctgcatgctcccagaccttctctttgggtycgtggtcctcccctaccctgccccttttgattaccagtgaatgcagcagtggtgacaggtaaatgaccttgttggttggtcctctagttcctgatgaaccctcaactgggagggactgtctgtgaatcagagcagctggctctttgaaaagaaaggcactattgcacagttgctgctgctgacccttgcattcagaataccggccgaggccaatgggcaggtcaccaccctgtcgcctctgtgctcctgcctcccagaccacatcctgggattcttccctcgccccatgcagtagcagaagggtgtcacaaagcgactctgctcagacccaccatcagacctgaccgctggcctttccagagcttccagagccactcagccctgccctcctggctctgcctcccgcggcccccacccttgtgtcttctcttactcacctcacacacacctgctctcctcactgtgcgcactgccctggccccgcttctgggaatgctctttccatggatcccttgtagcccctttacttcctgcaggtctttgtttacacttcaccttgtgagagagggccctttatgaagtcagaatcagaaccctcctcctcccaccccacctttccttcctttatttccttcacaactctgatcactgcctgatgcctccactgtatttgctggctgttgagactgtctcttttctatgttctcccgctggactgtaaactccctgagggcaggtgattggttggtcatgttcagtacacttagaagtgcccagcttgtcccagacactcagtaataattgccgaatgaatgaatggatgaataaatgaatgagccaagggagaagaagttaccatgactgttacaaagttgataaatgcatgcagagcctttgttcaccattttctgggaggratgggtctcccgtaccatagcctgtgggcatggctgggtggagtttggtctacattatatcaactcttcccttctctatctggagataattctctcctgggtaatgagcctactggagcatacagatgagggcacgaaggtgacccttatagaactgtggctgagagccagggattcccacttccacctccacccccatagcatcatcagtcyagtcaagaaagacccgtggtctttgtattatgggacttagtccttcattgtccctgtggctctgcttttcacccctgtctcatgctctcctccttcacccttcccatctgatgtgtgctgaattgttaggagaacagcaaaaatgcattcctttgctgacacttctctacctgtggttgtcttccactctgcgtcatgtgccgtatccgcctgtcaccccggcacactgtcasccacgcagcctctcgttccctgtgtttccttgcacactcgtgctctgctggcctctgtcactctcactgggcgtcctgcctgccttcccaccccctgcacgtgtccctgttggcacttccctattcacactctcctctccaccaagcttcctttgacgcttcctctttcaagctgtgcagccttcttcagctgacagttcagcatcgttccatttctgaagcagggaattggtttggtgggcactagctccaagtttgcctttrtggtatttctagcctccttcattctctttccygttttggctgcaaccaaaggctgggctcagtgatgaatcgcaattgggtttggtggcccagccgggcccttctcaggttaagggtggtatagggagttgtgtgaatgaatgaggtcccgcagagagaccatcacacatgggtagagggggaaaaarggggggctcagaatgcctgtgtggatggcagtctcctgaaatacaggagtttttctctctaaggtacaccacaaattttatcttccaacatttcttagtcattttccaaattccatgtcccttttcccttgatttgttgattaacttcatatgagccttacccaaatccgcctgatatcagtgtgtgtgtctgtgtgtaaggtttttggaatcagcaagcacctttttcattcttgtttccactcatcaccttacagtacctcactggacacaatggatttccaaagcatctgtagacatgagctgattctagaatttctttgtacatcacccacatcctggagctgtttcttgggagaaagaaagatggcatgcctccctttgcccctggaccctgaaggctgtgctctttacaccgtgaacctaaatctgggcttggtctgcagccaacctggaaattcactactgcaactccgttttctttttaacgagagcttcatacggttcttttaaactagaaacttctctttcttgtaattgtctctaatggcttccttgttcgaacaagcctttgctagcttctgtctgacccctttggctttgctttctgcctccttttatcctccagcctttcgtatagattccagaggaatcttcctcaaaggctgtgccactccctgttcaaaggctttctgtggctcctcattgcctagaaagcaagtgagtaaggccagatattgttagtggctcacttaccgcattccaggatcttgctctaatttccctttacaacgtcatcaaaacagctcacccccaagctccgacctcaactcccacttgcgaccccaatcagcagcctacccatgctgcggcctcgatggttccctgaatgcacgtgttccttttctgtctctgtgttgttaactcatgcagggtccacccccttcttcctagacctacctcaccttttttgtagagtccctcttcactgtttcttccattctgtcttatcaggattatttttctgtctttggtcttgccattatacttccctccattgggtgacttactataacgtgccttctgctgtgactctgttggatgtttttgagtgttcattcaattctaagggcaggaatgatgtatttcccccataatgtgcagctcggttccatgcacatcataggtgctcaacacgttttcattcacttgaaggacttttaccgttgtatttgtcacaatatttgttactgttatttttgtcatcaccacatcattgaccttagtatcttcctaatgacttataattgacaaagtaattccctcccttctttccttcctttccttcctttcctttcttctctctccctctccctcctctcctctccctctccctcctctccctctccctcctctccctctccctcctctccctctccctcctctccctctccctcctctccctctccctcttcctcccttcctttctccctcccaggctagagggcagtggcgtgatctcggctcattgcaacctccgcctcccaggttcaagcgattctcctgcctcagmgtcccgagtagctgagattacagatgcccaccaccacgcccggctaattttttgtrtttttagtagagacggggtttcaccatgttggccaggctggtcttgaactcctgacctcaggtgatccaaccgccttgacctcccaaactgctgggattacaggcgtgagccactgcgctcagccaacaaagtaattttttacccaaggatctccattgtggctgtgactgctgcctataaaacaatataccaaagacaaaaataaagacaaaaacaaaaataaagagtacaaaacagtatgggggttgtacataaggcttttgtgttcctgcttgtaccaaggaaaaagataccactcagaycaatcaggatgcacagtccagagcttctgtgagaagttctttgtccttctatgccacttagagtttttctacgatacctttaacctgcaccatttaataagcttttaaggagccgcacatgcatttactgtgtggctgctctgattctttggcaaatttataagctgcccttcagttgggggcatggatttgccttagaagatcgtctttaaagacacttgctgagaatgttcacaagtgtgttgcccttttatgctcataggtgtgtgtactttcttgttctttgccttwccctatttcacccagacatttaaggtaagtgggtgaatttcgatattgtatgaattgataatagtcctctgtggttatcaagcatggcacccataagaaacttgcacattcaaattctcacctaatcgtcataatacacctgtggaaacaggaatttttgcccatattctatgaatgagactattgccattcagaaggaatgtgtgttttgctctgatttaatgtcttgttcagggtcctacctctggaaagccaggatttcagggtagaactagcaagtcttaagttcagtcctcttctcctccacaatacctggttccaaagtcacttctacataggtarcctcastaaatattgtagcagctgcaaatgataaagcccagttttgttgtttagttgacaccacactgttgaattccacttcctttgcctccatttctttgttttccatcaagaggatttggtttactttcatgctctgaatatctggtttcctttcactcctccaggaatcccgtaagcactaaggaccccaaaaattacccacccaaagcaggctctctttccctgcttgaggagggcattcctgggaattgggctgctctttttccagcagccccctrgcctcagaagccttatcttttcttaggaatcatctctgccgtgacaccagatcagcagaccagccactacactcccttgcttaaaccaccagtggcttaagtcagtctacacttcttcaggcctacaaggatctgtgagatgtaggccctgtccactttgtagccagttccttctctgatatttgcttttccaatcttatgtaaccacaggccacattctctggactctgggacttggacctcaagtgtgtgctggtgcagtcactctcagtaaagaaaacaaattattaaaaagtaattgtagtacttttgtagtatagtcatgcgtatgactgggatacattctgagaaatgcgttgttaggcaattttgttgttatataaatatcatagagtgtacacctagcctatatagtatagcccaggggtcctcagcccctggtaccagtccgtggcctattaggaacatggccacacagcaggaggttagggactgccggccagtgagagaagcttcatctgtatttacagccactccccatcactcccgttaccccgtgagctccgcctcctgtcagatcggcagtggcattacattattgcaaaccctattgtgaactgagcacaagagggctccttatgagaatctaatgcctgatgatctgtcactgtctcccatcacccccagatgggactgtctaattgcaggaagacaaactcagggctcccactgattttacattatggtgagttgtataattactgcattatatattacaatgtaataataatagaaataaagtacacaataaatataatgtatctaaaacatccccaaaccatccccttcccccaacctttgtctgcggagaaatggtcttccacaaaaccggtacctggtaccaaaaaggctggggactgctggtatagcctattgcctctaggcagcaaacctgtatagcatgtgactgtactgactaccggaggcaattgtaacacaatggtaagcatttgtgtacctaaacatggaaaaggtacagtaaaaatatggtatagatgagccaggtgcggtggctcacrtctgtaatcccagtactttgggaggccaaggcgggcagattatgaggtcaggaaatcaggaccatcctggctaatatggtgaaaccccatctctactaaaaatataaaaaattagccaggcgttgtggtgggcacctgtagtcccagctactcaggaggctgaggcaggagaattgcttgaatctgggaggcggaggttgcaatgagccgagactgtgccactacactccagcstgggtgacagagtgagactctgtctcaaaaaaataaataaataaataaataaataaataaataaataaatatggtatagatggcatacctgtatagggcacttaccrtgaatggagcctgtagaactggaagtttctttctctgggtgagtcagtgagtgagtggtgtgtgaatgtgaagggctagggcattactgtgtactaccgtagactttctaaacactgcgcacttatgctacactaaatttgtaaaactgttttgccatctttagtcatgctacattagtttgctgtaacttttttactttataaactttgaaatatttttaagctttttgactcttgtcgtaacactcagcttctaacaaacgcattgtatagctgtacaaaaatgttttatatccttacactgtaagctttttgctgtttttaaatcttttaatttttactttttaaacttttttgttgaaaacaaagatacagccgggtgtggtggctcatggctgtaatcccagcactttgggaggctgaggcgggtggatcacctgagctcaggagtttgagatgagcctggccaacatggtgaaactccgtctctactaaaagtacaaaaaatagctgtgtggtggtgggcacctgtaatcctagccacttgggaggctgaggcaggagaatcgcttgaacctgggaggtggaggttgccgtgagccaagatcatgccactgcactccagcctggtgacccagcctgggcgacagagcgagactccatctcagaaaaaaagaaaacaaaacaaagatacaagtacacactttactttagctgagacccacacaggttcaggattatcagtatcactgtcttccacctccacttatttcactgagaggtcttcaggggcatgaacrtgcattgattggagttaggatagkgaaggcacctcaccrtaaaataactgtggatcaggatggaaagaacttagcccactggccatgtggcgagccaaaaagctcatgttgttttcacccaataagaacctatgtctattaaaaatcatggcttcagcttctgtgactacctctgagagtccattcagcacattcattaattatcctcagtatgaacagatttcctctaaaaagcctcctgtcctattttcttagcctcagtctgtgccttccagtttgtccaatctagttcctctcataaattggtcactatcttggatttttcccagcacctggtctggctctccacagtgctgtctttggtgagcagctgaggtcctgatgggtcacacttagccgggggttctcagagcaggaggatgggcctcttctttggtcagcctgttggtattgatccccaggtgtttgttctctggacatagtctgtgtgctaataagggaacctcaggtgacagtaaataacggcatatttggtgtgcttgaagagaaagcctagatagtgttcagaattttctgcaaccacatggaaaggttgtctctactgcaatattgtgattgagcctatcttcaaatggcgtatctcacaaagtatggcaggaacctggagattagaaagggaacttttagagccgagatgggaggaatgaaaacagagtgatgccaaataaagggattgctcaggggtgacatgagtggtgactggtctgggcaggcctggcacagaggcctggagtaggagtggacactctggctcatggggacaaagcgactttggcagaatgcatttgaaatgagatttcaggatggttagttaagtggttttctgtatgattttattagttttcatccttcattccttgtttcttttttcatttgtcacatcacagaaatagtgctagttggtttcttgagtacattcgttagtgcttgggattgttcacaaaagaagcatctgttgggtcaagagccttctcagataacttgtggcttcaagccctygattccactgtggggatttgagtgttctcaagtggatttattgatctttacgggctcctctgtggctttctggatttctccaagattataatctgaccccaaggaaatactgagtagatgaggagaagaactgggtcaacagagagtccaggaatgtatcaatactggaaaagaaaagaaaaagctctcattctgtggtagcagctgagagcagattcacaaaatactcctccaaaagaggcccctgatggaaaatgttggtgattggctcagaatcagtcagaagcactcactggtatgcctcccaatagttctagagcctggtttcgttggatattgcaagaaaatgaatcaataaatacatggtgcactgtgggggtagatgggtggatgaatgggtaggaaggtaagtgagtgggtggatgaatgagtgaataaatgaaggagatggagggaggaaagaagagacccaccaacatgtaccatgcagaaataggtgttgatgtatttggagagggagagtacaacatatacagtgaagaggggtatcctttgggtatcagttgggaatcatttgtcatttccaataacaacaaaaaacaattaagttgtttaatggtttaaacaagtaagaactcattcatttgatatgtaacgagatcttggttgttgacactggttttgtggttccataatgtctgtgctctgaatgggcatctctgcaggtcttttcgccttctcatatttgcaggatggctgcagggtcttcaactatgagccaacagtaaaatttatccacttcctaggaaccggttgttaaacatttactaacacactctggctccatgtcttgtatttacagcaagtgacacataatagaggctcagtaaatattttgggggtggccaggtgtggtggctcatgcctgtaatcccagcgcttggggaggccgaggcaggtggattgctcttgaatgcaggagttcgagaccagcctgggcaacatggtgaaaacctgtctctacaaaaaataatgtaagttagctgggtgtggtggtacttgcctgtggtcccagctactcaggaggtagaaggattgcttgagcctgggaggtcaaggctgcagtgagctgtgatcacaccactgtttttgagcttgggtgacagactgagattctgtttcaaaacaacagcaacaacaacaaagaaaacaaaagcaaacaaaaaaatttctgaacaaatgcacagatgaagtagagttgccatatgaaaatgtaattccctctgttaaattggaatttcacataaacaatggccaatttttttagtataaatatatcctaaatattgcagggcatatgtttatgcaaaaaatttattatcataaattcaaatctaacggccatcctgtattttaatttcctaaattcatcaacctgaggatataggagtcattttatgggaacagatttgaaggcttatcactgtttcccaaagtaagaggtacctgtgacctgtgttgatcatacttaagtatatggggtgagatggaaattggagtgtacattgtgcaaggaactgggacaatgtattgggagggaaacatgaattyggaattagtagttagtaatggggaattaactcaaaattaaataaacttgtggatggtttgtaactctttagagaaatttcttagtgctggtttcagaacagtgaaaggaaagccgttgtcagctgggatctgccgcgtttccatggaggccctttgctcaatgatgtctgtgatcctgtgagcgtgacaactttagcctagcctgtgcgatgccactgcagttgcaactgggggctcatctgctttccagtccttgccatgtgttgtttggggagctaggggaagagaatttctgaactgggaacttgtttgaaatacaaatgcttggactctattkcagaggcagatgctctgggggttagggcctggcgatcctacatttaacccagccctccagaggaccctgatgctggataaagtttaggagccactgctgtagacagtactaggggatggggctatggaagaatgtttgttttgcagtttaaaaggatagctgcatatgcagtggggggatgagagtgcagccagctaggaagaccactttgagaaagtcacccaggcgttacccagtatccagttaccagcctgcccttaggaacattaattcaaagaagcaggacgacatggatctgttgtacctctaagaagtatgggaggactcagtgagcttggaaaaagaccaccctattggtggtcaaaagagattcatgagtgatgttaagacatgagaaacgcctgtggtgataggcaggtaactctgggttgtaggcctgacctagccagtaacttaactgggtgatctcatacaactacttaattttctctggacatccatttttgattgtgtaaagtgaagattttgaaggaacgaccctaattctgattctttctagcccaagcttctcatgcaaaggtaggagcccaaagatggtggaagtgaagcctccatcaattgagcatggagttcagatagtcctgcttcttaaatagtctcttctccttcctgatttctttccacctcttgccaacaagtccttctggcagcatgcctccaaaggatatgagaggggactgcctttgaatttcagaggacaatctgaagcgggtgaggaatgtgtcctatgttcattacacacgaggtaatcacctgccatctttccataacctgagatggcgtagattggaatttagggtacatggagcagagtggggtttgaatgggtcagagacctgcgtgtggttgctgttctttcacgcaagtacctgaggccagttgggccaagggaggccacaggcctgagtgagaacaagttgagtagcaacataggaccatgccacagtcagttttacctgagcagtgaagattatcctgccaatttcttttgtttttccttccttcaattgatttgttatcaaggtaaatttatattacagttcttaatttggcatttatatgattaaagcagttattatttgtcattgtccccaacagattatgtgttgtcttttatctcatttttgactttggtcatctaattctactaagtgagtgtaattatgtcccccagtttacagatgaggcctcaggcttagtgagggtaaggaacgtctccatggtacacagccagagaagccgagggttgaaccagccttatctgcctctagagctggagttttttattgccatgctyttgaatgtgaggctgttctctgaacgaggggctcctcatttttccaggccaagaccagcttttctcatttctttggaattacatgatcatgtgtgtgatggaagaggggcaacatttctggcctgctggtcaccacagtggtaggagagtgggcacttcagctgtagtagccaacttggtaggagggcaggagtcagtctgcatggaccagtttccaggatgattctgctttcattattgaccactgggtactcaktttgttttatrttatgttatgttatgttatgttatgttatgttatgttatgttatgttaygttaygttacgttatttactttttctttgagacagggtcttgctgtcacccaggctggagtgcrgcagcaccatcctggctcactgcagcctcaacctcccaaactcaagtaatcctctcacctcagcctcctaaatagctgggaacacaggcacatgccaccatagctggctaatattaaattttttgtaggcacggtgtctcgccatgttgcccacgctggtcttgaactcctggggtcaagtgatcctctcaccttggacacccaaggtgctgtgattacacatggaagccactgtgcccagccctgggcactcattttaaaatgctgaatatcaaggaagaagagtaaacaaatacatggatcgatcatttatgcattaagaaagtttaacctgaaaaaaaaaagagcctacaacagaaccaccaattaggtaattaagagtgccaacctggtttgctgtgtccagctgtgtgtgctggcttgtgtgtttcaaataaaccaccagcgaccgcggaatgaatgaatcctgagctgtgattgatgtgcttcccagtagccagatgtggttctctgcatttatgtactagtggaatagcaggggggattcctagcgaaaggctgtttagggatacattttaatgtggttccagaagggagtggaaacagccctctcatttttctttatctgatcctgggggagctgggacttttttttgaaaccaactctatccattcctttaatgatcatctgaacagccaaaccttctgggactattatgcataatccttctctaagctgaatctattttccctcatctgtagatatatctatccccctactctttttaaaataaaactgattaattataagaaaatagatatgaaatgaagcactgagctgcttcttagcacatctcagcccttcagtgatgggattttgctctcaagatggagaggtyccataaaggggcaatttttcagaacaaacacacaacagattagccacagggtaggcaatttaggtacctttaaaagtgtagctgtcgtcctcaccgttgacaaatacttaccatataccttctgtgagtacaaagattatgcagagcaaattcctaaggcacagagtccgcaccatggaaacataatttaaatttcactctggttgaggctgttgaagaatgctgggggtcaagctttcttccctgtgttgttgcctctgctttcttttttagagactagtaggttagtggcttttcttgctggcctcagcttttcatgctacccacatgcagacacacacacacacacacacacacacacacacacacacacacacacactgtacccctcacccctcaatttctgtgactctaattactgtttgtttcctccacttctctacccatttctttcgtctcttgaccactcagagtcaaggaggggtttcctgatgaatttccattgatgatggagtggactgtgtgactcacctagttaccccatggctggacccacctcatagccagtgggttcatggcctcagtgaacatgcccctcttgtgctggtctcctctagaagccttcgagcctgtgatccgtcttctcgtgcctgcctgaaggctgtttagatgctcagtgcagggccatttctcccactgaggctggcatctttactagctcaaggccattcatttccagtgttaggcctgcaatccaggctccagcttccctgtccgggtaggatttgccctttttttttcccccatccccagggttccagggttgtgccaaatgggatagtggtagtggttaatgctctccagactcaaacttcctggggttgaatcttggcattagctctacttgttgggtggtttggttgggacaagttactccacttttctggacttctgcctttataaaatggcacaccactcaatatgcagcacacgttagctcttacctttattttctgaaatctggagaagataatgtctgtttaaaacccgtatttctaggtcaggcacggtggctcacgcctacagtcccaacactttgggaggctgatgcaagaggactacttgaggccgggagttcaagagtgacctacgcaacatagcaagaccctgtctctgcaaaaaaaataaaacaataaaaataaaaattagccaagcatagtggtgctcacktgtagtctcagctacctgagaggctgaggaaggaggactgctggagtccagaagtttgaggctgcagtgagctatgatcacaccattgcactccagcctgggtgataaagtgagaccccaactctaaaacaaacacaaacaaactcatattcttaccttttcccttctctgtgctctttccttttagtctggtctcagaggtgtttctgctcatatcatttggccataggtagcaggcagttttcctgtacagcatcctatgtatcggtcagctgtgggcagctcrcctaacttctctccagtaaggaggtcggcctcattcctggtttccagggtatccttcagacccatggtctattcaatattttaggacacatttgaacgaaagtgtgaagaattctaaattgaggcgtagtatagcagaggattttaacacaggggttagaacccttgaaagagaccaatccattctaaccttcggatctcagttcttccctgtctcctatcctgctgcagaccccctggacscttcgctccagcaggttacaaaacatgggagcctggtggccaccccttgctcttgcatagctcccttagcagggctcttctctctcctgccttgcttcaccttgttcacctggggaaactgctgtacctctgtgggattaagctggagctcggtgtttgtcaccctacaactgctcctataacacttggccctctcttgcttgcttgggatctatatccagcacagtgcctcgtacacagtaggggcacaataaatgatgagcgaatgatttcttacgtaaagatttgggacagtttactaccaaaggtcttctgcagctgtgtcatttgttgctttggaaatttctaagttttaactggtcttttgagaaaaaacatcatacagcatttatcktgtactctaatgcccctttttcaaagtaatgacttcccattgaaatgtgcccctggttttaaagaattttgccatttccttctctaatgtgtaggacgactccgttacacttggatcgatgtacctgccattgtggtgatcttgatttattctactcaaatgacagcagagctgttggaatgttatgaattccttaggaatttgcatcattctattcctctgctcagaaaaatcaaatgagtgccttgtgcccattgtgtccagtctaaatgcctctgattaaaagaaccttttgtggtccyccaggaactctctgcacctgctgctgtcatttccattctcctttcttcagccagccagggacgagttgttcctttccccttgacacacagtatggcttctgagccttccttgccactgtcttcctaacttgttcagctccctggctggttcatcaccatgatcatgcattagaccatgacctagccattttctggggccaattcttccagttttcatttttaatttgattctttgattcactggttcagtctcttctgagaagacgttagtctttaaaacctttccccagactgcttattcctcaaaggcttaacaccgaatacaatttgtattacattattctgcattcttaagttttgtttttttttttcaatctccttgaattgcttgtaactgccttgctgtcatgagctattgtcttctgcttctttggaaagtgcccagggtagttctttgctcgtatagctactcaaacagacatttgttgaacggcagtagcattttccaagtgggaacatagacaacagggacagtggaattatayggtgatgatgaagttttccttttttttttttttttttttctgcctagcaaaggtctgatgagagaggaaagtacatcaaagtagcattggccagctgagcgtggtggctcacgcctgtaatcccagcactttgagaggccgaggcgggcagatcacctgaggtcaggagtttgagaccagcctggctaacatggcaaaacccccgtctgtacaaaaaatataaaaattagctgggcttggtggcgcatgcctgtaatcccagctactcgggaggctgaggcaggagaatggtgtgaacccgggaggtggagcttgcagtgagctgagatcgcgccactgcactccagcctgggtgacagagcaagactccrtctcaaaaaaaaaaaaaaagaattaaagaattaaaatggagagtaggtacctctaaacaaccacgccacctggaccaccctgaatagaggagaatgagttatgaaggaagcgcgctactgcctcaccaaggatgagtttaaatccaagtgcagtcttggcgtgcattcaatgcaaatgactagtaggggtaaagctagatagaccctagatatgagtcccagtgccactctttttagatccatgaccctctggtaagttccttcaccttcctcagctttggctctcttatttgtaaaacagggcctgacgccagcaacctcacaggtctaggcaccttcgtggcgtggtgggatcgtgttttcagggtcttggaggtctggattttaaacctggctctgctgcagatgagcrgggtggcttctgagaatcacttacttcctgtgtgtctcattttgctcagtggtataaaagtggtaatgactgtgattggctgaattgcgcccctccatgtccgaagttgtgttgaagccttaacccctgatacccaggaatgtgactggggatggggtctttacagaggtgattaaagtaaaatgaggtcattatggtaggccctagtcctatccgactggtgtccctataagaagaagagattaggacacagatacagaggaaagaccccatgaagacactagcagaagatggccagctgcaggccaaggagaggccgcagaagaaactaactctgggctgggggtgatggctcgcgcctgtaatcccagcactttgggaggccaaggcgggcggatcacgaggtcaggagttcgagaccagcctgaccgacatcgtgaaaccccgactttactaaaaatacaaacattagcttggtgtggtagcacatgcctgcaatcccacctactcaggaggctgcggcaggagaatcgcttgaacgcgggaggcagaggttgcagtgagccgagatagcaccactgtactccagcctgggcgacagagcgagactctgtctcctacacacaaaaaagaagaaacaaaccctgccaacactttgatatcagacttccaacctccagaactctaagagaatgagttcctgttgtttcagccccatagtctggtattctgttagggccgccctagcaacatagtatgaggacaatcacctgaaggtatgaaatgcctcaggcaggcatgtaatgtctgtgttatggygaggggcactcaggagggcttctggctgggctgggtatgagggtctctgtctacgcattggccaccacaacccccttccagagcgtcttttccccatagacagcctcagtgcccagtgcactgtcatatcccttagatttttcttttctctttccctccctccctccctccaatagcagctccatatcagcaactcctaacttctattcagtccgtggaggctggactcacgacagtgccaagcttggttgaaaacactcttttctcctctgggataggtgctttcttagtcctgagcctgacattctacacagtggccaagggaattttccctaagggtccttctgggtgatatttgggactggatccttctcagcagcttggacatcgtcagcctggtcaagtgtcatcctctctaaggccctggctcgttccatcctgtgtgtgtgcacagatgtccrtatcctgggtctctgcttggcaattctgcagacacttccagagctaagcacactctggttccctagtttctctctggctttctcagatgtgcttgatattgttgatttttatgggggttctcgcccccagggccctcacagtgctactaaaatcataacagtgacatcagccacttgggtgtgtgggtcgactgtgggaggcagctccatctggaaactaaaaagagacacaaaatcctcttcttttgcttcccccggacttatctgtatctttgcaggtagacagggccaaatggagaatttacaaattgacacttttctaaagcagcttgatattttagaaagttcccttgattccaaagaactgagaccagggagtaagattggctgcaaagccagagcagttggagaaaggagggagcatgatgcgtgtgtgcttggacagtcttggttgttttgcatcagaaatatagccacaaaccccatctataggattttaggaacctaataaccamttccagctgttaacaccttgagactttytaagttacagtcaaagaggatccctggcaagctaacattgattttataaattttgttatagggaggttgaatgtttttcccattcacctggatactccctgtattttamtaatggactcacagtaaaatgatgrkcctgcttgtgccagggggcaggtgtggccccgggagctctccctttctcrcctgacagatgcatctagtgtcagggcagtgagagagggaagccagcatgtttyccccattccctcccacatctttagtagccatgatattattcagctagaattggtctcgcgtgccagttctggatctactgaagatgacagaattcttactggatgatggggtgatggttgctttttcaggctgctttctggtgacattctggaagacacaccttaacacatatatgttagttttctgttgctactatatcaaatcaccatacacttagtggcttaaaataatacagatttacttttttatagttctggaggtcagaagtccaaaatcagtctcactggactaaagtcagggtgtccatagggctgtttcattctgcagtggtttcaggatctgagatgtcatggatyaggaagaatttgagattgtacctgcctgagggcagaaaagggccaattcacagggatttatgtgtctctgtcttttgacgaaaagaacttctaagaaggtaggttagctatgcaaatgatctgaggcccaggtatcttctgtctggatttgctgaatcatttcctttctttaaagcgatttagttgatttttactagaacctcttccatccccttccagaaggagaatctgaaattacatcaagttacttgtttaataattttattagttgtcctgtgaccaagactgacttaccccaggtaacacattgagttatgggccgagttgggacttgaacctgtggcttctttcctagccttgaagctcaccccttataccaggatactcttgctgctttctaggagctcccccttcctgtttcctcctctgcagtgcagatggtgccatgagagggagctttccctctgttctcaggccctgacgaggtccctcttggccattggaggcggtaccctggaggcttgtgtgggggtgtgggctgagccgtgtgatccatgtttgctataatgggaagcagctcccagaagagaaagacatgcatttgtatgcagccagtctgatggggttgaaataaactcagcactgatcaaacgacacacagccagcacattgcagggaagacaaaccaacatggaatgctgatttttctcactgtcatctttagaaaccttctttcttgtcgcccaccggggcagttaactgttaggagccagccctgtgttcaaatccatttattgatggatgtgttttccatttatcatctgtgggactcttgggtgatgtttcttttccgagctccaattctttcatctataaactgggcatgttaatggtaactcatagatttttagagttaargtaatgcaagtgccttacacaatgcctgcacgtattaaacattcagtagtaggtaggtgctattatcatcatcgaaaacattatcatgtttattgccttattgacttggatgaacacggtagtgtatataataaagtagccagtctagaatctggcctgtggttatctgtaataaatgaaagctgtggaaatagtgtgggataactcaaagacctgaataattcagcagatacaatggagttggaagattctagggacttaaattcttctcccagctctgtctcaaaataactgcattgccttggacaagtcgctttgctttccataacttcactttcctcatcagtgaaatggggctgagcattgtgtggtattggaaaagaataactgaagtgcttagttccatgctggaatgaagtagagacgtgagcagtgctgtcttatctgacttactggtgggatcaacatcgctcttcctggagagagccaggtcatcacaagaaccataaattgtgcgtatcctttaactccatgatagacccttcaactcaatgcttttattttcagggaaatactgtctccaaatatagactctaaaagaaaagatggaagggggtggaacagactctgcaagaatctgttcatgacaacgctgttgaaaacagctmaaaattgaggcttcagcagtgcccagtgttgccaggtgtgtgttgtgttgtgctgtattgtgtgtgtttccaccacagagccctttgtggctgtgggacctgtcagacgcatgagacgtgtagctttctaatttatggggtgcaccatggtggcaagtgttggtgatggccacaccctactgttttgatggaaggacagtgacttggccaaggttttacagccgtgaaatgtctcagtgaggatttgagctcaggtttcttgtgcctgggtcctccttagtgtgggtcctctgctctggcaacaggcagagcactgctttagagcctctgcgtgtctggctgtggcctcaggggtctagcagcagtgctagagcagacccagcttgtcagatccggggctgcttagaggccacctaagtgattcctttggcagcaagcaacattcggccaaggacatagctggcgggggccctgacaaggggtgtgtgagtgcataaaggttggtgtatcaggagtaagtgagaaggaggaggccggctggaattttacccttcagtgcttttctgtgtgtagacagagattgggcggaggtaggtagggaccatgtgtaggtggattatcatcttttccaggcctcactgatgagtgtcgtgccttgcaacagtagtgctcagggaatcaggctcagttgcragaggctcccggcagatgagggtactgcccagaaggatcatggagagctcaatgatggaatgttcacaaagcttctggccctaagagagcactcggtgagcatgggttgcctgtcccgttcctggagttggggcagggtgggacatttgaacgaggtctttgtagccatacagcaatcatcaggccaggattctggggagaaatccccaatttccagtaagttcccctgtctgcacacccgtgcttgtactgggtcacagccctgcagatacatgtatgcatcttcaagaacattagagtgggatttggaggcataaaatagccttccatattcctttgttttatacagtatacatcattactttgttttatacagtaattacagtctataataaaagaaatgagtcaataaaatggataattagacatgtggtcattcctaagatttaagatctagaaatatgacaattcagcgctttagtatccctctgctaagacgctttagtggaagctccacattgaggataaaacttaaactcaggctggtgcacagatcctcccatgacttggcctgagcctgcctcctctaattcatttttctgatgttcttccttaacattctggaagacacaccttaacacatatatgttagttttctgttgctactgtatcaaatcaccataaacttagtggcttaaaataatacagatttactcttttatcgttctgaaggtcagaagtccaaaatcagtctcactggactaaagtcagggtgttcacagggctgttttcttctggaagctctgagggagaatcccatccccttgcccttttcagcttctagcagccacctgcatcccttggcttgtggtcccatcctccatccacaaaatgaatcacaccactttctgcctccattatcacaccaacattccctccgacgccgactcttcctgcatctctcttataaggacctttgtaattatatcaggcccagcaggataatctgggatcatcttccacctctaggtctttaatcatacctacaaagtccttttttgttatgtaacgtgatactcacaaatttcaggaattatcaggaggtaatctttggggggcattatttagtctatcatgatgtgtctctctagtctttttttattttmttttttttttttttttcactttaggctctgggatacatgtcctaaacatgcaggtttgttgcataggtatacatgtgccacagtggtttgctgcacctgtcagcctgtcatctgggttttaagccccacatgcattaggtatttgtcttaatgctctccctccgcttttcctccacccctctgataggccctggtgtgtgatgttcccctccttgtgtccatgtgttctcattgttcaactcccatttatgagtgagaacatgcgatgtttggttttcttttcctgtgttagtttgttgaggwtgatggttttcagcttcatcaatgtccctgcaaaggacatgaactcatgcactctagtctttgtacctggtgtttgcacttcctggaacaccttttcctgccttctttgccagggtaactcctagtcaccctttagaaccccgtctcagggtcttctgctctacaagaagacaactttgtacctaatctttctcctgctccattgttctggcaatctgcccctcttccttgcttatctaatatcttgagcctacacatctagtaacatttacctcacactgtattgtagttataggtttatttttcttgcctctgtagtccttggggacaggagctgctgtaatttgatggatgcccaggataacagggaccacagcaggaaccttatctcacaccatagaggcatcccaaggagaagccctttgtcctgatttccacgtagccttccttgttggcctggaattacatttcctcctagaaactgcagtccattgggcttcagcttgtcaaggtcccgtgttttcctgtcccttcgactgtctaattccctctttgttggtctgctgtagattagcctaagtaaaagtgaatagacaatttcctattaacatttatattgcttttcttttctatttctyggcaaggccctgaaaactaggatggctgtggaaaaatgttgttttatctaaataatgtccctactgggggctagrttctggcttttggctgggccttggagaatggtaggtgtggtggacacatgagccccaggaaaaaattaaggcgcagaggtcagtccagaagctgcagattacattcagcaaatgcatattgaatgcctactatgtgtctgcacccatgcaaggtcttagtgcatgtaattcatatctagcatttattaagcggttattatgttcccagcacataatatgtgccaagcattgttcctagtgctttaccttgactttttggaacaactctgtgaaatgcagccacagttattggaggagatggcagtggagccggctcttgcagatgagaaggattgggacaggtttttatgacagaggagaggaacactcacactaatgaactagcaaaatcgcaagacacaagtagattcagacacccatgagcacaagaggccgacactcaaatatcccctaagaatctgattacttcattgtgccctccccttttgagctgtcaccatggattccacttgcagcaaggactgccatgttgcttccctatatccattgtcccttttctgcttaggaacagacttctgcttacattcaggagagcaaagcagccagataaatgactgtctccctgcccctgtggcagttgggcatggccatggaacttcagggaatccacttacaatcacttttgctgttgagatgtgtccccgtttttggccttctcttccactacttttggctgccagcctgcaacaaggatgttgatgctctagcatgatattggacactgaggggcctcaacctagagctgaggatggtaaagcagaatgttgggatccagggaagtcaatggcactgttaaatcacgttccaccctacactaccaacctcctgactttctggatgtgagagagarataaaagtccctttggtttaagccactgttatcaggaatttattgtcacgcgctgccgagactaattgcagtggatgcactgttctgtttccagcaacctccttttcatctgcagaagtccacattccacctttgctttatgaaaacttttggcctccaattcccattttcctttccrtctgttgccgttcttctgaaaacaccatcatggacccatccaatcatgtatcctgacagcaatgtaaaggcatcatttccaagcatcttcaggtactctccctgtagcacctgcgttcccctccaggccgtgaccactccgagtgtgatccaggtacaaaaagcatcagcatcacctgggagctgctcaagaagacacaactgcaggcccatcccaagattatgaatcagagcccgcattttaacaagatcccaggaaatccatgttcctcttacagggtgagaaacactgctgtcaacgtctttgtcctcactgccagctgctcacctcagaccacggatgtggaaatccactctcgggctacaccctcctgtccctccaggtctctcatgccttgtcaacctttcctacaagcttaaaaggtacctaaactactgcagattgctacccactcttcccagaacaaaataattgctttcacacttccctgcttttgtttctgtttttccctctactcagaatgtccttcaagacctctgcctacttatgggtttcctactcactcttcaaggccagctcagacaccgcctccaggccaccagcatttgggggagagggactgtgcctctccatcaataagagagcaccacagtgggctctgaacagcttcttcacctataaaattcagagatgaagtccaccgggactcttggatcagaatcaatcctctatttccttgaacagagcatasttctggcacccccgccagccctcatgtcatcccattttgcattttatttagtcatttacacacataccactttggattgtgaggcagcattcagccttccgcatagtgcctggtacacaattaattctctggacattgtagttaaacttcagtgaatggtgacacttgagtggtcaagttgatggtagatagtactgggtgtttttcctagagcatcgattctcaaactccagcatgcatcagaatgacctagaaggcttgttggaaccccttcttctccccaagtgtctgagttagcaggtcttgggaggcctcagaatgtgcatttctaactactgtgtaggtgatgctgctgttcccaggacaaycctttgagaaccactgtccttaaggaatacgtagatttgttgcctttcctggaggcaacaaatctcatgctcctggagagaaggaaacaaatctatgtactcgttaaggacagtggttacattagaacctgcaatgtaagtcagtggttrcatcggaacctgcaatgtaaatcaatcttgaaaatagacaaaatagacatgggaattaaatacagagaaattagatcaatggatgaaccaatagagaagtgactgggatcaagagtgctttggagtcttgtttttcaatttttttccaaacaaattcacctaaccttagatgctgctgagtgtaagacatggcattgttttacataaagccaagaaatcttttaattaaatcatggcacaatttttttttatccctttgaatctttcttttatgcttattgaaagaactattttagacttgggtttttgtcatattttattgctatgcctacacataaagaaaagtataggcaaatatattggttcagatattgcaaaagcttctttgcttggaatctcactcttcagaatctgtttttcaactcagtgtcatctcctgcatctgtctacatcgtgccgtcctctgcatcatcatgagcatggagyatttcttatgaaaatcctgtgaagacgacacttaacccactttgcagctctgtggagctggcctcctcctggctctgcttctaggaatgttgctaaacacatctggttctccatttcttcctgcctcttcccacaaccatttggttcatagcggttaaaagaatgactcccttcattgtctccgggattttcactgaagcctgtgacacccattctgcgaagaggtgaaggcactagtggaaacagctgtgttacccctgctgtgtggtctccagtgattgctcaaactttctcgacttcagggatgttagaatgtgaaaaatagtttttcttagaaacaataaagcttgtaaaatgctctctacttgccgagcagatgttttcaccatcatgggttttcatataaccagtctcagttcatatttacatcggttgttcaaggtcagctttgggaggtcagcctacagaggaggaccccgagtctctgtcaaacttgcaggcaggcattcgttcactcttgaaagatttatggagttcgtgctatgtgccagtcaccaggggataatcagtgaagaaataggtatataagattgagtcatttaagtgttacggggaagaaagtaagtcaggggagcagggtgttagggaaagctttttgaacagacactagagtgaagtcagggtgcacagcacacaaatatcgagaggatgcacgttccatccagtggacattgcaagtgtgaagttcccgtggcaggagtgtgcttgtcttgttggaagatcagcaaggaagccagctgggctggatgagtggacgttcagtaaaggttcagtaaatggccctacctgggatgtagctgagctgaaatgtccatccagatctttgagttctaagctaagggtttgttggctgggcgcagtggctcacgtttataatccctttgggaggctaaggcgggcagatcgcttgaggctaggagctcaagactagcctggccaacatggtgaaatcccatctctacaaaaagcaaaaagaatacaaaaattagccgagcgtggtggtgtgcccctgtactctcagctactcagggggctgaggcaagagaatcgcttgaaacttgcagatagaggttgcagtgagcagagatcacaccactgcactccagcctgggtgactgagtgaggctaaggcgggcagatcgcttgaggctaggagttcaagaccagcctggccaacatgtcaaaatcccatctctacaaaaaaatacaaaaattagccgagcgtggtggcgtgctcctgtactctcagctactcggcagcctgaggcaagagaatcacttgaacctyggagagagaggttgcagtgagcagagatcgcaccattgcactccagcctgggtgacagagtgagtgagactccatcttaaaaaataaaaaataagtaagggtttgtccacatgcaataaagtgtgagaagccactgcagattacatccttctctgtttactgcggtgagttgagtcttttaagaaacaaatgtcttgattaatccagccccagtagcaaggcatggcagaaagatatgcttattgctgtcatctttgtgctgcctaagaaacacccacagtgtctcattcctgagcagcggtttaactcacccaggcaaggatgaccacacatgtagggtgaaaaggatgtgacagagaaatacaaacatttcattcccagtgtgtgttctcaaaatagaatgtgggactttcaactctttcttctttgaagaacattgttgagagaaagactctgcagcgcaccgcagaagaaggaacagagatytgagttttgatcccagctctgccaataattagctgtgggactataaccattagagttcagttacagacaagaggatgcatgagcttcaacagaaagagatgtatttcctttttttttttttttttttttttttttttgggacagagtctagctttgtcgccaggctggagtgcagtgttggtcaggatggtctcaatctcctgacctggtgatccgcccgccttgggctcccaaagtgctgggattgtaggcatgagccactatgccctgccaatgtattgccattcttaagtgccttgaagaatcctaagaggctagagacaaaggkgagaaccatattgaaccagaccaccaaggaaactgtggttaaraagccatggggtggctgctcccttacggaccctgctgtatctgctgagatctgtataagcaggacgagaaccatactttttgatacttgagaagtttgggactggactcagagctctaacgacagctgcctcaaaaagaaaataacatcccttgttcatgcttgccagraaacggcagcagaagcaggcccaagggcatcctctacctcctggcattcatttttgcctctgtcatctcatgcaggtgtgtctgcttggtggaaactgggtttcacaacagagtccaagatgtaaaggagtttggaaaatgtctaatgtggcttttgatgtatgtaagggaaatatttaaggcaatcctattgtaaatgagagaggataaagggatacaatgggagttaagtgtgctgcagttcactcgaactggtaaaatgtcagccccagttgactttgataaattatgcatatgtaatrtaatacctagagcaactgttcaaaaagctatacaaagagatgcattaaaaaccaccataggtaaattacaatggaattctaaaaaatgttcaagcaactcacaggaagcaggaaagaccacaatgagatgccatttcaaacccaccagcatggctaaaattaaaataaaacaaaactaacaacatcagatgttggtaagaatgtgttgcagctgtatctctcacacattactggtgggaatataaatggttcatcccctttaaagaaaggtctgctgatttcctataaaactgaatagataggcctgtaatcctagcactttgggaggccaaggcgggcrgattgattgaggtcaggagctcgagaccagccaggcccacgtagtgaaaccttctctactaaaaatacaaaaaattagctgggcggtggtggcaagtgcctgtagtcctagctactcaggaggctgaggcaggagaatcccttgaaaccaggaggcagaggttgcattgagccgagattgcgccactgcactccagcctgggcaacagagtgagactctgtctcaaaaaaaaaaaaaraaagaaagaaagaaagaaagaaagaaaaatactgaatagatatctaccctctgacccttcagttgcagttgtagttatcgctggactatgaaactgttattgcaaaaacagcccaggtattcatcactgagagaatagataaataatttgtgttccgttaatatcatggtatgccactcaccaagcggtcagtaaaaacagattagcaatacatgaaacaacttgaatgaattgcagaaacttgatgttatgagagaaagcttacccaaagagtatatacttcaggattcctaatagatcgagtttggggacaggaagaaccaatctataacaaagcttaatcaataagggattgcctatggtgggaggatgcagatattgtcagagaaggagcttgagggaacttcctcatcactccagaacgttctgcatcttgaaaagtgtttgggttacataggagtatgcattgtcaaaattttcccagtgatttgtgcatttcaktatatgtaacttttaccatgaaggcggggaaaaaacccataaacattattgaatcctggttaatgatatacatattaaaatgcctaggaagtaatgtgctgctgactatcttactgttttgaaatgcattaaaaaaccaaagatgtgttgatagatggatagaaggataaatatgataraagcaaatatggtaagagggtcttgrtacatcacaggggcagctatatatatgttcattgtagaattctttcaactttactgtgtatttggaatttttcataataaaatattagggaaaaatctgaaaataaaatcttaggatgtgtggtaccttccttcatctgcatcaggtggcagttgtttgttaagaaaatcacggctgggtatcccagcactttgggaggccaaggtggatggatcacttgaggtcaggaatttgagaccagcctggtcaacatggtgaaacgctgtctctactaaaaatagaaaaattagcagggtatggtggcgtgcgcctgtaatcctagcttctcgggaggctgaggcacaagaatcacttgaacccgggaggcagaggttgcagtgagctgaggtcttgctgctgcactccagcctgggagacagagtgagactcatctcaaaaaaaaaaaaaagaaagaaagaaagaaaaaattactgcagctatctgatcattgctttatgggacaagggtgatttttgctgaattgaataragagtatacaaaattaaaattttaggagactgaaataactgggattggggatgcagcctggatatagtattcactaaagatgctcactaagcacttaattaatttatttcttttactttgtaaagataagcccaaaggttcrttctctaatctcatccttgctcatgcccccaaagtcagtgctggcatgcaaacacgaccactagtcatcttttagataaggttcaatgcaaacatttatagttggaagagactagggggctacctgatcctatttttttcattctccctactccctcccttccccctcctgtctctccacaccttctctctccatgtatgtgtatgtgtatgtgaatttacctaaatcaatttggtcatggacaactcttagctgaatttgtaggtaatagtagtggccaaaaagttgaagatggtggaacctcaaactagaactttactaacatattgtgatgaaaaaaaaaatattccaccagattctgccacacaaagagacatttattgatcaaacgttcattagtaggcgcacaatgattcaaccaacagtagagatatgtctctgccctctgtcctttcagatgctctgaccactctcttacagaaaggttcactagaggcaggtgtgacactgygacagggaccattgctgtcaccctcatagttggcattaggcaaacagaatttctcctaagcagcagctggaaacagaatagctatggatcaccccttagacagcatcgctaagaatgttggtgtcagcctctctagattttccttctgtgttatgaaaaggtggggagtatctctaatattactgtagccagtccacgttgttggtagcactttatcttaccaatgagagctctttcctaacatctaacatgtcatttgacaagctgctaatgtcaccaggaaaaactgattccagaattcactagatcaagacagtggtgacagagggagccacctcaggactgtattgggcctcaaatactgtgagcagatactgctccttcctccagggtgggtccctgagtaaaatggtcactggctacacctgggttgcactgcaacctaagacttatgtaaagtctaccatgacacacaggcacaccctacagcgtgcttctgggttgaggttttcttttcttttttctctctcttttttttttctttttttaatagagacagagtctcgccccgttgcccaggctggagtgcaatggtgtaatcttggctcactgcaacttccgcctccggggttcaagtgattctcctgtctcagcctcctgagctgctgggaccacaggcgtgcgccaccatgcccaggcaaccttctgtatctttagtagagacggggtttcaccatgttggccaagctggtctccaactcctgaccttgtgatccgcccgcctcggcctcccgaaggctgggatcacaggcgtgagccaccgccccagccatgggttgaggttttcatagtagaatgactcttgtttgtttgttttaatttggtaaattatatataacacaatgagagctctttcctaacatctcccttccttccctccctcactccctccctctttttaatttttttttttttcatttcagttgctttaaggttacagatggtttttggctrtaaaaatgaattgtgtagtggttaagtctgagattttagtggacctgtcacccaagtagtgtacattgtacccagcgggtagtttttwggctctcactccctcccagctttcccgcttctgagtctccagtgtccactgtactgctctttctgcctttgcgaaccrtagtttagctctcacttgtaagtgaaaacgtgtggtgtttggttttctgttcttgtgtcaatttgcttaggatagtggcctccagctccatcgaggttgctgcagaggaggtgattttgttcttttttatggctgtgtagtattccatggtgtatatgcaccacattttctttatccagtctactgatgatggacatttaggttggtcccatgtctttgctattgtgaatagtgctgcagtgaacatatgtgtgcatgtgtctttataatagaatgatgtctattcttttgggtatatactcaggaatgggattgcaggtttgaatggtagttctctgcctttttttctttaatacctaaacttcataaaaagtacatatgtcatatttttggagtgatgtgtacatacagagaatttatacttacattgtaaaaattgatacagtacttttagcaaaatgatgtgtgtgataaatattgagttacagaactgataaaattggtagaaagtcagaatgatatatacacatattgaaaaccttaagcatcagcagaaggataatgagggtctaaaatggtgccattggccgggcgcggtggctcacgcctataattccaccactttgggaggccaaggcaggcagatcacctgaggtcaggagttcatgaccagcctggccaacatggtgaaaccccatctctactaaaactacaaaaattagccatttgtgatgacgggtgcctgtactcccatctactcaggagactgaggcaggagaaayacttgaacctgggaggtggaggttgcagtgagccaagatcgtgctgttgcactccagcctgggtgacagagcaaaacttcatctcaaaaaaataaaataaaataaatgttgctgttattggggaaggccgtgttactgcatgcatagcccctgttggctgatggctgcatgaatagttttgagatcaggaagcagtgttttaagcattttgcatcctaacaagwgaagttgtcatttacatacaactatctaatggtattttcttttccattttggacattgattggaaagggaagtgggcagtttgcttagcatacaataaattttaatttttaattataatttataattttaattataatttgtcctacttaaaataataggagattggttccgtggtagccttttggcacaaaacattttattttcagaaacaaatcagtgatgtaatgagggagatacttttctctaaggtctattcaagatactgtaaaccctcttcacttaggagaaaagaaatacgggggtagagggaggaagagaactgctctcctagagtccagggagctgcctagagaagacgagagtccacccctcctaggccaaggctgttctaagttccatatgggtcttccattgtcttcctgtgagacccattgaaggatctgacccagacggtaggaagaggctaattgttaagtggattcatggcctttgcaaatgcttattagaaatcagccatgatggtccaggacatgctgggaatcttagattaatggggcttagcagatttttatgtctgaacctgcgtagagatgtatggatgtgagcagagaggcatgcgttttgcttgctgactgacttgtttcctgccccatgaggagccatattccagtcttgagcttgcgtagtttcttactgtgcagtcaatatttgctggtgagaaatgagcccactggtactggtgcatctgatcctctgccgtgcttattctctctgtgatcaatgtcgtgtgcatggcttgtagtgttagggcagcaacaaatctatttttaattccctcttccttcccatcttttagaaatgggtgaaaccatttctcctgacgagtaagcctcttctcctcctccctccctccctctctcctccctccctcaaaatgtcaattggattaacatttgcagttgtggctgcctccacatctgctaacagagcgtggctggactttggaaaacagttgcccagagccattctggggtttctatatttatttctttcaatgacatccatagcaaatttgcactgctctcaagccaaaggttgatttgttccatggsctgcccagtcaacctggggtccccctggagatgaggacttggggtctggtgccctgccagctctggtgtaggttccagagctaggaaataactggcaggcttgttgtggaggcgccatggcagggtccacatgagcgcctgctctgtgttgtggcactagttcagcggtactttatgagaccaggagggtgatggatggagccatggaaaggtgtgggtggagggagggacaggcatgtaggcagaacagcaagaaggtgccagcctgcaacatcgagtgccagcctcatcagctagcggggcccctaatgtcagatggagacagcccccaagccagcctccaccttggctgcctttgtcaagtgggcctcgggatttckcttaccattccttttttttttttttcctcttctctggtctctttgccttctcactctgtctgccctcaccctacaaggaaaggtccttctccctttcttttcttccctgttttccacacttccctccctctttttccccaggtctctagtagaaggagcatgaggtgtgtttgaattccacctcctgytgatctttgggagagtaactcaggtcaggcttcttccagccttacctggggatgtagatacctatttctggggttgcygggagggctgaatgacaaacttttatagccgttacgttcacatagcacttactggtgcttcatgggtatacttagttagtcctgaggacagcccatgagatgggggccattatcttcagtttataaaggaggaaactgaggtctaagaacattaaccagctttctgaaggtcacgtagctgttacttcattttgcctaacttttctttctttttgtcatttctactttttgggttctgtattccctcttcctgtctccatttcctttctgcctttttcttttgccccaggcaactcagggcagcctggccacagagtaccctctcttacccttcataccctgcggagcttccccttggaagcagccagcatgagaggaatggaggacggatgtctagtgatcatgtgggagtgaaagctctgtaatgtgtaatgtgaaagatgtacattataagtatctacaagattagttattcatatcatttttccctccttkttttttttgagacagagtctcgccctgtcacccaggctggagtgcaatggcaccatctcagctcactgcaacctccgcctcccaggttcaagcgattcttctgcctcagcctcccgagtagctgggattacaggcacccaccaccatgcctggataattttttttatctttagtagagacaggttttcaccatgttggccaggctggactcaaacccctgacctcgtgatccacccacctcggcctcccaaagtgctggcattacaggtgtgaccttctgtccattttaattctcccccacctcacctttttctttacatttccttcttctgagcattttgcctatctcttcttctttctgtcatttctactttttggactcctcaatatattccttmttcccagtacccatttcctttttgcctctttcttttgcattccccaaatcacttctcccstaaccctgttccttgcctgtttggtttttgccttcggtcacctctgtctgtctcatctctctgtgttttatctgtcacgatattggccaaaccaagccctggaagtgcgctgaatgcggcttcctgggcattcatcagggtgtgctctggagttcttcctgcttgagcaactgtgcagcatccactgctgctgagaatttaacctcaccagagtcaggaaagttctgagattttgcactcctcataaacttagccagcctgacacacatgtgtgtacacacacacacacatacacacacaggaggggggagagagagagagagagagagagagagrcagtaaatttgtcagcccttgcagtagcacgcatttctaaatawgggcatagtaggaagagagatggttactgtgggaactataacttttaatttactggcctgaagcgctaaaccagggcttgatacttaatgtagtgtttttacatttagatgtgtgcttaggaaaggcataaaacttttcaaagctggggccagtgctgggggaggtcactgaaggaggttcaggagtggtggaaaaattagggaggtggagtgggcccactgggaccaatcagcgtgccctrccaatcagaagtggaagaaatagacacattatggacagcacagttggtcaggataggaggcttaatgaccagcccagcaagggaggaaggctttatgaccatccctccacttgcaaaggagaccaagatctggagagaaaggatgatacggccaggggaggaggctgaaggtgcatgacttttggaagtctgagttcaaaacaatgcagggccgggtgcggtggctcacacctataatcccagcactttgggaggccaaggcaggcagatgacctgaggttgggagttcaagaccaacatgaacaacatggagaaaccccatctctactaaaaatacaaaattagccgcgcgtgatggtgcatgcctgtaatcccagctactcgggagactgaggcaggagaattgcttgaacccaggaggcagaggttgcagtgagccgagatcgcaccattgcattccagcctgggttacaagagcaaaactccgtctcaaaaaaagaaaaaataaacagtgcaacctgcaagggatttggactctgacactctgagcttaaagtaatgatgaacacttaacctactgcttcctatgggctagcactgtttccagcaagttagtactcacccatttaatcttgaccacagctctgtgagggagggactcttctcacctctactttataggtggacattgagatagagacagcgttcgagtaggatctcatcccaaggagcctggcttcagggttggtgcatttcattatctctgttttgttgcatttaaatcctgacattgttacttacttgctgcgttatcttggatgagtttcatcacctctttgagccttgactttctccccaygaagatgagggcaggaataccttccatgtgaggttgtggtgggtctagggagggaataagcatatggaagttctctgtaggtatgacattgtattatgtttaccatcaagagagaaggtgagtggaggctccgtcagataaagaataggacaaatattagtattcggtatttttacttgttaagtgggtagcactcaggttggcatcaggcctacctggtgaacagcaggttctcttcccacctcccacctcttccgtcttccatgtgagtgggtgcatcggtcccgagcgctcctcttcccctcccatctctccacactttccctagcacgtgacataactgagaagtcaataacacctgctggggtgtgtcagcctggcagaacttctggcgtggctctcaagaacatgcgacgcctcctggaaccttcactcattcaacaaatgtctgcttcgtgcctactctgtgctccctgttgttctcagccctggggatatgttaatgtccaaggcagatgcagtctttgccctcataatacttagtttccagtaagagaaatggataagaaccaagttctatcggctggtaatgaatattatttaaaaaaaaaaaaagcagcaaggtaaagggatggagactgaggcatcggatggagagtaggattttagaaggtcagagaggacttctttgaagaggtcagcttgaggccatgcacggtggcacacgcctgtaatcctaacacttggagaggccaaggcaggaggattgcctgaagccaggagtttgagaccagcctggstaatgtggcagaaccccatctctaccaaacaaaaaaaaaaaaaaaaaggaagaggtggtcatcttggagcaggaagccaagcaaagatctgagggaagaatattccagatggaaggagcagccagtgcagtgatccccaagacagaacaagcttggcatgttcaagggacagcaacgaggaagagatgggaacagagagttaggtcagcatccgtgatcgggggcctcacagatgctagcaaggagattgagctttgttccaagtgcagtgggaagccactggcactggggttgccagataaaatagaagacagcttgttaaatttgaatttcagataaacgatggataattgtttagtttggacataattgaacatcctatatttttgtttgctaaatctggcaaccctacactgatgggctcagagcagggatctgctgtatgcagagagcattgggctggaaggaaaactgcagtcaggagaccaggaagagaagggcgccatagtccccaagaccaaagcatggctggtctaggccatgataggccaaatggacatgctgagtagtgtttggatttgggggtatgttgtgatacctgtgcagcttgttagttattcatatcatttttgttttttttttttttttttttttttgagatggagtcttgccctgttgcccaggctggagtacaatggcatgatcttggctcactgcaacgtctgcctcccaggttcaagcgattctcctgcctcagcctccccagtagctgggattacaggcacgcaccaccacggcctggctaattttttgtatctttagtagagacagggtttcaccatgttggccagtctggtctcgaacccctggtcttgaacaggggttcgaaccaggggttgttagtggattgggtacaccagggaaagagggcggtcagacagaaacaatcctaagctccagttcacagggagggacattgagcatctcagggcccggtcagctgtgcaccaagtcgccacttgtttgcctgagcccaacccacatatctctagatgggttagctttaggtgcccacaaggaaagagagtcggctgatttaatttgccatggcttgctgcatttttttgaactctcagtgaatttatatgcactctgtatagatagatgagtcgataaatactaccataaatgaattcatcatcttttgagcacttatcctgtgccagattctctgctaattaattgctctgcatgtttgtctcttggttgagcctcacaacaggtggggttgtgcagtgatggtccacattttacagctaagaaaatcaagactaaggagagtgtgacacacattctactgtatttgctttatagtgtcatggttatttctttgtttcctgaagttttgttggcacatgtgtctcccagacctatagtcagctctcagtgggaacattgtttagatgagggcgcatcttggaaagctgcctcaatcctaaatgctagaattagaacccagttctgattccagaacttgatagagcagtgttcacagacttgagtggaaataaaaaatacctagcaaatttgtttataattcatatgcttgagtctcatgcctaggattctagttcagtcagacagggggcataacctaggaatctgcattttaacaaaaccacagttgattcagatgccattattcttgtatctgctttgggaaatgctgtaggactttgccttaattatgccaaagagaaaaccctgtcccccaaatgctcccaaggaatatgactgggttctataatttggatattagggatgcacatttgactacaggttkatgtsactcacattcctgtttttaggcatttgtacatgctttattagatgcctctaggaagtgctttgttcagcatttcaggcaggatggctgggatttcttttgtatattaataccccctggcatttgttcagcacttcatccagkgcccagggtttccaggtcaccatcacactacctctgtccaccctcttctcatctccagggcatatgccagctgccccagtcacagtcttgaagctcttgccctttccttgtgtgtgtggtttaggatgggttcccattggctgtgtttccatcccatctcatctcaagggaaatctctggtgtgaggagctggcagtgctaggattggtctgtgcttggtggctccaccccccatacacctgaaaatcctcagaatgaaaccaatggtcatggagcctcagcagacatcattcatcaccttgaagaagtgaaatgaaaggtgaacaaccttggttgaaaaagtgggggaagaagttgatctgaatcaactatggtttgttaaaattcagattcctaggccacacaccccctttttgatggaaaaaagggaaggccatcgctgtaagaagcacatggggttgggtggcatcccgggatgagctttagaatgagttctcagcttcttagctccaccctggctggcttggcgatatttttcttcatccttgcatgtcctagtgaggaacttatcattatgcacacagtagcttctcctgagctaggttctcaatttcctcagttccgcatggagttacaggcaaccaataactgtccctaaatgggccatccctttgttaataggcagcgtgactcaggagatcagtgaaataccagattcattctcaaaggaaaggttctcagggtgacttctatgggattttctcttctatccgtcttgtttctcgggggcagatcagggcctgtggaagccaggggtgcgaagggtataaatcacatgagtagtccgaggctgaggcccttctctaggtccttgcactcccgttggccttgataattgtgtcatgtttctcttacgtaaatttgttaccaaggtgttggtggtggggagcaaggtcagagaagggagtggatgacatagagaagggattccagtcacacaacagtgttccttccccaaacacattccacattcaccgggtgtacaacgtgcaatgatttctgwtgttgctgacttaagagcaagcacgttcggtactaaatcttgcctcgtgtcttattaaagagcagctcactacaaaactgttagtatctcagaatggtttactctccacaccttcctaccctcctggctgtcatgccaaaggacagtcttccagcgagggctgtcttgctgctattactacaaccactggtgatgctgagattgctgccatggaccagactgtggtggcgctttacctacagtaaacccccagctccattctagtacttctggacccaggctgggcttttcatcaagggctccagagagagtatactctgttttcttggtgttgtatagtcaacttactgggaagagaaggcaatggaccctgactggcagagttcagatagtatctctgtcatttagtaactatgtgtctttgggtatattgcctaaccattctattcctcagttttcctctatctccatctatcttctgtctatcgtctgtctgtctgtctgtctgtctgcctgcctgcctaaccattctgttcctcagttttcctctatctctacctatcatctgtctgtctgtttgtccgtccttccgtctgtccatccatccatcctattgattctgttatatataatatataaagagatttattgtaaggaattggctcattcaattatggaggctgagaagtcccaagatcttcagtcagcaaagctggagacctaggagagccaatgatatagttccagtctgaaagccaacagactcaaaacccacagctatatttctgttcaagtttaaaggcaagaaaagaccagtgtcccagctcagctgtcagacaggcagtttctttttactcagcctttttattctactcagatcttcaattgattggatgaagcccctccccgttagggagggcaatcttctttattcattctaccaaatcaaatgttartctcatccagaaatactctcacaggcacacccagaataatgtttgaccaaatgtctgggcaccctgtagcccagtcaagtcaatttattaccatgacagattgcatcrtatatcttatggtgttataaaataaattaagagcacaaaatggctagaacaattcttgtcatataggagaccatnnnnnnnnnnnnnnnnnnnngctttgttccctaccattggtatggccttgggcctgagcctcagtaaaataaaaccatatgtctctggttttcctctgggttcagatagcatagcagcaagctcacagcagagtgcctggctcacagtgggtcatatacttgcaaacatatttgtaccaagtttttactctatgccagccactgtgtgtgttactagagaatcagtaattcaaagattcatggttcctgatttcagagtacctactatttcccaagagcttagatgtgatgataaaggatttcatacaatgaaagagttgcggaaatggaagatggtatgagggcagaggaaccaatcaggaagtgccaatgtccaccagcaggagtcaggaagatttctcatggatttatgatgagggggacttgagagttgagtaagaatttcccatttgggggcaatggcagaagcctgggtgacagggaacagcctggggtgtcctggtgcaggagaagaagtgggaagggtgggagaaggaggccagggccagatcacaggtcgtttggacacaatttcttcaatttagtgtcttgccatcccaaggtacaattttcacagaccactgtgttaacgtcaattcttttcattttaatattacttaaatgtgcaatttggtgcagcctctgtatagggagagcctgcatgaactggaggagtacaacagatttatataataaattctaagaaaactataaaactaacaaagtttaagttatgagcacgttaacgtgtcaggtgatgctgtgttaatatggtgtggatcactttggcatggaatttgcagtgtccacgcaccacaccatggctcatatttctttccagccagagagcacccaaccactttgcgtcagattcttggtctttgcatggtagaagtgcatcatttaggcatctagccttttcctgttatctgctgatcagcctggggcagttaaggtagtgggtacaacctggggctagcatgagcatagacttaggtgtaaaagtgggctgtgacattgggctccgctaaaagatgactgtccagatgaccctgaatgtgcctctgtacatttttaaaaagataattatcaaagtaagaattgcaaattagcaaacacttttagaaaacacagaaaccccagccactattgcatttgagacgtagcattgataaagagaaattttggagagatctggtggattaaatcagactaatatagagtgggagactgattattgttattgtgcaaatgatggtgatctttaatagtataggaaatacttattctagcaagtgcttaaattttgcttctcatgtgccaggtactgttctgagaactttatgtatgttatctgttttaatcttcactatacctgtatgaggtagatgttgttagtattctatttaacagaagaggacgatgaggcccagaaatcttaagtcatgaacctaaggatacagggttaataaataccagacctgggacgtgaaccctggtagttgggcccttgactccttgctcctaacaactgaaagtatgaattaacatttcaatgcctgttttaataactttctacacaaataactaatggcccattcacatcatcccctgcaaatgttttggggtgacaacttgttaaaatttaatattcagagcaatacrgccccagctatttgacaatttcagatataaatctaccttaaagatgtacaagtacaaattatgcaatttgatttttaagtgcttttctagcaatataaataatraagtgtgttggaactggcaggtatagtacattaaattgagtgcaattaaaacactgtgatatttttaaattaacaagaaaaaaataagtggcgaaattaagaaacctgaatctgtctttgcagcctcctccagctgataactgggtggatgattgcagagggtattagtaacatttatactctggatttcaagtgtgatggttgtcacatttaacacaaagagcacttcaatttcacttctgcataacaggcagatgacatttcccacaacataatcttttcagttttttttttttcctaaagcagatgataagggggtattctgagaagacatctgagttgaaataatgacttgccttgtggataatgtctcaatgagacatctgaaagtcaagattctctttgttagacgcaggaataatctgcatctttcacactcatgggcggccttcaccctctccaaaagctaacagtctgttcattggaaaccaggaagatggtgcaactgttgaggttgtttttcacgaccttcccaaaggtttgatatggacagagtgagatctgctctcagccggtagttattgtaaaaataaaggctgatcaatacaaatttgtgcatcaaaggtctcttctgccccccaccccattctggagttagaaatctcccaaaggtttgatatggatagagtgagatctgctctctgtcagtagttattgtaaaaataaagcctgatcaatacaaatttgtgcatcaaaagcctcttctgcacccgccccgagccccattctggagttagaaaagttcaggcgtagatcatggactgattttgtcatacacacacctgtacctctgcattgtttctgaatgtgttttccctggaacggaccatctcgcttacttctccacttactgccattacttagggcccttcatcagtgttcacagactccaagggaactctgtgtttaaaactggatgtatgacctgaagcacattgttttgagtggaacaaatcagggccatgagccactttagactggaatgtgatcccctccatttgaagtccccacagctgccgtaataaagtaccacaaactggatgactgaaacaaaagaaattgattgtgtcccgcttgtggaagctagaagtccaaaatcaaggtattggctaaaccatactccttctggagatgccagggaaggatctgtgccaggcctctctcctaacttctttttttcttttgtttgtttgtttgttttttgagacagagtttcgctcttgttgcccaggctggagtgcagtggcacgatctcggctcactgcaacctccgcctcccgggttcaagcaattctcctgcctcagcctcccgaatagctgagattacaggagcctgccatcacacctggctaatttttgtacttttggtagagacagggtttcatcatgttggccaggctggtctcgaactcctgacctcatgcaatccacctgcctcgacctcccaaagtttgggattacaggtgtgaaccaccgtacctggcctttctcctaacttctgatagttctttggcttgtggcagcatgactccaagtcttcacaaggcattcttcgtgtgtgtgtgtgtgtgtgtgtgcgtgtgtgtgtctgtccccaaatttcccctttatataagaacattggttataatggattcgtggacatttctactccagtatgacctcatcttaaccagttatgtcttcaacagccttatttccaaataaggtcacattctgaggtgctggggcttagtacttcaacatataaattttaggggtgggacacaattaaatccataaygctctgtaaggagcaaagtgtctggcacataggtgattgatttatacattcattgttcattgattgaatatctgagtgcttgagtcaggcactgttctagatactgagaataaggggatgaccaaaataaacagacttcctgatcttcagaagcttttattttaatggcagagatagatattaaacaaaaaatattatctggagagttctgcaggtggccgattctggggtccccaccgctacctgctgaattgaagggatccgggcttgctatctattttttatacaaagctctaaggttaattctgctacacactcagggttaagcatcgctgtcctaatgcactggcactatttctgtagtgatcaactatttcgttagatgcgcatcagggaaagtggatgggcaatgtacttcggttcccagcacagtgtcttgaccatcgcatggcaaaacggtcgcagatgcgcctcttcctcatggtagtcatgcagggttctgtcccatggtgcgctctgctctcattcgtggagggtgtgtcatcttacccacactctcctcggatctctgaatgtcattaagaaatgctgagagatctgggtcagcttggagaagcaggaaagagagaattagctgctagtgccagtgctgaaaatagaacttgagctgaggtttatcttctcgtctcctaagaaccactagaatggagaaattaaagacaataatgaggcttcctattctagcatcttcctagtgcacttttatgtaaagtgaggaattctttgcgatgtcagtcacccctcctcccccaaatgttctgtgtatgcatttaggtggtggtttatactaggttgtctgtgttactttagatatttcatggtatccattagcaacctatattagaatatatggtcaaattctttaagtcaaagaggagggcccagctcgaggtattgttccttctcactctgtcctttgtagggataaaaagcagctttccgcagctgtggaaatagtatccctttacgtaaaataagaaccctttccacatgcataatattgtagttttacatactggatttctcatctatatgactgtcactcttmtttggtctctttttgagctctccagattctttctgaattgagtaaatacgtcccacttcttttacataaattttacaaatgcgttttttattccagttggtttctgttcctctgatctgtctgctggttttctcatattgtagatcccaatcgtcttctcacttttcctgatattagacacattgagttgtgtgctcacctgtcaagaattgactttgtctctagctcctgcattctgaaatatgtctggtactggaggaccgcgttccatctttggccataactggactaagattgtacctataacmcatgcctagctaactcttgtgctcccatgtgactaayygggtctcaagaatttggacagacaaacagggtgtaarctgttggtctggaccaggagaggctgactcagggcaatggtaccactttggcaggcatccttgttcccatgtcgactggagaggcaggcacccttgggcaaaagaatttatcagctggtagaaaagagagaatgctgcaaaccccagataaagcacaagtgagaaacccttaggcttctgactgagggccatggtggggcacagggagagaagagagaaggagaaagaaggagagaggagataaacagtgatggagaaaaaatatggagacagtgagggaggggtaagggggagatagatggaagagacagagataaatatggagagataactgtcgtaatttccagtgggtttccagttcctgcaagaatcagaatactttgttcctctactagttccattgtttatgtgtttatgttaaactgtcctttttccttgggccagttcgagtgagtttttcttttctttttttttttttttttttaactcctgaaagactgtggactgaatcacactaggagctgttacatcttgagaatcattttattatcctcccccgtctttttcactaaggaattgtttctcatttattaagcaattagctgcaggggatggtgagaagaacctgagcattaacacatcaacacacctgggttctaatgctggccctgccacttgtgagctggctggccctgtgcaaatggtcgaaggtctctgagccgtcgatttttttcttctgtagaatgaggataaatgatatttgctttacaacatagggttttatgaaaagtaaaacttttggaaacattttaattttccttcttttgtgatattgaagctctatcttattgctttgaagaatctgagaggtcttcttcttgacctttaaggacaggttgccaaattctggcctgcaggttaaatcttgctctctacatgtgtctgtaaatatacttctactgaaacagaaccatgtctctatctctggtggccactttcaagctacagtggcaccactgagtattttggcccacaaagtctaaaatatttagtatttagacctttgtaggaaaagtttgccaacccctgttcaaggatcttacagtcttgatgagaattaatacaatgttcttctaatatacatgttgtttattattgttgattttcttattttttttttttgttggtggtgtttttcttttcctgtacctgctgatggcagatattgtagatttagctttttattttattgtatagttttcttggtctttgatatgtattttggcttttcacttagaagtctggtatattttatgtcatcctcagttatctatcactattgttataaaatgcttttaaccagccagctttttttttttttttttttttttttttttttgccattgaatctgtaacatatgatgtgtaggtttaacctgctggacgtattctctgatgtgcaaataatttgatgtggttggtgacagctctcagaggattctcccacctgctgctgactggcttctcattgtccagtttcatctccagaatttggtctctttagggtaaactcaagctgtgacctaagtctctgcagccggtatagtgagcagtgaatctgcataagccactttttgatgttttgtgcaaaaatatcttttgttactaaaatatcactctacaacttgtactgctagtgcttttaatgcataaaaacatagaactctctttggaaccagaatttaaatragtacttaaaaaaaaaaaagaaaacctccaggctttataagaggtatggtttggtgaaaatgtcgtggattttggagacagatttttgttcacacctgaggccctttcacttaccagctgaatgaccttgggccaattatttaactttccaattatttaacttgtcttacttttaatatgctgtcctctaaattggagtgaacaccaattgtagaggctgttgaagggattaactgagaagatacctataaagcagtttgggtcataaacgccttttgtgaggggagtggttattggagagttatttagagacaattcctttggcaggtgactcaaaattgtggtaccaggtataatagaacttccttgaaccagaagtcttcagagagaaccaatttgccrttgtcattaggtcaggcagctcatcgctggatctccttgttcaccctgtttcacccacactggccttcgttttgtcttattttgttgttttttgtttcccaagtacatcaacctctttcctaccccacggcttttatacctgtccaatcagagatatgtgctgctctgccacagtctatgccctacttcccagttattctcttcttattcattccctcttgttcttcagttcttggatcaaatctcactttctcaggcatgcctttcctgaaccagtcttggtcaggttctgctcttgtgttcttttttttttttttttttttttttttgatggagtttcgctcttgttgcccaggctggagggcagtggcgcaatcttggctcaccgcaacctctgcctcccgggttcaagcgattctgctgccttagcctcctgagtagctggaattacaggcatgcgccaccatgcccagctaattttttgtatttttgatagaggcgggatttcgccatgttggtcaggatgatctcgaacattcgacctcaggtgatccacctgcctcgggctcccaaagtgctgggactacaggcatgagtcaccgcgcctggcctcttgtgttcatttttaagcaaacaaactttttttttttctgagcccctactatatgctggatgttgcagatagaatggaaatttaaaacatacactccctctcctcatttgaaacttctgcactcagcagaagagagaggtattgcragcatgcaagcatacagatagattgtgrtatcactgcaattgagctccacagaggagaaagccatgctgccaagacagctcatgaagtcaacaaattggrcgtgttggggatttcaggggagactttcctgaggttgaggaccatgggcctttatctgaaggaccaatgggagtgygtagacagagatcctggaagagtgatccatgcattgggaatggcwtgcaaaggcctggcagtgggagagatggatgagacagtttgccatacctggggcactgagagtgggagtgccatgctgggaagtcactgtcggctgagcatgcacggccttgagtcatgcaaaagagtttcgccttagtcttttgagaaactaaagctgcatggagggctgacaagatcagattggcattttgaacagctccygctgtgcagagaatagattgggaggcaagagtggattccagttaaggacatgatagtaggtgaaataagccagtaataaacaagtaaagactatatgattctatttatgtgaggttcctagagttgtcaaagtcagagcaacagaaagtggaatggtgkccaccaggggcttgggggagggaagaatgggaagttggctgggtgtggtggctcacacctataatcccagcactttgggaggccgaggcaggtagatcacatgaggtcaggagctcgagaccagtatggccaacatggcgaaacccgtctctactaaaaataaaaaaaattagcggggtgcagtggctcacacctgtaatcccagcactttgggaggctgaggcaggtggatcacatgaggtcgggagttcaagaccagcctggccaacatggcaaaaccccatctctactaaaaatacacaacacacaaaattagctgggcgtggtcgtgtaacccaggcatcacatgaggtcaggagttcaagaccagcctggccaacatggcgaaaccccgtatctactaaaaatacacccacaacacacaaaattagctgggcgtggtcgtgtaacccaggaggctgaggcaggagagtcctagaacccaggaagcagaggctgcagtgagccgagattgcgccactgcactccagcctgggcgacagagcaagactctgtctcaaaataaaaataaaaataaaaaagaatggggagttttttcatgggtctggagtttgtgttttacaagatgaaaaagttctggagatggatagtgatgatggctgcacagcagtgtaaatgtgcttcatgctactgagctgtacacttcaaatggtaaagatggtcaactttatgttacgtatattttaccacgattaataatttttttgacaagaatggatgcaaggggatcagctggcaagctgttgcagctgtcagacagagagacctgctgagagtttgggatgtggagttgtgggtggagatggatctgagaggtgagaggggatgaattagctgtggtgcagttggcagcatggaagagtactgcttcaagggaggttgtgggtcaggcttattcaactggtggggccatttaccaacacagagaattttttttgagacagaattttcactcttgttgtctaggctggagtgcagtggcatgatctctgctccctgcaacctccgtctctcaggttcaagcaattctcctgcttcagactcccgagtagmtgggattacaggcgcccgccaccatgcctggctaatttttttgtatttttagtagagacggggtttcaccatgttggccaggctgggctcaaactcctgacctcgtgatctgcctgcctcagcctcccaaagtgctgggattacaagtgtgagccactacacccgaccaacacaaagcatcttgataacaatctctcagagcaccctgtacttaccgcagtgtaactaaataattatttgggcaatcgattgtcctcctgatgagctgtaaagaacacacaggtagagaccatatctgccttcttcaccaactgtcttcagcacctggcatattgtcttgcacataataggtgccgtatagatatttatgaaatgcagatgatttggggtattttaaatctacttctctaccaactcctttggttcttaagcttatttctagcattgagtttttacatgtcagcaatgagaacagactgagagacacaggaccaggcagaaagagatcaaaatattactttttgttccaacagtttagagaatgtgtctcaaccagatagacttacttccycacccaaaytggtcaggagcatagcaaacagtatcaagtcctctcctaggaacacatggcacatactgtctacaggcagacagaccctggaagaacaggagagcagggctggctgagcatggaaccaggaaagtctttctcacagacttggcaatcagatgtcactcctcttccctaggaaggaagtgggggcaagaggttaggcttgttgctctgctagagctcactcttcattgaaacctcaggaatgaggtggaagggttaatagatgggatagcttttcttgctgcaattttcggtttttctgagggaggtgttgtgagtggccaaagtctctggtcctctgaccattttctgtctagtataagaaagagcgtgagagacacgtgggtacctgtctcctcttctgtgcttatctgggacaggctttataacatctctcttcgtaggtcttcttctttctaaaacccaggggtgtacatgatgatttttttattacctaatatgtagctgtttcctaacttttggaactgcctgataaattggctgatagagcaagtgtagcttaagattgataagtattttttatgtgtggtaagaaatgtctcctaaacataacatttgaaaggtaaaacatcttcatgtaaaatgttttaggagatgaattgtcagtattctttattgtcaagtatatcacacatacagacaagaatggccaccattcttaatccatttatgctggaggttgcaattttttgaatttttgcaatcagaccttggcgatgaccttgaacggtaggatatcaataactcccacatgcttagtgttccaataatggaacactaggcatagatgggttgaaaatcttaaacgatgcttaagagaaaggacaacataactttgattctgcatgctgaacatattgcatcatgaagttaagcatttcagatttcaccatatagctctttctcttcatagccaaatgttgtgttagggattagagaatgaacggttctagctctatctagcataagctttggtaataatatggaaccaggaaaggagacattaacagcttgagggtttgaggcaggactcaactttgctgtagattgactaattgtagagtatgaaacacacatacgtgaatgctaggtaataacttttcttcgtaaagcattttacactttacgtatagtatttactttggttcagtgtttaggtgtaattgcaggccattctctagacatctcatgatggctttcatctcactcagtatggactcagcagtgtggtatctgcatgatagatggtgaaatgtagccattctgggaactggggaaatccagtaaaactcaggtggtggtgtacttcctgcagcagggaggtttagaggacaactcttttttagctccccctggcctcaggataaagttccaagttttttggtgtgcctagaaggccctctggaatctgatccacttgtctttccagcattttctttcactggtccccacttcraccagggcttgagtcctatcacagtattttatgttcactggaagctctactccctctgatctccaaccataggatctcacattttctcattttttggtgcctttggcatctcagtaattttttcacagcacccgtaggtaaaatgaaatacctattttgttattaagcatttatgtcctaacaacttagtagctgtctgaaaaaaagratacatataaattgaagggaaaaataccattatttcactcttatccacatttatttgcttatgggatgtatggacctgttgggcactgtacaatttttcaaactctggaattagattggacaggcgttgcacactgatttccatgcagttattgttttttatcatagcaagttctgaaaattcagctgtgtttaaatacagccaccaaaggaattagtgcattctaatgttgaaactgtgaactacctcgagctaatagttgaggctgtgtccagcatgtgctgagaattgctgcacttctctagaagttttaaagtatcctgcggtgcccccgtgggtccactttggcaccctggggcaccttggcacacagtttgggaaccatggttctaagatgttgtatatgccgtttcctctgcttgaacatgtctctcaatctagcgtcttggtgctcacctttcyaatctcaacatgtacgtgatgagtcctcgaagtttttcccttaatctttaagactgagctgggaggtgcttccaaatgctacttcagcactctgtccttcaccctgctatttttctctttgcagtgtgattttatcttttttcttctactaggctttatagtgattgatagggaaagggactctgtagtgacactgcagatatttcataaatgtatgaatttaatgagtgaatgaatgagtgaataactgctattggatcttaaccagaatgagcttgttggctggagaaaatcaaataaacaaacaggttgacaagtacagggctcctttcatttgtaggagaagagtttttgtaaaatcctgaccttggggacttgcagtgtctcttgcatcctgcgacctcacatcctctttggttacacacaacggcactccctagttatagcaaaaggcctcatgaattataataccaacaacagtgcaggtcaatgtgagccttttgcatttattcatgttgtgagacattgacccatatgcatgtctctgttgagaaattgtaggtataacttgcttcaaatgtatgtgttctttcctttagagggaaatatattaagttgcctgatggctcagactcctggcatattgcagcattacagaaaatacagatgtgctgcagtaatttaatctagaggtgatggaggcttggggactctggcgcagctccagtcacagggagcagatcttgggctttatcccacagcaggtgggaaaggtctccccaggcctcagctagcaggtatttctgtttctggaactaatagaacatcaggaaccttctgataacaatgagtatcaaggaagagggatgtgcatttcctcctccagaccaaaagaactcaggtggcttttctgagctctgtggacattgttttgctttagttttgccttatccctataataggaggatactaatgttataatctaccagagatggctgtttttattactaaattgaagagcatggtgcatgaatgttggccaataataacagtaatagtaatctcagtgaagtcctgtgcatctccacttaaggagaacatcatgtcctattcccttaagatttcctgttttccctaggcctttcccataggcttaaaaatgcattttcaaaacagccctgaaagatagatggaaagctatgttcccagttaattgaagctgagggatataaaattacttccccaaagtcaacatcgctagtaactcttctgagtcctcctttgtaatggctcagttgctgcaaagcaaggggagccttttctccactctgctgccactctatgggcctgggagatgccagtaacgtagcctgaggtgttaagactcaaggttggctgaaatgtttcatgcagaaggacagaggtctgctgaagggtccttgtgagtgctgcaaattaaccctctcttgcccttccattattgcgagggaggatctgtttctatccatctttttacgccattacatacttacactacttccaaagttagaaaggtgagaagaagcagctaaatgtatactaaaagcaggttcagggaatgggaaataacaaagaggaaaggatttgattatctctggggtcctgctttcaaccttcctgtagatcttaggcaagtgcctgtgagtctctgggtctcacctgccttatgtagagtgggcacaatcactctctcttccgtacctgcatcaatggacatgagtgatcaatgcactagcacagcctcagatgctccaaaatctgtctccaagttccgccgatctaaaggagtattatttttctcagaagcatatgggagtttatttcagagaagcacccatactttacagggaaagtgacttaaccgatataataaggtaaataataagttgtcaagcccttatctcatacttagctggagcagctaaatgcctctagtgcttcatctcatttattcgacagtatcacaaggtaagtgctcagtggaagatccttaactcatctccactgaagaacacatccaataagcaaggattcctccattccctctggtaaaggagtgttcactgcccactgaatgtggagtctccagctaccagcttactttctagtactgtttagcattgctgattgcaccagttaaactgtgtgctcagtttcatcaagcttattatagcatatctttacctataattaacaaatacagtttaattaattattccataaagcagtgaaatatgagtgcaggaaggaatgtttctataaaaaataataagttgtgtattttggaacagtagcctaaaagcaaattgccttaagaagagctgtcaaataagatgttggcaagacaactgaaaaatggcggaaaagataaaaataggaaaggaattctgtactctgattagtttacacatatcttttaagtttaccccacactatgaaagaaaaagaaaagataaaagtgtgtggcgatgtctgtgatttatgccaggaaggcaaggtaggattttcagacagcgggcatgtccttatagaaaaggcctttgccccataaccaaaaattgtccaataaatgcatgtttgtatgtgataaactaaagtgttcctagtttatacatgccttaatggtgctggtaagagcatgcctgtttttacccccatttaacagatgacagtgaggaccaggggatcacgatcttaaccaatgatgaagagacccagagttaataatttatattatgtttttaatcctgttgtctgcttctgtctttcgaatgttttaagtatacttttaggcaccttttcttggccccagtggctttctcattacaatcaggctgtagtgcctacagctgacactggtatttagaaggctctgatgttttcaagccaggctaaggccagtgttcctggcttttctcctgggagtaatggcttttctgttaaggcatcctttcctgtaggaggaggagctcagtgactttcctcacagactgagataaacgtcatgatagagataagccatcagatacttagaatttgatgctgtttgcatttccttctggcttgttgtttggggctgacgcttcttagtccacaggtgcaaagatggaaaaaaagtgtcaggaatatgtgagaaggatggaagccttctttctggagaaactcatataactctcccatcatccagcaaaacaacccaggtgtgtgtatatgcgagggtgtgtgcacgtgggtgcatgcaccgggctgagtaattataacccttatagaggcttattgtggtggaatgcagccttctgggatctggagagagagaggtctcctatgtgagctctggattttgacaaatggcatattttgggatgtggggtttatttctgctgaatatctggcttgattagcgtggagaagcacatgcaaagcagactgaagccccacccacccaagcctccccagtgctgtacaatcaggaagtgcattctcactcccattgtggctttggagggaagtgtgctttacatatgcaaatgcaagccccaagtttcacttaataattatcagctggagattctattgatgagcagctgaagctactcatcagtagagaaactgtgaattaaccatttctaggccatcctggagactgctgcctcagaccagcctctgaatccactggcggttgcagaaaaagatttctgattcctcctgtgtgtcacttctcctgtctgacctgagcctggcagctgagacctcctgaccccttttattatcatgtgtgcatctcttccctgctcccacctcctttctgttttgtaggctacagaaggcagaataggtgcrtctctattggcagtagcaggattgcttacagctctagaaataatggcctcatgcactctctgcggtagctctcctgcttaggcagctgccagtgtccttttgaaagggcacaggacaacccaggcagggtagccagggtgttcagattaagatgtcaggaaattgccttctttctgattcttctttcctttcttctgcatccatgcttgccctctgagtgtaataatagtatacttgggctgctttatcagcctcgcttgttcttgctgtgccttggtagagttcagcagactgttaaaaatggtatgatttggattctcttgttattcatctttctgcaccaagttccttactttcctgaatcttgttgaaacaaggctgctgcttctctttcctgcaagtggcatcttgcaagagggtatccccagcttgttgtatagaagtacaacctttatttcctggaaagagatatttagatgcagaaagtaaaatgaaaatcgaggttttttttggagtcaatttgatctttttttttttaacttctttttgcagtaaatcttgcaagttacttaaactttacttaagcccagtgagcctctgtttctgctttttttttcttttttcttgagacggggtcttgctctgttgcccaggctggggtgcagtggcacgatctcggctcactrcaagctccgcctcctgggttcacaccattctcctgcctcagcctcctgagtagctgggactacaggcgcccaccaccatgcccggctaagtttttgtatttttagtagagatgagatttcgccgtgttagccaggatggtctccatctcctgacytcatgatccgcctgcctcagcctcccaaagtgctggaattacaggtatgagccaccgcgcgcagccctgtttctgcttctttaaaatggggacaataaacccgtttcagagaactgaaatcactatataagataatgtatgacattcatcccgccaaagtggctggtcagtaagggagccctaatcttgatcctcatttgaaatccgattctcatcactgaactgttgcaaaagttgcttgtattcacctgcgttcttgatttagtatcaagatgtgtcttttgagtgcttactgtgtgcttggttccagaccctggagatactgttgttgaaacagatccacagaagactctgctaccattgaacttgtgttcatgaggtggagacaggcaaataaaaaggaaacagatamgtttatacttgaggagagtgttgtgatttgtggagtggagaagaataaaccaggggacagagtgaaagaaacactgtggcctcaggatgggcagrgatggggttttaaaggttggcttacagatgctgctctgaagaatggtattatatttaagcagattcctaatgaacgagggaagaggcaacagcaagtgtagargccctgagtgggagagtgcttgctatgtatcccaggagcatatgccaggccggcatggctggtgcccagggagcagaggagcattttgaggtcggaaagataactgtggttgatgggaaggcaggttcaaagccctgggttcgaacaggatagacatgtggtctgataaccagtttttttgttgttgttgctgttgttgttgtttttttaagatggagtctcgctctgtcaccgggctggagtgcagtggygcagtcttggctcaccctccgcctcttgggttcaagcgtttcttctgccgcagcctcccgagtagctgagactataggcatgtgccaccatacctagctaatttctgtattttagtagagacggggtttcaccatgttggccaggatggtcttgatctcttgaccttgtgatccgcccacactggcctcccaaagtgctgggatcacaggcatgagccactgtgcccggccctgatagccatttttaaaggccatctggctgtgagtgacaagtagaatgagtgaggcagagtggcctgttaggtggctattgagtgagtccaggtaaaaggtcccagaactggggtcatagtggtgggggttgtggggaagtgtttgtatccagggtatattttaagatcaaaccaacattgcaatacattgctaatgacatacatgtgggacatgagggaagaaattcaggagtgagtcctagatttttggcctgtgcagtggggarcaaaagtgatgacatttgctgagaaaagaagcagaaggttttggaggtggaaatccaaggctgtggtttggatgtggggacatgaaaggactcctaagtcatcatctccttccacagtgttgtggctgtgtaggaatggccacggtgtatacacgttgtgccaggcactgggaagcacaggtgattcagcctggctcctgccctgaacaggtgttcagttgacgtgttgagacaatggaggtggcataaagagctgttacacatggggtgagagccactaccttatctacgttgtggaaggtagtaggaaatccaaggatggtgaaagaagagaaggagccaactcaccctgggcagattggagaagggttcctagaagaaattattgagccaggtgttggagggtccatggtaattcaccaaatgacaaaacatgcaaaggaaataatacaacatttttaatgcttattccaactgccagccctgcattcaggaacttggcacagggcttgtatatgtaggggctcctgaaatccttgttggtgaagatcgttggtccactgaggactcttcagagccaaaasatggaagtataaagtrcagtagatttcaccagcaatttcagaaagtttagcaaggcttgaaccaggatatcctcttggccaatcagccgcgtcatccccatcctgacactgtctctgagatcagtccctcaggtgggcctctgtcctgcaaggggcttttctttttggggtcagaaattgggatcctgtactggaggcttcaccatcataggcttccccttggtcctctgcrcctgttacttcctgcactcaagcgcatcattcctctcagcttgcagaggaaaatcctgactttgccttatagtggtattgagttgagggttcttagttttattcttcttacttttataagactgctggaagcaccttataaaaactctccggtgtaggacttggaagaaaatacccgtccgtcaaaagtagagatggcgggttttgaccttaataagtattaacacaagattttacccaaacatctatcttgctcttggtaacatgttatctttgccaagygcccatcccaataaagcgttatttctgtcaagctgaactcctgatgaaatcttctattcccctctctccctgatcggtttcgataaaacctcattcctcattctgattttctcctaagggatggtttggatttgtcaggaaagggtgaaaaaagaggtgattttktttttcattttcctcctcttatttctttttctaatatagatacttgttggaattggaatataactttaatgtaagtcaaactgataaagggtggttggacactactgtgaagaaggaaaagaagataggaaaaaggaggacagtcacttayaggcaaaggaatgtccagccaggcttttgcttgttttctcttgtttttaatttacaatggagctgaggaagataacastgatttaggtgaagtggcattttacagcagggggatgccattgaaggaatcaatgacattcacaaaagtacttgcttccatttttttttttggaatgggttagaatattctggatggcagctactcatgccgttggatggctatgttgccactgctaactttaacaagtacagagtcccccttatctttgataactagctctttctattcctctttttaccagccccatcatttctgtctctcatctggttccactatcgaagagtgaacactgcaggccagagttggacacttctggtgaagtgtggcttgcatagcaggtggtctccatagaaggctaggcaaggggtggggagtttggatgaagggcggtgatttgtctcaaagccagttgactgtagaggagatggggtatgtcagagggccccgagaatatggtgcaagtcaagtccatcctcactgatgctggggctcctgaaaagatggggcagggcctttcctcccatgttgatcttgcttacatgcagtataagggaagagaacttttgctcaggtttggcaggtgcaccatttcargggcagtggtcagataggcaaactgaccattctacctgacgcatagcctaaagaacactctctggaccaggcttatccaacctgtggacagctttgaatgtggcccaacacaaatttggccactttgaaaacactatgagattcttttccttttttttttttttttttttttttggctcctaagctgtccttagtgttagtgttttttatgtgtggcccaagacaattcttcttccagtgtggcccagggaagccaaaagattggacacccctgctctagatttttagtcatgtttcacattcagttttcttcttacagtcccaagacattcatggaacaactgtcttccaaatacagagaaggatatcaaagtctgagtgggttatctggtagtccccctccctcccgaggacagcagaacaccatagttcaattctgatgcagtccaattaaagacacactcatgatgtacggtcatcattctgttggatcctttttgatgagagtccctaactcttctctgtagatctgaatttcacttggatatttctcctctcaagtgaagcaggaggggcacagaagcccaaggagcaggaatgaatggggtcagggctttgctgatttgtctggcatcctcaaatagctgctgtttgccattgaaatctttcatcctctgtaacccaaaccagacattattgtcagtgctcctcatttaaaaaaaaaaaatcacagaaatgccaggtgcggaagctcacatctgtaatcccagcactttgggaggctgaggcagatggatcacttgaggtcaggagttcgaggaacaggctggccaacatggtgaaaccccgtctctactaaaaatgcaaaaattagccaagcatggtggcgcgcctgtaatcccagctacttgggaggctgaggcaagggaatcgcttgaacctgggaggtggaggtcgcagtgagccaagactgagcccctgtactccagcctgggcaacagagcgagaccctggctcaaaaaaaaaaaaaaaatcatagaaccttttttggtaataaatatggccaaccagaatgacagtttgaggcttacagcaagtatagattcacaaagtgagaaaaggatagttttcaacatactcagtatgatgaatgcaaaataaaattgaaaatctttgctaaaaaatcatcccatgtgggtcttctgatttgaacaagattttagctacaaaaaaaaaaatcaaacctcattaaaaatttttactgtaaaatatgattcttagcacgtgtgattcgcctcactcttggaacattttagtgggattttataagggctatgaatatttcatatcaaataacacatttattgcaaaggttttaaaaaattaaatcagtggaaaaaacacttatgaaatctttcatcttgagtgctgctaaagagaaaattaagaaattctatagtatttctgcatttgattttatagtaaatagccacattgaggacactcagttgatgctttgcaaaggataaaatcgttatggttgtttagcttttagttttgatgaatctaccaacaaaggggattgtgtccaactattgcatatgtatgaaataggactcaagaaactggggaaggagaaaggatgctttctcagactcaaccattggagaccgtcactaacgctggtgatgycttcaaggctgtgtaaaagtgattgaagtttaggggctaactgggggcagaggctcttcaaagatgactggaatgtgaatttattgtgctctcacacacagatcaattgtcaggatttgcggtgaatatctattcaccttttctagtatacactgttatcattaccctccaatgacggttttctaaaccacctggtgatctaagagaagaccttcactctgctgtcaagtccttccatttttctaggaaacagagcactaaatacattatcttttttggccttggttggtgacgatttgaatgctactaacaaagcccttttgtccatactcagactccttgagtatatgacgggccagttatagaagcaggaagacatggttgccccaccatggtaacagcagttcaaagaccaactgcctccaactttcaaaacttagcatatttggcaaaaaaaaaaaaaaaamacacacacacacacacacaacaaaacatttgaagctttgaaatcattgaacctgaagtttcaaaagacaaaaactggtatcattgctcgttagaacacacttcaagcatttgtagtctaaacccaggtataggtacagcaaattggtgctaaaaatgtcttcattttcttgacttaatgaagctctttaagctaacgttcttggaaatgattttatggaagacaaaagtcagatctcattcagcctattatggtgcagtgaatccaggcctctttccctggcactgtagttgcaaattctttttagaagctagtgaggaactctcctttttttttttttttttttttaactgttcttccatctttgtcagaagatctgtctccagggcctttgctggaactcaagtgtgctttggttgccaaagataacttccagaaaatcacttaggggaattttggggcaaaacattccctgtgtacctcataaaaagcgagcagcctttgtgtgtcatcattgccattttccttcccacagcaaatctgattccatgcttttgaaacttaagaaaatggctcagcctggacctgtgtcttgctgtgacttataaactgcctagaaaagaaaagctgatgacacgttggcagactcagctctcctgtggacatctcatgatcaaaattaacttttaagatcaaactgagttttctaaatttttctaaaatgactttggctgcaatatttaatttactttgaaatatcaaatgatattagatatttggcattgaatgagggtgtgaaatctttatgttaattaaaaggagggcattttctaacaaaaattacaaattgctaaatgaatatagtctcatatggagaatgaaaaattgaaacatatattggaataaggtgacctgtgattggtcaagagaaaggaaccagaaaccggagaagctggatagtcaggcagctgggctagaagggaactgcttttgaaggagactgtcttccaggaagcagggcgatgccgaggagcaaagcaggccctatgcttggaggagctacaataccaggaaatcatgtgggtctgggtcacatgatggaagctgctgagagaatacagtagaggcttgtgtaagggaaatggagtgcagggtcagagcaatactataattaagtgtggcaatgctaagacttcctttgaatctagagagtctggggaaatgcctcagccagcatttctcaaccttcattacacatgagaatcccatgggagtggctgtttttaaaaatgctgaaaacccaaaggaatataaatcattctgttacaaagatacatgcacacatatgtttattgcagcactattcccaatagcaaagactggaatcaacccagatgcccatcagtgatagattcaataaagaaaatatggtacatatacaccatggaatactatgcagccataaaaaggaatgagacaatgtcctttgcatgaacatggatgaagctggaagccattatcctcagcagagtaacacaggaaaagaaaaccaaaaatcgcatgttctcactcataagtggaagctgaacaatgagcacatggacacaagtaggggaacaacacacactggggcytgttggggagttggcaggggagggagagcatcagtaagagtagctaatggatgctgggcttaatagctaagtgatgggttgatctgtgcagcaaaccactgtggcacatgtttaccatgtaacaaacctgcatgtcctgcacatgtatcccggaccgtaaaattaaattaaaatttttttttaaatgctgataactagacccccacctccagagatgctatatgaattcatctaggttgggacctgtgcacattcatattgtttcctaagttttttaatggaagcccagattgaggaccactggcctgagggaccagggaatgaagcagaaacaacaaccgcaaccacaaattaggctggacttgttcggagggtgttgaataggagacattccggttcggtgcggaaagagccatttatctggagccagtgaacctgggttcaagactctccctctgccattgttgctgggatgacatggaactagttaaatcatgtgcctgtttctcttttttttttttcattagtcaaatggaaatagtgagaatacccacttcatgacagcgttgcataaattaaaatgagacgatgcagacacagcacccaaggacatgtactcagggggaactgaccaagtgtttgttgaatttgatggatgaccttgaagtagatagagttgtttttgtgcattatcagactgcaaacgtggtggaaataggattgaagaatgttatccgtggcacctgcgagtgagctgacaggaacagggagaaatcagaggcagggggactagcccaggagacccacacaatgttctaggacaggatccataatctatggccaaaaagtatgcctgatctggccctctgcttgtgtttggaaataaaatttgactggaacacagccacagccatttgttatgtatttctatggccgcttttatgctacaatggcagtcaagtgcttgaagcagagatagcatagcctgcgaagtaaagcacrttgactctctggatgtttacagaaaaagtttgatgacccctgttttaggataagattaagaggcttggcttcggatgagatgtttgaaatcaaatgggaagagcaagtgcttcaaacatcaggaagaaagaattggcaggctttagtgacagattgtacgtagggagattttgccatataaaggttagggatgtagtgtctttatcacgggcaggatgatgcaaccggacagctttcctgaaatctggcactaagtgcaagagtttgctttcctagactagagagatctgggtctgtcacccctgaaagggtctgagcccccttcatgggaggcccatccagaccctggccctgcctgcattaatgagtcccagtcctattcatttcaaagtggtggatcccacatgcagtaccagatgccagcactctggagagatccagagatactcagcacattcagattgattgagatcatcacttaggacattttggatggtaagtccctaatctctgtcactgcactgcacggaggttgattttcaatttaccttctttgttctgaatcttagatgttttgattcttaattcagaacattcatctcaagtggattcagagattcagagtcgatgataaattcatgtttgttgagaagttttgcagggaggaggatgatgttgtcagcttagtttttgaataatgtcttgtttgacattttaagctgaaagtgggctgaaccgcagatcaacacacacacgtattgcatgatagaacgatacatcatgttcatacatagactgtgtatatctaaagagtagaaacctggaaggaaaggtaatagagaaacaaaggtaaaggcacttacacgcaggggattctatccacttctgcctttatgtgccctgcctgcagctttagtgggcttgggctgggagaacagcagagaatttgagtattgatacggtttggctgtgtccccacccaaatctcatcttgaattgtagcccccataattcccatgtgttgtgggagggatgcagtgggagataattgaatcatgggggcggttccctcatactgttctcatggtagtgaataagtctcacaagatccaatggttttataagggaaacccctttcgcttcactctcattctctttttgcctgccaccatgtaagatgtgcctttgttcttccctcacctttcaccataattgtgaggcctcccaaaccatgaggaactgtgagtccattaaacctcttgtttgttataaattacccagtctcggctatgtctttatcagcagcgtgaaaattgactaatacaagtatctactctgtgtaagcctgatatgaagtaatatttgtgtgtgtacacacacacacacacacacacacactcatgcttatgctcccatgtccctcattttacataagacactgagtcacagaaaagttaagtattttgcctaagttatttattagtaagtggaagaaccataatttaagctcagctctttcttactccaaatcccatgctcttacttatctacttgatttgtttgcttttctcagttctctctccctcttccccagcatytaatattataatgagatgtctttttaaataactagtagtttatgatgtgctaggcattttatgcctttttttaacaaaaagttatagttgttagttcttctctttctctcttcctcaaatgcttgctaagtatagggagcatgccaggacctggggatggagactggagattgggcggtgccactcaaggtgtgatctgcaggccgttgttcgtccttctatttgtcagggctctttagagaagcagaaccaatagagtgtgcatatacagctatgtttattgtaaggaattggcttgcatgattatggaagctgacaagttccaagatcttcaggttgagtcagcaagctggagacccaggagagccgatgtgtagttctagtctgagtccgaaagcctgagaaccaggagatctcatggtgtagttccagtccaaattccaacaggctcgagacccaggaagatctggtgattcagtttgagtttgaaggcaagaaaaagatgatgtcccaattcaatggctgtcaggcaagatgagttctcttgaatgtggaagatggtcagcatttttgttctactcatgccttcaactaatgggaggtagccaacccacaccaggggaggacacctgctttactctgtctaccaatttaaatgttaacctcatccaaaaacacctttaaaaaaaaacacccaaaatgatgtttgatcacatatttgggtaccacctggcccagttgagttgacacataaaattaaccatatcctcaaattgttgctgctctgcaacaagatacatatggaacttgagactaagcattttagaaacatctagagcaaatggactttgtggccagcatcaaktgtatgatcaatagtcttgattaacgtagtgtagaccagtttgtttaattccagtgatgagttacacgtgggccaagctctgttttacctttgagtgttaggggcaaatttttatccaggatggactgggggagggagaaaaactggttcttcacccaagctccttgtgcttccatgcctctcttgctgtcttcaccactggtagtttgagaaatatcagtgtgggcacagttgtttacatagccataaaatcgtatgtaatgggctgtataactacgacctatacacaaagcttgaggagcgttcctgggagggaccagtgcctgtaaaacgtaacagagaaacgtaaggaggctggctgttcactaccctgaccctctctcctgcttgtgctcccagagagtcaggagaagcctgarcaaagagatcaggagccagaaaaaggaatagtcaggaataaaagcaaaagtcaggatgaataaaacgagaatgagctgtgaatctggcaaggcagcagggcccactattcacttctgatcatgcggtgttgggatcatctggaccacacagctacggagagttagagctgagaggggactcggagcacatctccagggccccgcctttcaraaggcaaaactggcttgaggaaaaggaaggggccggctcaagataatggacctttaaaacaaacmaacaaaccggaaaggacaattctgccattaattgagcacttcctccatgccagcagttgggcacagcatgaatgttgcttttttcaacattgattcctctgagacctgacattaattatttagttgtggcttcattggtgacaaatctatagggcttttaaaagtgggaaaacccccgcacgtctttgagagttaaatttggttaaaaccatttggggtctaaagcaggggagaaatggacacaggatgtcgatagcatttctcttaagcccacaatcaracaatcataatttacgtaaatgtttaaaatatgggactttcaggagaggggctagagaatgtgacccggcctctttggtgaagcctgcttgcttgctcctccatgttcttacggattaaccatgaccccggctaaggatgaaggcaggaagctcagcagtgcctcctcttggagtatatctcaaaggaagccaaggtctgttgactgcttgttcccccatacaacacasagaacaactctgtgttctgaaaatacagcgtgctttacaccttaaattacatcatcaactcatcttacccatgacatcaccttccctcactgagaaagggtcacaggaactcactgatgccaagcgcctcccaataagggacaccatgctctgtattttgktattttgcttaagcctcccatcactcttactggaacattttatgttcccatttcacagaagaaaaaatcgaagctcagagcactgatgtaactcctccaaagaggaaactcacaggtcccatttgttaattttctagagaccctgagaccctgttgagcttcctgcatttctgcccaaatgctccaaaatcctttcctgagaaggaagaccctctcagtctcctgagcgtctttacctctaacttagcacatatatgcaggagcatagctgagctcaaagtccaggagaccttgtttacagtcaaactgcaacataataggaacacagtttaaactttagtcttggtttctgcatcagtaatagggataactattactacttaattgtactgatagcaacctaaggcattatcagcatgaaccacctagcgtggtgcagatccatgatagacactacagaaggtgtaactcccgaggaagccagaggttcatctttacccacccctgctcaaagggtcratgttggttgagaaaacgcaattattaatagctgcctattctttttcattctcagttgtaccaaacagggagacaggtttcaaaagcttgggttgaagcttgtaattggccagtcggtgacaatgcaaccctaatcaacctgtgatttcaygtcccctaccrattctgcatcrgcctttsatttgtggtcccaggcagtgcaattcattgagtcatatttgttgcattgataggagaagaccaggcacttaggcgtttaaccctgaggtgattaagaggaaaaaaaatgagtcatatttgttaaggcccaaagatacatcaaaaagccctgggcagaggccgacacaagcacaagtgagacctgcagggtgtaattcatcacattctttgatcctcaagtttgtgagtcacagagactctctgggacagttttgaagctcaggggtctgggcaggaaggaaaaacttgaagtatggaaaaagaggaatgtttttttgacaggcagctgagagaggacgattttctagagatatgctttttttgcttggtaacccctgaggtggctgtaaatgtagctgggagcccaggatttctgcagagtggaaacagaaataagtgatagctttgggtatgccttgtgccactggggctcctgaacagtaagcatgccttgagcgcctactttatacaaggtgatataagtatccttgggagatggggtttttatactaataagtgtttgtttttttttaatgttagctctctgaatagcctataatgaaagtttattgaagtggagagtgtacaggcccagatatcagagagacctgggtgcgaattctgacatcaccattgtggtggcatcacattgagagacctgcttatcgtctctgtgcctcagttttttgtgttgtttttgtttttgttttttgttttgagacagagtcttgctctgtcgccaggctggaatgcagtggtgcaatctcggcttactgcaacccctgcctccagggttcaagcaattcccctgcctcaacctcacgagtagctgggactgtatacaggtgcgtgccaccatgcctggctaactttttgtattttagtagagacggggtttcactagcttggccaggatggtctcgatctcctgacctcgtgatttgcccrccttggcctcccaaaatgctgggattacaggcatgagccaccacacgcggccgtgcctcagtttttattgcagggttgtatgattgttacatggagtgttgctggcactcactttaatggttaactgtttttctgggaaaaccatgagatgggtcatgcttctacttcttttttccttgttgcttttaatattttattcttggcatggagccatgcatccastcttccagcatttctcagaccttgtgacatgttaaccacaaagacaggtaagacccgcctttgcctacattgaactcccagtcttcataggcaacatttagtaaagctgtttaccaaatacagtatggcagatacatgttttcatagcgctacatacaaattatttcggaatatgtggaaggatatcttgcctgcaaatggaagaaggtttcccctgagaggtgatgcttttaaaacaggattttgaaagatgtataggagtttgcataggaagagctcaataaacttagtcattattattatcttttttctttttttttttttttttttttgagacggagtctcactctggcccaggctggagtgcagtggtgcgatctcggctcactgcaagctccgcctcccgggttcttgccattatcctgcctcagcctcccaagtagctgggactacaggtgtgtgccaccaagcccggctaatttttttttttttttttgtatttttagtagagaccgggtttcaccggttagccaggataatctcaatctcctgacctcgtgatccgcccgtcttggcctcccaaagtgctgggatcacaggcgtgagccactgckcctggcctattattttttccttattactcrttctcttcctcttgctcccctccacttcctggtactccttctcccctcccttgtctttctccccaatccgcccactttgtattcataattctttattgttaagaagcctacttagaaacatgccaagtagggagaggaagacagtgcatttaattagaaacaattttattatgattgccttctctaaaaggcatattagcttttatcaccataataagttgttctsttctcaactttgttcccagttcaatctggatgcgtttatttgtaactcactttccatctgttttccttaaacatgggattgtgcaaggagcctcgccatgtagtaagggatgtctggggaacttggaggggcttgaggcatggttcatccagattaaagcttccctggtgtttcgctccccagatggaaarcccgtgtctctgtcaccgctggagtcccaggcacacagccccaggtacrcsgcctccagccagcgggagcgcgagagcctggaggtksscatgcgcgaggtggaggaggagaaccgcgccctccgcaggcagctcagcctggcccagggccgagccccatcccatcgccgaggcaaccactccaagacctactccatggaggagggcactggagacagcgagaaccttcgggctggcatcgtggcaggcaacagctccgagtgtgggcagcagccggtcgtggagaaatgcgaggtaaagggcatctggagcctggggaggaagttgtccaaagtcccgattgccctcaccccttgcaaatgcctcctggaaacacagccagatgccaagagctggcattcttgattctagcccgggtgtgtaagtctggcttgctcgctaactttgctcaatggtctgacaagtcatttagcctctctgagcttctgttttcccatctgaaaatggggataagaaggcgtaatctacagatattaagaggagctcactgatggaacctaccgcttgtttctatgtggttcattttgacatgcgcagggtttctacacctagctgtcatcctgtaggcccctgcttcttagactatagtgtgaatggtacacctggagttgtggcccagttgggcagttttcttagacctcattatcacttcactgtataaacagcctctccaattcagaaccacagacttgttccttatctaaagaagtaatttgaacttttatagcctaatatcacttctccccttttagggtatgctttctttcttagcagctctttggaaatgtgggatatttattgtcctctatttcctcaaatacctgcatccacgcttctatgtgcagtgaacacacatacactcattccccattgtttccagttctcatggtggagatgaattagggcatgcctattcataggaaggccttttgagagatgggcragactgaattcatatcccagctttagtgatttatgcagagagtacccttgatccagttgcataacttctgtgaactccaggtgtctcatcagtaaactttaggaaataatacctgcttcatggagtatttgtgagaattaaacagaatggccatataaaggcttgactagcgcctagtacatagtacattttcaaaattatggttagtttttactattcttagttaaacatagataggacctgctgtttctttattccattttctggaataaagagtggttagacttcaaactccctaaagagaatgctttgcaaactgtagtattctattctagtgaatgggattattagtaatattggtgatactatccaatgagactatccartgtcactaacaaatggcttcctcagtgatgtagactaagttctttggaagttcagtggtgagggaggaggacaaggagagcccctgaggataggagcatttctcaggtttctcaagcctggttgaaaagtggattggtggagaggtagagagcatccgacagaggatgtccaacgaggaatgtgtcatatgagtaggaacgatgtgaaacaaacatccattatagcaggattcgggatgtcacaagttggtccttcagccaagcccagagaacctgggcgaggaggtggttctactccatcatcatcattcatttatttatccattcgttcagcaaacatattgcactcgtgttttgtatctcattctgttttatgtgttgggaaacagcagtgaacaacagcaaaaaagacagaacccctttccctctggttcttacatctgtcatcagaggtagagggagagatgataaacaaataaataaatacaaatgtcaggacgtgataaatgctgcacatttattcagccctgactgtatgccaggcccagtgccctttagtctttgacaaccactgtcagtggcttctgttacttaatatctctatgtatgaaaacgggcattcagccacgttaacaaattcctttggtcttggctggtctggggagggccctaatttagggatcttctgttcttgccttggtgaaggcatatttgatttctttcaggttctctgctagcagatcacagccatggtgttggtttagaaagggttagtttggatgggaactctgctacccaggtgagatggcccaaaacgagcaaattttttctccaagcgtatttacactattatgacatagaacctaaagaacaaataagaatcgaggaggggaaaaataaaaaaggaaaaggggaaaagaaggcataaaaaagagaaaaagagttgtgtttgtggggacatttctcttccttctgtaatctctctagccaagagtttcactcccctgctcagtcttctgagaaataactcattgtaatttgggagtcccctgtacaattgtgtagaccaaagaccattggcttttgaagctgggagttgtgagtctaaatcctggccccatttctagtttaacagctatgtggctttgagcaagtaagatcacttttctgtggctgtttcctcatttgcaaactgtggattaaaatcaagttctgggcccgacacagtggctcatgcctgtaatcccagcactttgggagtccgaggtgggtggatcacagggtcaacagattgagaccatcccggccaacatggtgaaaccccgtctctactaaaaatagcaaaaatcagccggatgtggtggcgcgcatctgtagtcccagctacttgggaggctgaggcaggagaatcgtttaaacccaggaagtggagattgcagtgagccgagatggtgccactgcactccagcctgggtgacagtgcaaaactccgtctcaaaagaaaaaaaaaatcaagttcctgccttttactatttcagtggtgacaatggatattggaacttgagggaaattctaatgtagttagttgtatcagtcttagatttcactgcaggttatcaaaaatcccaactaacactggcttaagcaagatttgcatcttgtttctcattgtgtttaagatgtctggaggccatcagtgtagggatggcagtattgggatttctttatctttcaccccagcctgcttgattgacattcccaaggtcatctcatgacccataatgattgtcagagctttagctatgttgtccacattccagctggcaggaaagaagtgttaaggtgggacataccactttccttaaagaacgtatcttggaaatttcacacttcagatccttttagatcctattgacacaacttagttacagggatacccttagctgccacctaggtccaagagagcctggaacagatagattttactcaaggaagccatgtttttctggaacattctggagttctgttactgtggtcacagtgaaccatgtctgtcacatgggtggttctcaaacttggttgtgtgttagaattacatatcaaaaatgtgtatccatgagacctaccccagacctactgactaagaatctctgggagtagcccctgagaatacagatatttaacaaaagaatatatccagatgattctaagataggagagattgtttggaaaccactgctttaggctggacacagtggctcacgcctataatcccagcactttggcaggccaaggcgggtggatcacctgagttcaggagtttcagaccagcctggccaacatggtgaaaccctgtttctactaaaaatacaaaaaaatagcygggcgtggtggagggtgcctgaaatcccagctacttgggaggctgaggcaggagaatcgtttgaacctgggaggcggaggttgcagtgagctgaggtcatgccattgcactccagcctgggcaayagagcgagactccgtctcaaaaaaacaaaacaaaacaaaaaaaggaaaccactgctttaaggagcagcacataggattgatgaattttctttatccctgtgttccttgaaacataaaacagtcatataggaattcagatcttgaactcgttgactttttttttttaaactttaaattctggagtacatgtgcagaatgtgcaggtttgttacataggtatacatgtgccatggtggtttacagtacctatcaaccatcatctaggttttatgccccacatatattaggtatttgtcctagtgctctccctccccttgccccgcccctcaacaggtcccagtgtgtgatgttcccctccctgtgtccatgctttctcattgttcaactcccacttacgagagagaacatgtggtgtttggttttctgttcctgtgttagtttgctgagaatgctgttttccagcttcattcatgtccccacaaaggacatgaactcattcttttttatggccgcatagtattccatggtgtatatgtgccacattttctttatccagtctatcattgatgggcatttgggttggttcctagtctttgctattgtgaatagcactgcagttaacatacgtgtgtgtgtctttatggcagaatgatttataatcctttgggtatatacccagtagattgctgggtcaaatggtatttctggttctagatccttgaggaatcaccacattgtcttccacaatgattgaacttatttacatccccaccaacagtgtaaaagcgttcctatttctccacatcctttccagcatctgttatttcctgactttttaatgatcgccattccaactggcatgagatggtatctcattgtggttttgatttgcatttctttgatgaccagtgatgctgagcttttcttcatatgtttgttggccgtataagtgtcttcttttgagaagtgtctcttcataccttcgccactttttgatggggtcatttgttttttcttgttaatttgtttaagttccttgtagattctggatattagccctttgtcagatggataggttgcaaaaattttctcccattctgtaggttgcctgtttactctgatgatagtttcttttgctgtgcagaagctctttagtttaattagatcccatttgtcaattttggcttttgttgccactgcttttggtgtttcagtcatgaagtctttgcccatgactatatcctgaatggtattgcctaggttttcttctagggtttttatggttttaggtcttatgtttaagtctttaatccatcttgagttaatttttgtataaggtgtaaggaaggggtccagtttcagttttctgcatatggctagccagtttttccagcaccatttattaaataggaaatcctttccctatttcttgtttttgtcaggtttgtcaaagatcagatagttgtaaatgtgtggttaatttctgcggcctctgttctgtttcattggtctatatatctgttttggtaccagtacatgctgttttggttactgtagccttgtaggagtaccatgctgctttggttactgtagccttgtagtatagtttgaagtcaggtagcataatgcctccagctttgttctttttgcttaagattgtcttggctagatgggctcttttttggttccatatgaaatttaaagtagttttttctaattctttgaagaaagtcaatggtagcttgatgggaatagcattgaatatataaattacttcgggcagtatggccactttcacaatattgattttcctatccatgagcatggaatgtttttccatttgtttgggtcctctcttatttccttgagcagtggtttgtagttmttgaagaggtccttcataacccttataagttgtattcctcagtattttatgttctttgtagcaattgtgaatgggagttcactcatgatttggctctctgtttgtctgttattggtgtataggagtgcttgtgattttttcaccttggttttgtatcctgagattttgctgaagttgcttatcagcttaaggagttttgggctgagaagatggggttttctaaatatataatcatgtcatctgcaaacagagagaatttcacttccttacttcctgtttgaataccctttaattctttctcttgcttgattgccctggccagaacttccaacactatgttaaataggagtgatgagagagggcatccttgtcttgtgccagttttcaaagggaatgcttccagcttttgcccattcagtatgatattggctgtgggtttgtcataaatagctcttgttattttgagatttgttccatcaaaacctagtttattgagtgtttttagcatgaagaggtgttgaattttatcgaagaccttctctgcatctattgatataatcatgtggtttttgtcattggttctgtttatgtaatggattacatttattgatttgcgtgtgttgaaccagccttgcatcccagggatgaatccaacttgatagtggtggataagctttttaatgtgctgctggattcggtttgccggtattttaccgaggattttcacattgatgttcatcagggatattggcctgaaattttctttttttgttgtgtctctgccaggttttggtgttagggtgatgctggcctcataaaatgagttagggaggaatccctctttttttatttttggaatagtttcagaaggaatggcaccagctcctctttgtacctctggtaagatttggctgtgaatccatctggtcctgggctttttttggttggtaggctattaattactgcctcaatttcagaacttgttattggtctattcagggattcgatttcttcctggtttagtcttgggaggatgtatatgtccaggaatttatccatttcttctagatttcctagtttatttgtgtagagatgtttacagtattctctgatggtagtttgtatttctgtggaatcagtggtgatrtcccctttatcatcttttactgtgtctatttgttcttctcctttttcttctttattagtctagctagtggcctatatattttgttaatcttttcaaaagaccaactcctggattcactgatttttttgaagggttttttgtgtctctatctccttcatccatgagcatggaatgtttttccatttgtttctgctctgatcttagttatttcttgtcttctgctaggttttgaatttgtttgctcttgcttctctagttgttagggtgtcaattttagatctttcctgctttctgttgtgggcatttagtgctataaatttccctataaacactgctttagctgtcttccagagattctggtatgttgtgtctttgttctcattggtttcagagaacttatttatttctgccttaattttgttatttacccagtagtcattcaggagcatgttgttcagtttccatgtagttgtgcagttttgagtgagtttcttaatcctgagctctaatttgattgcactgtggtctgagagactgtttgttatgatttctgttctttgcatttgctgaggagtgttttatttccaattatgtggtcgattttagaataagtgctttatggtgctgggcagaatgtatattctgttgatttggggtggggagttccgtagatatttattaagtccacttggtccagagctgagttcaagtcctgaatattcttgttaattttctgctcattgatctgtctaatactgacaatggggtattaaagtctcccactattattgtgtgggagtctaagtctctttgtagatatctaagaacttaatgaatctgggtgctccagtattgggtgtgtatatatttaggatagttagctcttcatgttacattgwtccctttaccattatgtaatgcacttctttgtctcttttggtctttgttgatttaaagtstgttttatcagagactaggattgcatctcctgcctttttttttttttttttttttttttttgctttccatttgcttggtaaatattcctccatttctttattttgagcttatgtgtatctttgcacatgagatgggtctcctgaatacagcacactgatgggtcttgactctatccaatttgccagtctgtgtcttttaactgaggcatttagcccatttacatttaaggttaatattgttatgtgtgaatttgatcctgtcatcatgatgctagctggttattttgcacattagttgatgcagtttcttcataatgtcattgatctttataatttggtatgtttttgcagtgrctggtgctagtttttcctttccatatttagtgcttccttcagaagctcttataaggcaggcctagtggtgacaaaatccttcaggaggatttgcttgtctgtaaaggattttatttctcctttgcttatgaaacacagtttggctggatatgaaattctggtttgaaaattcttttctttaagaatgttgaatattgatccctattctattctggcttgtagggtttcagcatattgatctgctgttagtgtgatgggcttccctccataggtagcctgacctttctttctggatgcccttaacattatttcctttgtttcaaacctggagaatctgacgattatgtgtcttggggttgcctttctggaagactatctttgtggtgttctctgtatttcctgaatttgaatgttagcctgtcttgctaggttggggaagttctcctggataatatcctgaagagtgttttccaacttggttccattctctcggtcactttcaggtacaccaataaaatgtaggtttgttcttttcacatagtcccatatttcttggaggctttgttcattacttttcattttttttcctttaatcttgtcttcacactttatttcattaagttgatcttcaatctctgatatccttctgtttgattgattcggctatcgatacttgtgtatgcttcacaaagttctcgtgctgtgtttttcagctccatcaggtcattgatgttcttcttctctaaactggttattttagttagcatttcctgtaaccttttttcaaggttcttcacttccttgcattgggttagaacatgctcctttagctcagaggagtttgttattacccagcttctgaagcctacttctgtcaattggtcaaactcattctccatccagttttgtgcccttgctggagaggagttgcgatcatytgggggagaagaggcattctggtttttgttattttcagcatttttgcagtggtttttcttcatcttcgtagatttatctacctttgatcttggatgctgatggccttttttgtgggcatcctatttgttgatgttgatgttattgctttatgtttgttagttttccttctaacaggcccctcttctgcaggtctgctggagtttggtggaggtccactccataccctgtttgcctgggtatcaccagcggaggcttcagaacaacaaagattgctgcctgctccttcctctggaagctttgtcccagaggggcacccgcccgttgccagccggagctctcctgtttgaggtgtctcccaatcaggaggcacaggagtcagggacccacttgaggaggcggagtctatcccttagcagagcttgagtgctgtgctgggagatgggctgctctcttcagagccagcaggcaggaatgtttaagtccgctgaagctgtgcccacagccaccttttgccccaggtgctctgtctcacggagatgggagttttatctataagcccctgactggagctgctgcctttctttcagaggtgtcctgcccagtgaggaggaatctagagagacagtctggccccaggtgctttgccatgccgtcatgagttctgcacagtcaattaacactgtgaggggaaaaccgcatactcaggcctcagtatggtggacgcccctttctccaccaagctcaatcatcccagctagacttcagactgctgtgctggtggggagaatttcaagccagtgtttcttagcttgctgggctctgtgggagtgggaccagctgagtgagaccacttggctccctggcttcagccccctttccaggggagtgaacgattctgtctcactgggattccagctgctactggtgtatgaaaaaaaaactcctgcagctagctgggtgtctgcctgaactgccatgttgactttcggtataacttattttctagtcttttgcacttgagaattaggttttgttcttcttctctttctttgtgtttactgatcatgttaacttcttagattcttaaaaagttatttttggtagaattcttctatgaggaacccctggtcctgttcagaacctccaatagatgcacttaaaagtcttggcctgctacagtcatatttcaaagcacactctccacaaggtgctggcctcctacccatgagcagtgcacttcctctcactccctcatttggtgtctttaaggattttaacgaaaaagccatagaggcagacaagaaatgtcagtcagtagagtcaaaatagaaactcccttcatcacagcgctttttggttccaagtgctgaagctcatcttgacatcctgtcacggtgcagggccacgtaaccagagatgctgccaccatctgtgggtgttgcggaaacttctctgggctccgaaaagcatttctgaaaactcctctatcaatatgccaaggctgtcagctgagctatctggtgataggaacaacgggccctcatcagtccctttgccctcttatcatttggtaattatgtgtctttcaaatagctgcctgtcttattcttgcatatttctgttgcctgtgcagtgctgtttcagtgatggcctggcctctgtgtgcctcagaagttggagcagaacgatcccctttgatcttcactcatgcacatgtgtgtatggatgtgtgtatttttcttgcctttccggttcaggtctattctgggactcagctattgtacggaagaaaaaacagtcactggaactggtatcagaattcctgaacaggagactttcctttgctactcattagtcttgtgaccttagacaattcagttaccttttgggagtctatttcatcattataaaatggaaataataacatgttcttcccagtgcaattgtgaggatgaaatgaggtggaggcaggggaagctaactatgcatgagtgtcacatatactcattatgaatattcaacttctccactggtacctgaaaaatcacctaacacttaaataatctgaaacagcaccagttattttattagctgtcatggtttctgtgggtcagagatttgagaaggacttagctgagtggttctggtatggggtccctcatacaggtggcattagtgtgtggctggagctggaacagtacaatgctggaagagtgggtgctgacccaacctccctttcttttagactcaggtcctcatgtggtctctgcatgggctagtttgagcttcctcacagcatggcagctctaggcagtcagctgcttacatggcagctaaaggctttaagtacaagtattcccgtaagcaaggcagaaaggaagcacttttcatgacctggcctcagaagccacacagtgtcacatctgctgatagtggattctgttagttgaaatggtcacaaaagcccactcagcacatacccatctctcaatgagaggaacgtctaggcatttgtggatgtacttaagaactgccacaatggatattgttattatggaaagtgaatgaatgttatcctctgatgccagaccactccttaaggaagtactcatttttccttctgctccttgctttgaacttcatttctcagtagtaatgtattatagttaataaccgttaatcagtccttgaaatgtaccagacatcatgctagagctttacataaaatatctcatgtaattcacacaacatatttaccttcatttgacagataagaaaactgctaggaaaggttttataattatttcaaggtcacacagccagaaagaggtagagcttgggattaaacctaggcagtttgattctagaacctgttctttgaaccattgcactgaagctctgtgaattagagcttgtgggacccagactctcatcagctgctgagcccagatccttattgtgtgcttcacaggggcctcacctctgcagactttagggttaccagtcattatatggggatcatctttcaccttgggggctttagcagccccatgaggtaatcgttcctcagtgagtttaggcaaagatctgtctgttcttctaaaagaagctgaaatgttttaaattattctccagactatggatgtatttattagcttagtggggcgtttgcattttgctggaggcaacatgtttataaaacttgatgcktctcacctatattctgggtcctaactaaccttacagtattttaatgcactttttctattgtatcttcatggactttacataataacccagcagtgaaggcgtttgccagctatctttccatatcccacattgctgttggaggatactatcatagcatttagacacacattttattagcttcataggccttctttggggcttcttcaaggatgtaaatccacaaaaataaaaatgtcctctttaaatttcaggccctgaaattaggggatgttatagctggaaggaacctggtggtattgtcacgtgcagtgattttcagggcaccttaggtaccctccctgtatatgttagttacttattgctacatagccaggtaccctcaaaasttaacaacttaaaatgtcaagcatttattatctcatacagtttctgaaaattaggaatctgggagcagcttggttggggattatgactctcaacctttaaagagattacaattaagatgacatcaggggttgcagtcatctgaaggtttgattggggctgaagactctgtaaccatatagtttactgacatgattggaattctcatttccttaggactgttcaagtgttctcataacatatcagctagcttttcccagggtaagcagtttaaacagagaagaagtaaaaagctacaacgacttttataacctagcctcggatgtcttataccattacttctgctgaattccattggtcatacagcccggctctgacacagtataggagaggctacacggcatgaaaaccagggggaagggatctttggagacagtcttggaggctggctaccacaccatggccaaggcaagggaccatatctctgccagccccctgtytgtgctggcctcagagtagccttctcttgttgcatattctgcttttttgtaaaacttattttagaaattgtgccactgagaatgacaacaacaaataaagatgcaactctctcattttaaaaatgatgaaagggtcttgcctcaggttacaaagttgcagccacagcccagatgatgagtcaagtgtctcacctcctcattcctgtgtcttttaccctgttatctggggagaggtgacaaggcagtgtcagcatttgatggaacagagggaattgggcaccttgaagaccttcctttcaatgatgggaaaaatactatcctaaccttacttgaaggtagaggaaagagtgagagaagaagaaaagaacttgatggctgacatttgaggaaatttggggctcagaccttagatatagaacgttcagcttagaataaactataattgttattattattgatgattgctgatacatacccattacttacaaggtaccaggctctaatccctttacgcgagtcatctcagttaatttgcccaacagttagttgacatggggctgggcatggtggctcatgcctgtaatcccagcaccttaggaggccgaagtggaaggattacttgagcacaggagttcaagaccagcctgggcaacatagcragaccccatctctccaaaaaaaaaatacaaaacttagctgggcatggtggagaacacctgtaatcccagctacttaggaagctgaggtgagaggatcgcttgagcccaggaatttgaggctgcagtgagccatgattgtgccactgcactccagcctgggtgacggagcaagaccctgaaataaatagttgacacatttattactcctctttatagatgaggaatctgaggtcccaagaggtggagttacgtcttgaaatgtggggaagagtttgataggtgaggtgaagggtcagagcaatctagaatgaaggcacattctaaaaacaagaaagcttgatgagtcatctagcatgaccataacatggygctacactgatcattgttgagtgattgtctggctaatgtgtgtggactttttggaccaggccagtcttccagaggcccccatgatggatcagtattggggtgttgttagataacccacctaccccagatatgatctccctgtattgattacaattctcttgacccaccccaaaatcggtctcatcctttaatgttttctgtgtaaaatttgggtttctgatttctcaggtggctatgctctttatagcacaagaaagtcaatcctaaagcagactgggatatgcaggatagaaaatcctggatgcttcattcattcatcatccatttatrtgccttgccrtggaggggacaccaagagactccttgttctcacagcaggccctggaacccatgtggtcacacctgttcctcgctgagccctgaaggcttggcttacaaagccaggtggtgcatctacttctgttttctgcatagttgaaataactttgtctttgcatccatggttcagcatttagagtggacagatttagatgagtggtttcccaaatcctggaggtttgtaacatgatttgagagggtacatttgccatatgttttaaaaatgttaataggtacatatgtgttttattgaggccattactgtgggcttaaaagcaggaccctgaattcaacccgtcactttgtcacagactagctgagccctcggaccttgggcaagttacttaaccactctgtgtctcaccttcttcagcttgaatttgggaaaaacctggatgttaggaaaatgctgtatagaaattctaaatcccttgtttgatagaggcagtggctgaggatccaagaggttagataatttgccccaaatcacttagctggcacaactgtgtcatactggaccccttttgactccagtaaggacaacaccgtgtctgagaggttgaagaagagactcagagccagtgaatgagacagggtttatggagaacttacatacaggggtggaccagtgacygcaggctgaacagcagaactgctaccatttgtaaaaagcatgcagttgatatcatgttttcacttagcagtctccaccctgcaaccatcacttaaccaaaaataaagggcctcgatcccctgtacggtctgcattccagggaatgggccaggggttcagattccttcatagataaggagtgaatctccagattggccactgtgggattctttttctttttttttttttggagatggagtcttgctctgtcacccaggctagagtgcagtggtgcgatctcggctcactgcagcccccacctcccgggttcaagtgattctcctgcctcagcttcccgagtaactgggattacaggtgcccgccactgcgcctggctaatttttgtattttttttagtagaaatggtttcaccatgttggccaggctggtctgacctgtgatccacccgcctcarcctcccaaagtgctgggattacaggcgtgagccaccatgcttggcccgggattcttagctcagaactccaaacacacatccttcttggaccatagggtcattctcaggaattgcctargttattgctgtcaggtctgtctgccattacaaactggaaccagcatccagctctctggatttccaggggtttttattattattattattattattattattttgaaattttttttgcagtagaagcctatacccattctcatctctttccattttttctcaccctgaaagagtaacaaattccaaggcctcgggacatgtggtggtagctgaaagaagaatgcagcctttccttgtcttgtccaagtgaagaaaagtggtgctctctacttgagaggaattggaaatagattatttgcacgccctcgtactctctcaaaataatcacagttaacatgtgttgagtttttactatagagtctcttccaagtgcttctgctagagcagcggttctcaaagtatggtccctgggccggcagcagcagtgtcgcctggatgcagactattctcaggctccactccagagatcctggatcagaaactggggaggagtccgcactctgttgtaacaagcccctccaggtgattctgatgcatactggagttggagagccacttactccatgtccttaacaarcactttaagattatgtcccccattatacagaggatgaagtcaaagaaggaggactctgaacagtgtcttgtgctgtttattcattcaggaaacattaataagcattgatttattaggggcactttcttgcactcatttgtttgatcctgacacaacccaatcggtagctgtttttatctccgttttacggatgaggcgagtgaagctcagggacactaaataactcttccaagatcaygcggccacttagcttcgagcttgtggctccaatcgaggtctctctgctcttgttgtgggatttgcacactacgttgcccctgcctctgaccctcgctgctgcctgtctgaccccggctgttcgcttctcygcagctgtcagagcatctgtcctctgggaggtcttgcctgtccccctcaaccccaccaaaagtctgcagctaccatccagaatctgtgctgagcctgtctttccatagcacacctgatgcccaagttgaaatgggtttygcctctcactctctcagtctgtctgataggagatgcttaactgaatcgtgcccccaggcagaatgggctgaagggagcaccaggccctgtrggcaagagaagcagggctggcagggtgttgaagagttctgccagggccacagcttgcctggcatcccttagtttggtgtgaatttcttttgggacaatgatttttttccccatatttatctgtgaaaaactgctccctgaggattctttcctgctgggaggcagagcatggagaactttatgtttcaggttttcatggaggctgacaagcaaagagtcacaagtccaggctggccctaatatcactggttgctcttgtgtggtcactgaaatgccttctcctccaagatgctctccctgcatcgtctcttatctgggtgatgctggccactctgggatgcaaagacacccagcttgccatggtaggagcctctcattctcctgtgggatctcctggttaactatcaaattgcctccacacctgattttggggaatggggattgtcttaaaatttacctttatttcctccaagcccagaacagtcctggaacactggcaactctaaaaacatcaatgttatgaatcttttctgcaggttgtaagacaaggtcatcccttgaccccagtggggtcaggaatgaacccagttcacagttctgcactaccttacytgtatcatcaagtacagcctgcaagattcaaagtgtgctgggtaccatgtctaggatgacaggaaattagtggaagccttagcattgccttagaaagagcttttatggttcattactcaagagctttgtaaagcttttaaaaagtataaataaaatgtataaattctcaagtttgttacattggtgccgtttcctttagggatcagcaagtatctatgaatgcctgaaagtcttctgtgctttctttccagccaacaggacaagtgagatgctgaggaaaggtcctcagtgttggtcaggtcctggcaagttactgcttgcatgcttaggggctgaaatgattccaggaggggccaagaggtatgggcagggctgaggggaggcaacacagaggcaggaaggtgttaagaaacccagcaaggactggaactgtgtgattgggcccctgacaggagccggggaaatctgacctctgagacccccactggtgcctcccaatgaccaaactcaacccaaaatcagaggcaaaaggagcccacttaacgtggtctacaaaggtcagactcaaccaggcacggtggctcatgcctgtaatcccagcactttgggaggccgaggtgggcggatcacatgaggccaggagttcaagaccagcttgggcaacgtggccaaaccccatctctactaaaaatacaaatattagctgggcatgatggccgcatgcctgtagtcccagctacttgagaagctgaggcaagagaatcgcttgaacctgggacrcggaggttggagagagctgagatcataccactgcattccagcctgggcgatagatcgagactcggtctcaaaacaaacaaacaaacggccagactctccagacacaggactgttaggagaagggtagagagtgagttggaggggcaaacgagaacatcattccatcctccatctggactttgtgacagagaaacatgagtgttatgtctatacagtcatgtgttacataatgacatatctgtcaacagtggactgcatttaccacactgctcccatcagatcataatggagctaaaaattcctattgcctagtgacatcatagccatcctaacatcatgtgcaacacatcgctcatgtgtttggtgatgttggtgtgaacaaaccgactgcgctgccatttgtataaaactatagcgcaattatgtacagtacataataatactagagagaaaatggctgtgttaccagtgtatgtatttatcatactatcattattttagtgtattccttctacttattttttttaaagttaactgtaaaacagcctcaggcaggtccttcaggaggtatttcagaaggccttgctgtcgcaggagatgacagctccatgtgtgttaatgcccctgaggaccttccagtgggacaaggtaaggaggtggaagacagtgatattgatgattctgactccgtgtaggcctaggctaaggtgtgtgtttatgtctkagtttttaacaaaaaagttttaaaagttaaaaataaataatttttaaaacagaaaaatgcgtatagaataagaatataaagtattttcatacagctgtacaatgtgtttgtgtttcaagctatgtgttgttataaaacagtcaaaaagttaagagccaggcacagtggtgtgcaattatagtcccagctactctggaagctgagacgggaagattgcttgagcccaggacttcgaggctgtcgtgttctgtgatcatgtctgtgaataaccgctgtactctaacctggacaatatagcaagaccccatctcttaaaaaaaaaatavttggctgggcgcagtggctcatgcctgtaatcccagcactttgggaggctgaggcgggtggatcacgaggtcaggagattgagagcatcctggctaacacggtgaaaccccgtctctactaaaaatacaaaaaaattagccgggcgtggtggcaggcgcctgtagtccaagctactcgggagactgaggcaggagaatcgcttgagcccgggaggcagaagttgcagtaagccgagatcacatcactgcactccatcctgggcaacagagtgagactccgtctcaaaaaaaaaaaagagatagttaaaaaaaattttaaatttgtaaagtaaaaaagttccagtaagctaagtttaattttttattgaagaaaaatattttttataaacttagtatagtctaagtgtaccatgtttataaactaagtgtacacagtagtgtactataatgtcctaggccttcacattctttgaccactcactgactcacccagagctacttcgatttctgtgaactgtaatcatgatgagtatcctatacaggtgtaccatttttttctcttatattatatttttactgtactttttctatgttaagagatagaaatactcaccattgtgttacagttgtctacaggattcagtgtagtatcatgtatacaggtttgtagcctaggagcagtagactctagtatatagcctatgtgtgttgtaggctataccatctaaggttgtgtaagtggactctaaagttgctcggaagacaaagtcacctaacgatgataggctactcagaagatatctgtgttgttaagcaaagcatgactgtaatttcagrtgtagacaggaaggcctagtgcaaggaccagtggtcactgattctgacattcagatcccaccctttggtttgtttgtttgtttgttttttggttttcggttttttggggtttttttttgagaccgagttttgttcttgttgcccaggctggagtgcaatggcgagatctcagctcactgcaacctctgcctcccaggttcaagcgattctcctgcctcagcctcctgagtagctgggattataggcacacgccaccacacctggctaattttttgtatttttagtagaaatggggtttcaccatgttagccaggctggtcttgaactcttgacctcaggtgatccgccgcctcggcctcccaaagggctgggattgcaagcatgagtcaccgcgcacagcaaaattagcctgcagtgatggtgtgtgccaccatgttggccaggcgggtctcgaactcttgaccttagatgatccgcccaccttggcctcccaaagtgagccacaggcatgagccaagaccccaccctttgataggaggaatgttgaatagttgtgaccatttttaatctaccacaccaagaaacttaaaaactgaacttaatagcttcaagccctaaagtcacatgacaaaaccatttttgtgaccccattctttcaaggatcgtttatctttctccctactctccccattcccactccaacccctgccccactcatggttcacttctgtaaccccagattttggaacacccaaaactcctctaagaacatagtcgatgccactgtgattttctgctttcccagggagcagggccctgctgctatgcctccagatgatgcatttattcatggtggcaggtgtattcgatgaaactaaagagattggaaaattatgtaaaatgttcaagaatgtgcatgcttgtgcttacatttaatgggcccattttaaaaagtctctgaaccctgaagccaagacaaagtttgatatctctgaggctgtatgtttaaatatttgcgattctgaagagcctgattcagcgtgtttttccccattctcatccccttcccagttatgtcttccatgtgcaggcgttttcctattcatttccctcatgattgaaatggtgacagttacatctgcattataatctttcatcctgagtcttttacagatattatccagagataagcaatggtgtctttcttttacaggtggagaaattaaaatatgcataaattagcctgaaaaaaaggtaccagaaaacccagagggatctgacattgcttcattttgcttcattttgctccctcatccctcatacagggttttctaacagcactgctcttgacctttggggcaggacaggtctttgttttggggctgtcttgtgcattgtgggatgctgagcagcatccctggcctctactcacagatgccagtagcatccccctgccccccaccccagacccaccaagtagtgacaaccaagactgtctccaggcattgcagatgtcctgcgggttggaggatagggaggtgaatatgtccctggttgagaactactgccttccagtagagcatttgaagatcctgggcatcagggactgtgaattattggtctgaaggacggagggcctggggcacagaatatatcttaaaaatctgtttctgatgtaccaccagggttaagaatctattctaggcggggtgcgatggcttatacctgtaatctcagcactttgggaggtcaaggtgagtggatcacttgaggtcaagagtttgagaccagcctgaccaacatggtaaaaaccagctctactaaaartacaaaaattacctggacgtagtrgtgggtgcttgtaatcctagctactcagaaggctgaggcaggagaatcacttgaacctggggggcagaggttgcagtgagctgagatagtgccacttcattccagcctaggtgacagagtgagattctgkctcaaaaaaaaaaaaaaagcaaaaacagtctgtttcagaattcaaatcccaattctctaagcctgggtttcctgatctgtgatactaaaatgataatactgtacctgtctcatacaactttgagcctgaaatctggtaatatgaagcacagtgcctggaatgtcatgatttgctcactacatactagctttcatgatgcttctcattcctctcttgcatctccmctcctctttcttcttgggagcaggtataagagcagaggtggagaccgtagcacccatctgggttggggatttgcattttgaatgtgggggtagagtgcataygggagctgagagcagagtggggtgatggttcagatgagccctggtgggggccagcatggagcctaacagtcaacggcaaagggaccctccatagaggaagaggagcggtagagtgatgtgaggctctgagtcctgctcatgtggcaagcccataattgtaggatttctgagaaaattagattctatatgaagccaaggtcaagtttctcgtactgggaataggtgtccaagttggggtgaaggtcattggggttaaatgggtcatggatgtggattggagggtgtgggatggttcatccctgatggccgagcctcccgtgctgatataagacagtggggtgatgaaggaggcctgggaaccagaggacattgtcacatcaccctgtatgggatggacccagatatcagaactgcattttgacatggctggttgggataacaaggtatctggaagcccgtgtcatgggagcaagggctctgaggagttctggaaaagaaaaggcatctcwcaggtcccctcctttaatggaagtattgaatgctggaggaaacgtcattgttctacaatatgcccaggacagaatgcaactggagtgggtgttaagaggcaggtttccattcaaggaaggctgtgcttcagtagaaaggacaaaatccggaagtatgaactctccattcttcccgaggctggataatgatgtcccgtcggggatgccctagagtggtgctttccgatctttttcaagttgtgccacacatagaaaatgataactgctatgatgcaggaggaaaatagaaaagttgcctgaggatgccagccccgcccagtagcttagagggcgtaaacagatgagtatatttgtcacctgtaattcaatcgtggcacactaaggtgcctgggcactccatttgggaagcccagctctggaggaccttttttggtatcattggaatgtagtgtggtgggcagcatattcccctcttggcattgttccctcactccttagcaccatcctgcaagacacrtgtcatgacgcttaaatggcagtgagtcagtggaccctgcagcactcccagggtcaccctgagttcagggattcatgtctgaggcccatgctcctggctacttagttgagatraccccttgggttcccttcaattctgccagtcttccgttctttgaactgtatcccagatggggtgcggaggtgttcctgtgtcccctttggcccttttattaggttgaccctaacccaacacatcttgtgggaacatttcactaactctctgagccataacttcttagtctgagatccctgattgttggttcatactttcaagatgtatttctttcctctctgtttaaccaattgtcattgtcgctcagcttgaggacaggagactcactgtttgcctatttgagccaatcaccatctctcttgtccccaaaatgtaattggaaggagccttaatggtttccaaatgataatagctccataagccgattaaaaaggccttaataaaactgtcttgagttattttccacagctgcagacagtgtcctttgttttctaatgatgccaacaagaaatcagggcaatttttctttctagtgtgatctgaagcaccaggaaggcctccttccgtctgtctgactgctcaccccgtcttcttttcttcccagacaatccacgttgctattgtctgcgcyggatacaatgccagccgggatgtcgtcaccctggtcaaatccgtcctgttccataggtaagaacaacttctgtgctgtgtgggctgaggtctgtcactgcctgcctgtgtatttccttggggaagggttaaataggagcaaaatttctcatcaatcattctagctgccataaaaatgtaatttttgtctgaaaccctgaggagatgattgtgttaacaatgtttaatgacagcgattaggtgctgtcttgccatgtttagaattgtaactctcagacctaatgcaatcttaaaggacacctcaaatctgatgcttcagtctctctatcagcttcccctgcctagcatttaccagatctcagttgttatacatccttgtcggtaggttgtgttatggattgagttatgyccaccacaattcttatggtgaggccctcattcctggtacctgagaatatgactgtatttggagatagggtctttaattagattaaaatggggtcattagtgtaggccctaatctaatatgacaggtgtcctttaaaaaaaagaggagattaggatacagacatgtgccaaacacagaccatgtgaacatacattgagaaggaggccatatgcaagtcaagagagcggcctcaaaagatcttggacttctggcctcacagacagtgggaaaataaatgtctcttgttttatccacctagtcggtggtgttttcttatagacaggttgcttcctctattctggtgtgggctgtcccacttttgggcatttctgactgtaaaaaagtcctgccttagttaaactgtttcccaacctgyggatgatctccattgactctcgtggacccccatgggaaccatcatcctaaggattggttcttcttctacctggaagtgataatgcctctggatgctcatctcttctccatgtgacacttccagcattggcttctgctttctcatggaacttttcttctgttcctcactattttgattggcatctagacatacccagggtcctatccagaatggtgttcatggttccagccagtgtccttggctctgctttaacactcttgccaagggtttggatgaagcttatccacagctgtagccaacagcatggaaacctgttgggtggatgagtcaggatccaggaggctctccatagtaggaatagtggtgaaaagtttgcagaggtcagctgaacagagatcagtgtaaaatgctgcacctgaatctgtcaatggcataaacaaagatgggaaccatggtgggcttcaagacctaccaaccctgcaaggaactgggattcgtcattggttctaccttctctctgtcttccaacaagcccatctgcagtcagtgctttgcgattctccctctgagatagttttcactttctccccgttctctccatccccactgcaactgatgtcattcagggccacctatcctctcaccttcatgtgtccttcctgcttccccagtttctactcttcagatcatctgctgtgattccagaatgacatttcaaacaggcacatctgatttctcaaaaccttttagcggcttctccttgtcaaggggtggaaatcaaacccttttaccatggcacaaagaccaggttgatctccatagtgctttctgtctcctctttttgctttgactttgcactccagcagctctgacctgcttgtagctcccctctgcccccatagcgtgtccggcctgttrtgtctggttatgctgctctgtctacccatttctccctccttctccatttcctcccaccctcaccttggcaaactccctcttagcctttaagactttacataagcatcttttctracaggaagccaaccttctgcctgtgttggggtttctcgtctaccagcccacaataccccctgtgcttctttccatcattagatttattacattatattttatatatctattaatgacaggtctgctgtagcagaaggtgggctttctggaagacagaacccatgccgtcattttctgtgtccctagtatcttagcaaagtagctgacacgtattacatgctcaataaatgtttacttatttgasaagtcagtctgggggagttcattaataaagaacgtgaagatatatattcaatcagttaattaatatatccagcccagacttagttcagttccacattcatgacactatattgctgagtgattgtcagcagttcgttttgccttatttttattttttattttattttttttgagatggagttttgctcttgtcgccaaggctggagtgcagtggcatgatcttggctcactgaaacctctgcctcctggattccagcgattctcctgccacagctgcccaagtagcttggattacaggcgcctgccaccacacccagctaatttttgtatttttagtagagactgggttcctccatgttggccagctggtcccaaactcctgacctcaggtgatccacccaccttggcctcccaaagtgctgggattacaggtgtgagccaccgcccccagccattttaactctttagactttaggttttttttttttttttttttaaatcagttaacttttgctgtgtgtcagttcaccctaaaacttaatggtctgaaacatttacttattagttcagttgtttctactgggctgacctgtacggttcttctgctgggccacttacgtrcctgcagcaagctggcaagttagcaagcgtcaaattcactgcccatcctgaatggagaagtggataggagaagtaagcaatcaacaaatagataacagttcaccgtagaggctgtcagttcttcctcatagcgctgtccagttggaattatgatttcagttgtatatttgaagaggaaatggaaacaccaaagaaagaatggccaaatggggcttgacctactgtcttctgacctgaggtgagatgccctttccacattgttattgtttctctgcagttttgaaggctcctttcagtactacggccttcatcctgtggcttaaaaccaggcattttgtacactaagcattgaatgagatgagtggtcttcagacttttatgtatttactacttgttgccatgacgtatcaggtctctccctggtttaaaaaaaaaaaaaaaaagcccactttctagaaaagggcctttgcatgatgtacaggtattcaattacgctatttctcaattatggcaaagttaaaggtcataaaaacctctggtgttgtgtataaattttattcctgttgccctagctgcaaatcagataatctaatagttgttgaaattgtaagaatcctgttgggtgtaaacttttactcctacagtaactgtgcagcacaaagatgttaaattaaaaaatagcggtagtaatattattagctgctgatggcatgtcgtacttttaagacggcgtgaggacttgagaagaaagcaaatccttagtatgtgctacgaaaattctgcatcccatttgttatgctgagcccctgtctackccagtgggcatggcactaggttcaggaggccaaagaagaaacccagggccagcaaatgagacgttgggtttaactgggggcttacatatatggggagagattccagtggcagcgggctggacagatctgccttacgtacagcccagtggcaacaggctggtcaggagaaccccaggacccagtggcagcaggttgggcaggaaaactgcaactacttatgaaaggcatgcagtttatataacattttggcttagcacctgtgttagtccattttcatactactataaagaactgcttgagactgggcaatttgtaaaggaaaggggtttaattgactcacagcttagcatggctggggaagcctcaggaaacttataatcatggcggaaggtgaagcgggagcaaggcatcttcttcacaagatggcaggaaggagaagtgctgagtgaagggggaagatccccctagaaagccatcagatctggtgagaactcactcrctcactatcatgagaacagcatgggggaaaccacctccataattcagtaacctccacctggtctctcccttgacacatggggattatggggattataggaattacaattcgaaatgagatttgggtggggacacaaagcctaaccatatcagcaccctttccctaacaacctccagtgggggtggcaccaggaggttgccaagtagcaccacttcaatcatcccaaaactcagggcctcaattccctgtatggcttgtattccatgggacagtttgggagctcagatgtttcttatagacaaggaatgaatctccaggttggcctttcctggattctccagttcagaacatacattcaggtacgtctgtcaaacagggtcattctcagggtatgcttaagttattgctgtcaggtgcgtttaccatacaccattttaatgactactgaccaccttggaccaaattaccacagaagttcctgtcatccctgaaattatacaaatgggaatgattctgtgaattgatatgctggtgatgagttgagatacaagacaaaaggacttttgaaagactttcggctcagaaagtccagctataaatagcttcattgcttcccaagcacattatggggattaactaatacatggttataaaatacattgacaaatgaagtaccttactaatgttaataataatataataatagtggtgcaggatgcttcttttggctttcactgttaattatagtaattagatttattttccagacaagatttggtgcaaattttcatttaaggcttgcttcattacathaaatcagttttacttctgccatatgcttgatgacatatttcaaaagatagtaaaagagtaatatagacacacttgcacactaatgccaacgctgacaattgctgcgacctgttggagagaaattaatacartgtgggaagaccttgacccagtatgaccaccgtagggactctcccttaaaaagagaaccctaacaatagaaaaaccttttataaaatattgctttataattataaaattggataatacttaagaacagaataaataatggaacattctcttatggtaaaccatgtactcagttttgaaaagtatggcataccatgaagcaatgcttatataaaataagtgaaaatataatttaaaatgggatgcatcgtatatatttcagtatacacacacatgcctatatgtgacatgtacacatatacagggtcaaaatgcagactagcagaaaatacataagaaataggacttttgygtsttgtgtttgggtggtagaaataaaggtaatcttgtttttttttgagacagattcttgtcctgtcatccaggctggagtgcagtggcctgatcttgatgcaatctcagctcactgaaacctccacttcctgggttcaagcaattctcctgcctcagcctcttgagtagctgggactataggcatgcaccaccacgcccggctaattttttttagtggagatggggttttaccatgttagcctggctggtctggaagtcctgacctcagatgatccacctgcctcggcttcccaaagagctggggttacaggtgtgagccaccatgcctgggcgtaatcttgtttttgttttcagtgttacatatatttttggttgtgtcagcatgcaacctctatggtgaagaagaaagatggatgagaaaaatatatacaaattataaatgacaaaggtttgtttgttacccagtagaaaatagcacaatacacgtctgtatcacctagacggcaggctattcagaggaaaattggggggaatgcctgtgactccaatcccagttgcagataaacggggaaatattgctgctcttcaaggaaactaaactcttagggagcagagaaaagaaatatttatttagcaactaagtgtttacctcctgggcaggaaagtggatcagcttgtaaaaatttaatatttgtttgctagcatgatctgctttcacactctacagccttgttggcaggatgragctgggttatttgccttactttgcatatcaagtagttgtttttggttttgtttttttaaacttcacttgtgcccctgaaggacgtggtgaataaaagagcatattcgtgaccagtatctgcctttaattgtcttatcccttattcaggcttgaattcattgtagaactgtctgagttgtgcataggatttgaataaaacaaagaagcaggcctgggttcyggttctgctcctaccaggcctgagctgggtgaccctaagcacgtgcctctacatcttggagctttggcttgtttctcaacctgccttagagccccgttttgaatatgggaatataggctgtatgtaatacttgtctgtattttatttatttaacaaatacaaatgtagctcttgctctgtatcagggtctgttccaagtgttttccagatggtaatgcattgattcctcatatgccttcaggaggtgagcactattatgatgtccattttactcagagttaaactaaagaacaagatggtaagtcgtggctcaaggtctcagtgagaagatgggcagagcctagttggaaaccaggcaatctagcttcagaatctgagcttctcaacaaaaagaagttctcatttttagtatcatgcttcttttttctttttttctttttttttttttttttgagacagagtctcactctgtcacccaggctggagtgcagtggcgcagtctcggctcactgcaaactctgcctcccaagttcaagcaattctccttcctcaacctcccaactatctgggattacaggtgcctgccaccacacctggctaatttttgtatttttagtagagatggggttttgccacgttggccaggctggtctcgaactcctgacttcaagtgatctgcctgccttagcctcccagagtgctgggatgacaggtgtgagccactgtgcccggtctcattattcttacttttacttttaattttcattctgggtgatagtgtagacgttgtgatctccataatcattttgatgcaggattttttgttccttagctcagctaggtctgggttcttgtctcgtgaccaggaagaattaggcacacggacactcaaagaatgagcaagatgggaagttttattgagtgatgaaacagcttttagtggggagaggatgcggggtggtccccctactcaaaggcaggagagttcccaatatagctgagctcaaggcttcttatgggctcagaataggaagtgcatgctgattagtttgtgactatgcaaaagaggttaaagcaaagacaccacacaaaggtgggcatgatagtgtagaaaaccrattaggaaagggtagttatgtgtaaaataggtgaaggatgtggattaattaggggaaatcacaccaaacaggaaggcgggttctcaatccagttcmagaatttacccaggactgtttctggcttgaaggttggatttcactggggacctgttcctttctgcctaggcatttgtctgccttttgcctctatcaattctcaccccttccaggtatgtatttttgaggtgttaagtgtagaatcaatacaggttttaaaggcctgggcatcagtatttctagttaagtcttaagaaaatagcataggcacgtgatatctttgaacaggtaagagatcaatggtatttggtcatacccataaatattaaaaccaaaaggaactgctttttatagtgcagatgttaagcttcacatgggctattgtatttgaatgttatcccgacctggtgccattatccccataaacagatgaggaaaccaaggctcagggaagttaaatagtttgttcaaggtcacagatgaatcagtctccaacctggactctgccagcccctacaatccatgctgcttttactgcattacaaggccttttgatttttcttgaaagttgctctgttcttctcttttggaaagcttttctgatatggcactgacttgtccttgaatcttcccatatcatcaaaggcacttggccactctcaaatgaaggactcactgaaaaactctcattctggctgcggtgattttctgaaatgagtcctattaaatctgtaagtgcaacagattcactgagaattcaggttgctgtcacacgcgctttcttttcctaagtttgccattgcattgtaaatttaataattaaagattatttcagctcaaatgtccttgtatattttaatgaaaacaggccctagattgccttggagggactgtggcacattcctgacaaaataaggaaggcaggaagaaagcaatggcttaatcatctttgcctctttgtagtaccatatttattgcatctcagcctggaacaagggagcagttaaggaaaccagagggagcagaagcrttgctcattaagagtgaagtctgcaggctctgctggagaggaagcacatacttgcttccttctttggtgtagaattgtggtctggtctgtctgtggaccacacttgatgtctgcagcaatatgtgggttgcagtaacccaggcatgctatgtgggaccactctgtattaagatgtgtayccaagctggcctggccaggcagaagctttttctaaggggcctcaggcagtgctcgcaagtgtatttataactggtagctggcataaaagactattttagatgttatacaaatataaaactaaatagccttgaatcatatattgagaaaattattcctctgaatgagtttttattatctgcagttggcgaaattctctttggtgtaaatatgtccttaacatctgtctaactcttgctaatctccctttgaacaaaagagaataggatgtagactcataggctttggctgattttggaatttgcagggctctgtcattaaaactatttcttaccttcctgagttaggaaccaaatgtgaaataaggctcagaagtcacgcatataaagaatgaaataagcctcctttatggccgttagtcttgagtataggatgttctttcaactgtggccacaaatagagctctcacttatgtctccatgaattggacttacctcccggtcagaggccagcctggacaattgcggggtttcccacatgggcacaccatttactgcttagcacatccccctagggaaggaagcccagaaacagaagcagagcaggcctccttccctctcccaaatacacaggtcagaccaacattccaatatttgcctattcctctgagatgaataagtaaatatgataaaatttgctctttaaaagtgtacaatttagtggttgtttagtaaattcacagaattgtgcaactatcctcagtatttaatatcagagcatttttataaccttaaaaagaaatccccagccccaatactactcatttcctcctcttcccatcccataccaaccactaatctgctttctgtctttttggrtttgcctgttctggacatttcatgaaagtgaaatcatacagtatttagtcttttggactggctttttttcatatggcagaatgttgtcaaagttcatccctgatgtagcatgtatcagttcttcatttattttaattacccacaaatattccattgtatgaatataccccattgtattatccattcatcagctgatggccatttcagttttttccacttctttttttttttcttttgagacagagtcttgctccattgcccaggctggagtgcaatggtgtgatctcggctcactgcaacctccacctcttgggttcaagcaatcctcctgcctcagcctcccaagtagctggaattacaggtgcctgccaccatgcccagctaattttttaattttttaaattttyttatttttttgtttttgggagagacagggtttcgccatgttggccagcttggtcttgaactcctgacctcaggtggtccacccacctcagcctcccaaagtgctgggattacaggcatgagccacagtgcccggccatccacttcttgactattatgaacaattctgctaagaatgttctgtataagcttttgtgttgacatctgttttcatatttttatagatatttttatttttatgcttaattttttgagaaattgccaaactgtttctcctaccagctgcttcattttacagttccaccggtaaccattgagggttccaatatctgcaaattcttaatcactgtttgttatatatcttttttatttttgccattctagtgggtaagtggcttattgtggttttgatwtgcatttccctaatgattaatgatattgaatgtcttttcgtgtgcttgttggccatttgtatatcttctttgagaaatggttatttaaatcctttgctcaatttttattggcttacttgtccttttattgtttgagctgtaaagtatctttatatattgtggatacaggttgcttatcaaatatatgcttgaaaatattatctcccactctggtagtttttcactttcttgatcatgtcctgtgaagcacaaagtttcttccttttttttttttttgkttttccttaacactaatttatttcatatggttctgaagttggggcagtctgagatcagggtgctggtctgagatcgggatctggtaggaatggacccttttcctggtttgcagatggccaccttcttgctgtgtcttcacatggcagacagcagaaaaagagaaagggtttttttaaaaattatttcagtgaaatctgttttttctttcattgtttgtgcttcagggaccatatctaagaaacaattacctaacccaatgttaaaagatttgctcctgcatttttttctaagtgcctctgtacctaacttccaggtaattaygtcaagctgtgggcatttgaatctctttggtaattgcgtcaaactgagggcatttggatctttttggtaattattcatgtgttcatttattcattctttccttaaacaatcactgagtatttctacctgtaaggggctgtaaaaaaaaaaatctaggtataagattcttaacaaaataaagcatccatgctaagattccatctagcagggaacaaagaagaagtaaatagtcgattatttcaaagatctgaactaaggtttgagcacagactcagctggagccactaagaagggcgtctgacaccgtggaatggcctcctcagaactgtggtgtctaacttgagaacagaaggccagacgcagttagcggggtgaagcgtagatggtccaggaaaaggcgacagcatgggcacaagcctgccaggagagcatgctcaaccctggaactgcacccgagaccagctagatgctctctaagcgctggggttgtagagagagtaaacaagagaggaggtactttgtgaagctggagaagcgctatcctccacagctgacagtctcatggagggtaggaggtagtcttggaggttaacatggagatttccagtgataataaatgctaggaaraaatctgacaggacagtgggatggagagtgatgggggagatggggctgcgttggatggggtgactgtggaaggtttccccgggaatgtggctgttgactttattcctgcaggaggagcaggagctggtcacaggcagaactgagggagaaatggctggagtgcmgggtttaaggaaggggtgtgaagatatgagctttgagggacagatagggtgagatcgttgaaggtcttttttgctccatgcgagaggctggggcttatatattgtacagtgagcaaggggctgtgtgattacattagagcaagtgtatggcttaggggctagaggatatatcagagtgagttagagagtcagaaaaacagtgaatatattcatgagaaaaaagagtgaatatwttcatgagatgtccccaaggttggataggataatgaggctaacatttactaagtcctcacttcctgccagtccttgttgtaagtgctgcatatgttttagctcaatcgatctgacaataactgtaaggtaggagctattgtgatcaagcccattttgaagatttggaaactgagactcagaggtgaagaagctttcccaaggttcaacatttgttcatgacagaaccacgttaagaaaaaaaaaacaggcagttttgctttcaagacccagctcctaaccattaagctaagctgcctttcaggacttgaggttgattgagtgtgtggcatacagctgggtrgggggcccagggcatacccccatttctagcttatgaggctgggtgaatgaggcacctttaacgcaggcaggaaattcaaggggaaacctgtgtaaggggccaggagagggaaaactgatttctgttttggaaattgaggaagccactcatccatgcagtcctgcagaataaacaaaagcccctccttactgtgtcaggtggtgctctgggagctaggatgcagcagtgaatgcaagacccagtctctgtccccaaggagcttaaattctaaagaagagacaggtcccagacaaacactccacaaatcattagaaacttggtgtgtagtagccgggcgtgatggcacatgtctgtaatcccagctactcaggaggctgaggcaggagaatctcctgaacccaggaggcggaggttgtggtgagccaagatcgcgccattgcactccagcctgggcaaaaagagtgaaaactctgtttccaaaaatagaagaaacttgtgtgtagtagaattgtaattgggtgcttcttgattcccagggacctgtgggatgtgaaagtggggccatctggttgacagtcagatttacaggttaaagctcaggggaactatttcggcttacacagaagctccaagaaaggtggtctgggcagtattttcatgtgcttgtgccatggtttggtgagcctaaaaggaaaaggccactatcaggaactgcagtctgggcccaaattcttatgatggtacccaaagtggaacattaatggaacccctcaagcatgctgtctgataggagtcagacacaagctgctgatagttagcccgcctttgattgctgagacaatatcagcaaactgccaaggtcttggttgtcacctgggctgaggggctcatgtgttttctgattaagcatttgtatattctcaggcaagctaatgaaacccactattccctttgacaatgcagacacctagtattgccataaaggtgagggtgaggtttctttctggatttactctgccttctggacagaagctttaaatagaccagaggcagaagaagattgaaggaggaagccccatcctaatgtttgtagcatctttctttaagggcttgctcctcttaccccacactggtccaccttctgctctgtaaccaggttaaaacttcccagaattataacttctatttgctgcctgctgagcctccaaaccttgtctggctgtttctcttagagaatgaagtttgcagttcctaggaactcacacattctagcccagtctgtcctgtagacgtggtctctctttttttctttttatcctccctatttctggcattaagtaggtgtgcagtaaatgttgttgtatgatccacccaaatatgactattgttctttcacagacctgctctgtactttaccacctttgttcctttcttactctatcagagttgtcccttggtatatagaggggattggttccaggcaacccacatatccagaatctgcacatattcaagtcctgtagttagccctatgtcacctayccctgttagactgttcttgtgttgctataaagaaacaactgaggctgggtgctgtggctcatgcctgtaatcccagcactttgggaggccaaggcaggcagatcttgaggtcaagagttcaagaccagcctggccaatgtggtgaaaccccatctctactaaaaatacaaaaattagccgggcatggtggtgggtgtctgtattcccagctacatgggaggctgaggcaggagaatagcttgaacccgggaggtggaggttgcagtgagccaagaccatgccactgcactctagcctgggcaataagagcgaaactctttcactgggggtgggtggggggaaacttaagactgggcaatttagaaagaaaagagatttaattggctcacagttctgcaggctgcacaagcatggtgccagcatctgctcggcctctggggaggcctcagggagcatttacttatgtcagaagggcaaaaaaggagcaggcacatcacatggtgaaagtaggagcaagagagagggtgggaggtgccacaatctttaaacagccagctcacatgagaactcactcagtattgtgaggacagcaccaagccattagggatccacccccataacccagacatcttccaccaggctccaccttcaacgctggggattacctttcaacatgagatttgagtgggggaaaaatatccaaactatatcattcctctcctggcccccgaaatgtcatgtcctcctcacatttcaaactacaatcattgtttctcactagcctcccaaagtcttaactcattccatttttaactcagaagtcccaagttcaaagtcccatctgaagatgagttccttctacctgtgagcctgtaaaatcaaaacgcagtatttacttccaagatgcaatggtggtacaggcatgaggtcaacactcttattcccaaaaggagaaactggccaaaagaaaggtgctacaggcccccacacaagtctgcaacccagcagggcagtcattaagtcttaaagctccaaaataattcttgactccatgtcccatacctagggcacactggtgcaatgggcaggctcccaaagccttgggcaggaacactcctgtggctttgcagtgtacagcccctgcagctgctctcatgggttggagttgagtgtctgttgcttttccaagcacaaggtgcacatcgccagtggatctaccattctagaatgtggacgatagtggcccccttcccacagctctgctaggcagtgtcccagaggggactttgtgtggggtctccaaccccacatataacctaagcactgccctaatagaacatctctggtgggctctgcccctgtagcaggcttctgcatgggcacccaggctttcttatacattctctgaaatctggtagaggctgtcaagcctccttcactcttgcactctccgtcctgacaggcttaacaccccatggaagttgccaaggtttatagcttgcactctctgaagctgcagcctgagatgtatcttgggccctttgggctgaggctggaactggagaggccacaatgcaaagagcagccttttggggtggtgcagggcaatggtgtcctggccctggcccaggaaaccattctttcttcctaggcctctgggcctgtaatgggaggggcagcctggaagacttctgaaatgccttcagggcctttttcccattgtcttggctgtcgtacctggcccctttttagttatgctaatatctctagcaagttgtgggttcttctcccccaccacccaccaccaccctataaagccttttctttcttttccacatggttaggctacgaaatttccaaatttttacaccctgcttccctctttaagttccaacttttagatcattgctttgctcctccatctggacactttgctgcttagaaatgtcctctggcagataccctaggttgtcactcttaagttaaaacttccacagatctctagggcatggactcaatacagtcacattctttgctaaggcacatcaagggtgacctttaatcaagttcccaataagttcctcattcgcatctgagaacttgtcagactggacttcagtgtccttatcactatctgcattttggtcacaaccattaaaccagtctataagaagttccagactttcccatcttcttctgagccctccaaactcttagcccctgtaygttacccagctccaaagttgcctccatattttcatatatgtttatagtagtatctcactcctggtaccaatttttctgtgttaggctgttcttgccttgctataaacacctatgactggataatttataaagaaaaatggtttaattggctcatgattctgcaggctgtacaagcatggcaccagcatctgcttggcttctagggacacctcaaggagtgtttacttatggcagaaggtgaagcaggaacaggtacatcacatgcaagaggagagtgggagcaagagaaagtgtttwaaaaaagagaaactctttttttcttaaactcttaaaaactcttaaaaaaaacttcttaaaaaaagagtttctctttttttaaacaaccagatcttgagaaaattcacatcatgaggacagcaccaagccatgagggatccgcccccatgacccaaacactaaccatcaggcctcacctccaaaattggggattacgtttcaacataagatttggatggggaaaaatatccaaactgtatcacagcctgtgggaaaaatcagccctcagtatagctgggtttcccattccagattttgttgaaaaaaatccatatgtcagtggacccatacagttcaaccccatgttactcaacggtcaactgcacttccctgctgaatgcctccctttctcctcctctgcccatttagagctcccatttaattgccacatagttcatggaaacctcccagattcttcactaccaaaatgtcatctctttcaccctcaccaccatgtagcttttgtgctcctccttgtagagtcgtcatatatggttgtgcaggttgttttcaatctaactctgagagtgtcctgcatattacctgttggtttatgtggaaggctccctgggaagtgggccattcccaagctcagctgttgtgggtggcagcccagcacagcggcgcatccatgttctgacgtttgtggagttttttgtattctgtcttcctctgactctccaagatcgtaagctgcctgtagagaacactcgtagctcattcatcacctgtatccctgttgtaacttatatgtagttattgcttaatagctctttgttagatattcattcagcccgttttttgtctgtgcttggaagaactaattgaaaatacttcatcaaaaacgcgatgcaaaagtagtagagaaaaaaagcagtatcataagttaatattggtaatagataacctgtattgaaatcttaccatatatcaggtagtactttactaagcactttatgtttattatgttattttatcctcacaattatccagtataatattccttgcttcccattatctctttcctgctttggagatgagaaaattaggccttgagagatgaagtgacttgcttacagtcactcagtaggtactgcagccgggatgccaagccaggcattctggaacatagtccaaactccgaactcttgatacaaagtgtgccatcaactgtttctgccctcctatgctggtggttacagtgataatacaaggaggggcattggctttttgttgttgttacaggaatatctattcaggacccatgattcaccaggttctttgctggatactgtggatggggatraaaagatggtttctgtcgtctgtggtctcacagtagggacaaggagccagcagtttaaatacgtatcacaatgccttgctacagatggcggatgagcttttcacacaaggtgcagagttagcagaagaaagacacgaggaagtgctcaaagaagatttccaggaggagatgacttacaaagggaattttgaagaatgaacaggaattcatggggcttccaagcagggaagggcattccatggagagggaacagcacaagcaaagatacagaaatatggaaagtatgatgcattagagcaaatataagaagcttggtccatttattattgtcaccccatggctaaaattaagctgcccctctactgtagatgaacatgcaacttgaccatgatataggcttacctttatccattctccgttaataagaatccattatggcaactgtggccttgggagacagtcgtggaaacactgagggccaaatggaccrtctgtctccctggtgactttgtcctgctgcctctgacttggccctcaggtaagccactggccagtgggcaaacacagcattgtcccttcatgccaccaagcatcaccaaggcccagtggcagcttcttatagggcatttagggaagctgtagggaaaatatgcccctttcccctgagcatggtgagcatagataattttatgggaaagttgcagtctttaaaaggcagtgggtcccatggggaaattctgcagtgctgactgctttttgattcgtttattcagtttattacccttaggcacctgttacatgtatggcaggttggccttgagaaatttctttcttcaggtctagacccacccattcagcagcagcactggctttgccacccctgacttcagcttggttgcccaatcccagactcactgtcctcctccaaggtgcctttctcattgtattccctgtcctggagccattgccgctgacccaggaaccccagtgttgccttctgctcctccctcttttttttctcatatctaatatctgttctcctgaaatcctctagatccagcttccttgttgctcttcctgggatagacactttttttttttttttttttttttgagatgcagttttgctcttgttgcccaggctggagtgcaatggcacgatcttggctcacagcaacctctgcctcccaggttcaagtgctgctcctgcctcaacctcccaagtagctggaattacaggcatctgccaccacgcctggctaattttgtatttttagtagagacagggtttcgccatgttggtcaggctggactcaaactcgtgacctcaggtgatccgcccacctcggcctcccaaagtgctaggattacgggtatgagccacggcacctggccaacactgtcttaatcggattctcatttcacatccaccaagtctaatgatctcctaaatgacatgtctacatctgttcccctcatctcccatctatccattcagttcattgattcaactcctactctcttctaggcactgtgctgtagatcatgggcctgtctatttgaatgtatctgatgtgatccttgagcttgctgagctcacatggggggtgtagacaagtagacaggcaaccactacataaggatgagtaggccggtacgtatggctgggataacagttaggaaggacccctgacctagatgtgggtagtcaggaaaggatcctaggagcaaatgatggcggtcctaaggcagactaagagataaccaagtgctgaatgtggaggtgcagggtgggcaagactgtgagctccatgacagcaggggcagtgygggtatgtctgactcaccactgtgtccccagcatccagctcatcccctgacaaatagggtgtactcagtgaggatttattgaatgagcaactgcgggacagatgcctgcagagcaagctaaatatgataaggcccagggtggagagagagcacggggtagggggcgggaaactgagagatggtctgtatgtctggaacataggacaggtgtggggagtgaccatgccgacggccgagagctaaaaggccagtcatcctgccccccacacctccctgaagtctagtctgttaatttttattttattttattttattttattttatttcattttattttatttatttattttgtgatggggtctcgctccatcacccaggctggagtgcagtcgtgcaatctcggctcactgcaacctccaccacccagattcaagcaattttcctgcctcagcctcccaagtagctgggactacaggcatgtgccaccacaccaggctaattttttgtgtttttagtagagatggggtttcactgtgttacccaggatggtctcgatctcctgatctcattatctacccaccttggcctcccaaagtgctgggattacaggcgtgagccgccgtgccctgtccaaactgttttaattaaactttcattgcattctcatgtccttctctgctccaaccctggagccctactaagcccctccgcccccggcccccactcctaatacaccctgggcccagcctttgtctgttgctctcctcagattgcatcccctctgccttcttctcttgtcaaagtcctgcatttccctttagggcacagcttccctctcctcttacacgtccttctgaccctgtcagaattggctgctgctcttactcccgtggaactttgtgttcttttgtagtccttatcacattccgccccgtgcttatatttaactgcgctcgtctgtctctgagcagtatgagctctttgaggtcagcgggccgggtcattctcatctttgtatttcccacagtgctttatttctagtaggtactcattcatggcattacgctttatgtcattatttgtagtagcacaatagtatttatgctagtagttcttgactgacgtattgctttgtatctagccagtagggcgcatctgctattgattattatcccatgtttatttttgatgtgccgtattttgcacttcttattttatttaatcaacacagcagcctgatgagaaggtctttctccacattttccagaatgtagaaatagcagtgcagaggggtaagtgacatgctcaagattcccactcatacatttcagacctgggtttggaacctgtttccatttaactccggaagttttgcccttgcgtaatgctccttggtatttcgggtgctgcctcagtaaaagcaacatcagacatctcagctcctaactgaaagtgttcagggcataatgaagttgtttgccaccagaatctgattttattatcaaaagtattaaagtaaccgcttggttggcacagaatccactttggtctgagttctggccaccaaagctttcagtagaggctggaggccattggcttagtatacaacctggaagtggtctatttcagatgaacaaaagctatagaaatattaaaagtgaggacaggctgttactgggtgatgggagctcccgatgactccatcttaaagcctggttttcttttggagaggaacaagcagaagacagaacttacactgtgctattggagaagtctcttgccagccgcctgcagccagtctaaaaaacttacmctacattgttgtgtttctgcgttaaggctgataagtcagatataaaggttgaccaaattgttaacacatgctctacttacggctttcagaaaaaaatgaatcctaataacaggtatggcgtttggcctgaattgggtgtcagtagtgattggtggttggttgtcacttctctgagtcacagaggttgggtgagatgacttctctccttttcagctcctgcagcctcaccagtgagcactgttttcgtaacattccagatttactttcacaattgccgttagaaacgtgccccaccgtaggaactgtgaagagtgtgtttttgcagctgtaattcaaagagccgtacctctccacctgacccttccttctcacactccccacagacggaaccctctgcacttccaccttattgctgactccattgcggagcagatcctggccacgctcttccagacctggatggtgccygctgtgcgtgtggacttctacaatgcagacgagctcaaggtatgggcaggaggggaggcacttccgtgatctcctytagctggaagcgttattacttgkggttgagcagactgtarcaatgccagaaatctcagctcctaactgaaaatgtgtagggcgtaaggaagttgtttgccascagaatctgattttattatcgaagtattaaagtaacccctttgagtgcacaraatccactttggtctgtgagttttgaccaccaaggctttctggagacgctggagrgcattggcctggtgtataatctgaaagtggtctatggtagctgtcatctagagagttccattacccagtgaagtaaaggctgaactcagacccccatgggctggggtttaaatttgcctgttgtcacttactgatcaaaagacacaaagtaaaccacgcatctctgctggacctgttttctcatcagtagaaaaggtggatgaaataccaaactcatggggataattaagaggctcaaatgagagaatatatttgaatgtgctttaaaaagacactgctgaataaatattaaaggttatgtcaggctggaggggtttcaaccaaatgaaacctttttggtcatctcttccccttacaatttttttgtggtgccattttgcttgcatcgtgttgagacccacagcccgattaagaagtcctgtatattctggctcttgattctacttccagtcttgtcactggcattcccgtaaaccttcgctattcctttaactctaagtagcagagcacacctctggttccctttgccccctcttctgtgtttgagtctttgcttattctgttccttccatctgatatttccttcccacctatcttgccacaactcctgttcgtacttcaggactcagctgcagtgccaactcctcttaagaaacagcctgacttccacaggaaagaggaagacattttttgttcacttgtctgtctactgaacctttcttaatggggtaggaggagaggagccgcatcttattcttttctatatttctggtgcatagtaggtacccactaatgcttgtggatttaacaaattgctgtgattagaggaacatgtaactttgcagaaatrcactgatgctctgtctctgatcaccttgggaaggactcaacacctaagcatgaggctgactctggcaaattgcttgttccaaacctcataaagccattatcttttcattttagagccatagcatttttaatagatcactgacatgccagccagagtttctgattttcacatatttcaggctctgaggttgatggagatgttcagaatttagcatttggggattgtcttggtaatttgcgtgccattccaatctattctgagctaaaattgattaacactcttaaaaagggaaaaacaaaatttagcaaattgctgcgctaattaaggtgaaagcaagccactctgtctcccagggtcttagcgccaacaccatgggggaaaagcaacatgggaggaggagcagcagctggttccgaaggatgcctctgccgctgtgttcaccatttacctttctttgggtaggagtccagtgccatgtcccctgtgagcctgcaccctttactttgtaagaagacaccgaagtgtgctgggcgtagtggctcatgcctgtaatcccagcactttaggaggctgaggtggggaggatcacttgagcccaggagtttgagaccagcctgggaaacatagtgagacccccacctctacaaaaaaattttaaaaattagccaagtgtgacggcacacacctgtagtcagtctaagctgctctggaggctgagggcagggggatcacttgatcccaggagttcgagaccagcctgggaaacatagtgagatgcgtgkctctacaaaaaactagctggatgtggtgactgcacctgtagtcccagctactctggaggctgaaaaaggaagatcacttgagcccaggagttcaagactgcagtgagctatgatcgtaccactgtatgccagcctgggtgatagagctggcatgtggtacaattgtagtggtatgcattatgatgtggtacaatcacagtggtaagatcatggctaaatgattgtatcattttttttcctcaaaaaagaaaaaaaaacggaaaaaagaaaaagaaaatacaaagtgattgggaaaaaactaatttcaaatcctggtttaccgccgaagaattctctaactggttttgaaccttggttctctcagctctcagatggcttgggactgagtcagccacaaaggaaggggtgaaataagatgggtcagtgtacacgacatgacagcttcttaaaaatgcttcattccacttgtagccaaggccagaatgacttaaaatgcactcgggtggtgtggccgrttgtgaagtccatcaacagctaagaagttgaaggagtaaggtaccatggactggaattccctcctggaagccccttccatgaggtctcggatgaaaggggagaaggggaggaaacactgatgctctgactctgtcaggcctactttaatccagggagaccaactgtctattattttacgtgctggctttatatatatatacatccgaaataaatacttcatggcttaaaaaataataatttagaaaatacaatctgatacgttcaaaagaatattgtctctagagtcctgtcctctaacccgttgtctackatygaagacttcatcaaagtttcctgacacctgctttttattcccctaccaattaaccacctgtctctctcacattcctgaatcccatgagagtgttgtcagaatccagtacaacagtatgaaagtatttataaaacgtaattttttcataatactagtaactrtggttcatgacaaagccaggatgaaaacccaggcctgtctgactccatgatctattagtctgtctatgttttagtttatacataacccggatcaacaaccccaaagccatgatctgcctactccaccagcctgacagcccctctgtagtggcatcaccatctgcttagttgctgwtctggaactgagagctcatctttgtccctttctcttgccctgggtctaaccacatcacaccctagcgtggctccacctcccctacacctacctagtccatgctttgtgatctttccccagcacaatggcaagtgtttttcacactagtctcttccytccactgctcacctctcctcccccrtatcttttctctcagtagcaaaagtcagctttccaaaaacaagcgcagtcatgccactcttttcctctgggtaaaaccttttctggtttcctactgctctgagctagaggccacagtttttgtttgtttgtttgttttgcagacagagtcttgctctgtcgcccaggctggagtgcagtggcgtgatctcggctcattgcaacctccacctcctgggttcaagtgattcttctgcctcggcctcctgagtagagtagctgggaccataggcgtgcactaccaggcccagctaatttttatatttttattaaagacggggtttcaccaagttggccaggttggtctcgaacgcctgacctcaagtgatccatctacctcaggtgatctgcctacctcagtctcccaaagtgctgggattacgggcatgagccactgcccccggctgaggccacagttcttaaccgagtcacatctctctgcggacgctggctcctgcctccttccaagttgttcttgcaccacttgcgtccttcctcactctccagtcctgcagattcattttgctccttctttcccaccagagcgttctatttattaaactgttgcccaacctccttcctttcccccattgctaatgaataacaagttcttttgctaaagttacgtgtactcagggaaactttccctgtctttatcatttcataggggttgctttgttacatgttctcctagaatcacatacatttcttcrgtaaactcaacacagagggtattctttcatgcttttgtgtgatgagctaatagatgtctatctcctataccgtaagctcccaaaccaggatcacgtctgtttttcaccacctttgtatcccaaaggcctgacgtgaggcttttaaagatrtttgctaaacatttttaaaagaagctttatagatgtgtgctaaaactcataaagatgcttgctaaatgactggcttataaagatgtttactraatgactgatacacaatgaatttagagctgggtccctaagaataataaaaccgatggcagagtttctttatcacggtcaggcccaggaattcacgtttctttatcactgtagagcccagggtcaccacattcctaatgcctatttgtgtcccagaggcttgtgtgggtagccaggagtttgcccaccagccaccctgaagtcgcatagataaggcagcaacatttgcaccagcccacctcctaagagcagctctgggacaggtgagtgagtgtctttccatgacaggtatgctaggaaggaaacacattaaaacaccatccagtagacgaccttagggaaggaggaagaacaggagagaaatggacttgcgccgtgttccacagttgcattcaggaagcatgtcagatggtaccctcagcagacacccgtgacggcctcccttgatacagctccaagaaatcactttgtacagctgttggaaatggcatttctcagaaatgttcctgtgggccccttatgatatctgttagtgctgtagaatgaagtaataggaaacaggacatttgtgagggattggtgcatgattaaaaacgaactgtgggaaattcgcagtggactggtacacttctctctgtaatgaccaattagtggggatttgcaaatagtgatggctcagcctgcctatctctatggcctgtgaaatgctcattggtcttcccaatgtttacatggcccatttgtttccggcctccaactcctggtaccaacaggctaccaggactgaaggtacctctgctctgaactccactcactcaaaacatgcagctcctgtctacaggaggaaaacttatttttgcgtagagctttgtcaatgatgcgtgctgtcactcatctctcatgatgaccctgggggttggaaagataagtatgattacctccacctcacttaagttaaagtgtggggttgaagagcatttgcttaagattagrctgctaacaagtgctgacgctgatatttgacttttcccttcccaaaagaaatggtatgagatagaggattgtataattcagtagacatggatgtagtggagatcttaagggaatttgaaagatatggaccacagcccctggggaatgactgttggttaccactgttgagttgcacttgaattcaaaattcctcttttccatggctttggatcccacaggctgtggtctaacatctgttgtttaagaatcacttactcaaccattgtggaagacagtgtggcaattcctcaagaatctagaaccagaactaccatttgactcagcaatcmcattactgagtatatacmcaaaggattataaatcattctactatraagacacatgcacatgtatgtttattgtggctctattcacaatagcaaagacttggaaccaacccaaatgcccatcaatgatagactggatcaagaaaatgtggcacatagacaccatggaatactatgcagcctttaaaaaggataagttcatgtcctttgtaggaacatggatgaagctggaaaccatcattctcagcaaactaacacaagaacagaaaaccaagctctgtatgttctcactcataagtgggagttgaacaatgagaacacatggacacagggargggaacatcacacactggggcctgtcagggggtgggggcctgggggagggatagcattaggaaaaatacctaatgtagatgatgggttgatgggtgcagtaaaccaccatagcacatgtatacccatataacaaaactgtatggtctacacatgtatcccataacttaaagtataataataaagaatcatttacttcatttctcatgttttacatggttctctcatggtctgtttctcaacaacacctctatggactaggtcctgttattattcccattgtacmtacaaaggaactgaggcataggggagttaactaactmcaaatcatgtaaccggtacatggcagagccaggatgaatatccagaactgtctgactccagtatctgtgccctttctcctatgtcctgtttccctctctgtggcttatttyagctaagttactgtcattgtgtctagacaaggactctctgagcttttgatgggggcaggttccttctctgggtgttcctgaagaaccrgtatattaagcatggctcctgcatggaaggcctgctgggaatggtacttcctgtaggggatgaaagggagcccttctaaggatgctgctgaggagggggatggctctgtcacttccatccaaggatcctgttctaaactaacagtcatcactctagacagttggctttaaatcaggaaaacatttcttgccagttttcagacaaggccctacatgtctaccagcctttgatcttgctccagctggcccagaaagtcacccccatgccatcactggggtgcgcgtgatcccgagctcaggaagggaagcggcagggcagtggctgtttcatgattcacctgtctagctgggagccctaatttttctccttttctcttagacccaatgcccgcttgttaccaacatcagaaagatgatgaagtgagattcaggactgtggctgcagaaaatattgatggtggactctaaaaactggcctcctactcatccttaattgcctttgtgctggtctctatggaggatggcagaggttgtctttagagaactgtaatcttccagccccctgccgtcctttaggaggcagactcattgttcctgtcatgtagggggtgggtaaactgctgctaccctatctgtttcctgggaagctatgcttcctgaatactggacattttcttctgggagagactgaagagagcatgaaatcataggattctagggtgggaagaaggcttaatacttacaagttttttttttttttttttcatgaattaggccaagaagtgcaactgaattgcccaacaagagatcacatatgtttctttctaacatatagcttttcccagaatgggatctgggttttctggctgctgggcctggtttatagttcagtggggaccacacttaacaatggttgaacttcaggtgctgtgacgaaatgctctcatraggctggagcagctccagtgaagctggacctgcagaagaaagagagaagacatagatatgtctcatggaagggcattatctgctctgggatgtcctgcagaaacatgagaaatgaagtaaggtgtgtgtggccttctgaatcccccagttcactaataatgtgttaatacscagagcaatggacagaggtgaataaatagcctatcaaaatgggtatttctggctctcctttattggtgaagattgattgcagttaaatgagaacttgtaatggaaagcaatgcttggcacataataggcactcaacaaatcttgctttcttctttttgttcctaatgtggctgcctttcatatatttaaagatgactgtaattaacttcttaaatcttttctaagcccaccatgtcaacccttcctcttctcctccaacaatgactgccgacctgtcatcagagggtctacattttggcttatttttctagaatagttgatggatgtatgctcttcttccttctttcctttgtggtcctgtgttattcggcagggtgacagaggttaaatattatgcgcaggtctggaaaaattaccactttcccattttctttattgttttattggttcttggattatctgtgtggtttctgaatacgaaggctggttctgcaaggtcagcagtgtacctctggcctctgtcatgggcttttctgtctcacacaatgagggcaagatcacagaatggacatggaaaagcataaagcacttgaaagcatacctttgtgtatttataagactgatgtttgactgtgaaatgttggacatagaaaattttagacaatgaatgcaaactctaatctgcattataaaataatctttttatgtcatttgttcaattcactttttacacaggcagatttttctttatttaacagtcttctaatgaatggttcttgtccccttttgagaagcatagaatcttaattagaaaggaacttggcagtcatctagcataaccttccactttcttctataatattctatacaaatggtcattaatcttctgcttttgaatacttccagagataagagatcattacctcccaaaggaccctgttccatatttagaarctctattagaaatattcgccttatgccttactgaaatcttcatctttttcattctcctcattggtccacctgagcattaatgaagatcaggtgcaagcctgtgtaccatttgtctgttccctcatctgccttctctactagacagagggaacctagagggcaaggtctgtaacatttatgttcatgcccagcctttggcatgggcatggccagatttggacaaaatctggccaatcctggcctccagcaaatacctggcttctatgttttgagctacacagtgtgcatcaaccagttgtttgaagacctgacacatttactgagtcctctcttcttctcagtaatcactactacatttcttcaactgtacctgaaatgacagtgyatggagcctaggtgacagttgacccttaaaacatgtcttctgacctgcttgtggaataaatgccttccaggttgctgacttgcttaaatgtgctccccattgtgtctccatcccatagacagagacattctctgtggttcwgcaaatcacagcacttggtctagatctgcatatgtgacatgccccaccttgagctacagttggtctgagctcagagtcttaaactcatttaaaagcagtgaagtgtcccaactcaccttttttctcatcctgagcattgtttccttctcattcttatttattgtggtcttctcattcatacttcatttaactgataaggaaatgctttatctgtatcaaaacatctcttgtaccccataaatatatacacctactatgtacccacaaaaaataaaaattaaaaaaaagagagagaagtgctttcatatacctactttcattctgtcctcccaagaactccatgccacagagaggacatgtgttttattatgttttatttctaaggaatttgccaaaagaattaaccaaatgctgctaaagagagcagcatttggatggagcggatgccagaatctcgttcttgtgagccttccctgcagtgctatctcatgcaccacaagtcttacctaccagaaacttctgttaagaaacaacttcagcggggtatggtggctcaagcctgtaataccagcactttgggaggctgaggcaggtggaccacctaaggtcaggagttcgagaccagcctggccaacatggtgaaactctgtctctactaaaaatgcaaaaattagccgggcatggtggtgggtgcctgtaatcccagctacttgggaggccaaggcaggagaatcgcttgaacccaggaggcggaggttgcagtgagctgagattgcgccattgcactccaggctgggcgacaagagcaaaactccatctaaaaaacaaaaacaaaaaacttcattgattcaagagtgtggttataatgacggagttgggatcaaaacaagaaagaccagaggtgtttgacaaataatgagaaagcaatgggcagggtaaactggaaattatgatgaggttaggaaatttgcactgakcacagagtctttgtccaaatgttatgaaaggataaaaggctagagttgaggagtgagatgttagagatttggtattttcgatgaggccctttttggggttctttttttggcatgttagcctgggattgagtggctgaggtgttgttggaaaaagttaatgaaaactatgggctctagatactgcaaggcccagggtgttggctgcttcatccctaggatgatgaaactcaaggaaaattgtcaagcaccraaaggaattgtatacctgcagatcaaaaggagcctcgacaactaaggtaaaatcagtgataagttgcccacattagtgtacaccctagaaaattatttgaattgcaaggattaaaacacaatccttcttttaggaatagtaattcccattattaagagttgattatttgccaacctaatatgcttaacttgcataatcttcttttatccctaccatttcctggcgaggaaactgaagcttaggaaagagacttgttcagattactcagcgaatgcattgtggaaccaaaacatgaattttgggtagtctgactcttgagcagcgctacccgatggaaataaaacggcaactcatctgtgtgattttaaattttccagtagtcacattctgaaaagcaaaatagaaccagtgcaatacattttaataatacatctcatttaattttatttatccaaaatagtatcgtttcaacctgagatcagtattttgagaattactgagatattttacagattgtaaatattaagtctttgaaatctggtatatattttgaacgtctcactttggacttgcgtattttaagtgctcagtaacacatatggttgttgatggctgtggacaaggtatggaacttggcttttaacactacgtggtaataccagggcagagggtggagacaagcttattatcttggaagaataaaaatcccgcctcagcttctgtgctgtgagagtaggtgtccaaataaaatgtctgcagagttttgagcaaaatasacagagacccaagaataccaaccaagttctctcatgttaataaggcaacagaaaaaaaatgataggctttgcaggaactcagaaaatatacaccartaggccaggtgcagtggctcacgcctgtaatcccagcactttgggaggctgaggtgggtggatcacttgagcccaggagttcgagacccacctgggcaacatggcgaaaccccgtctctaccaagaaaatccacaaattagccagtctcataacctkgtctcaaaataaataaatagacttaaaaaaattttaaaaacagaaaaaaggctgggcgctgtggctcacgcctgtaatcccagcactttgggaggccgaggtgggcggatcacaaggtcaagagattgagaccatcctggctaacacggtgaaaccccgtctctactaaaaatacaaaaaattagccggatgtggtggtgggcacctctagtcccagctactcgggaggctgaggcaggagaatggcgtgaacctgggaggcagagcttgcagtgagccaaggtcacgccactgcactccagcctgggtgacagagcaagactccgtctcaaaaaatacacacacacaaacaaacaaacaaaaacagaaaaaaaaagaaaatatacacaagtgtattgttcttgaagaaactatagcttctttgcaagccacccaaaaaagtgatcaaaatgaatattcaggaatgaaaaggtattgttataaaggggcagacagtgtgtacagagttacacatagagtgatatgtaaataattgttttaagtcagttgcaaggctgattgcaaatgccgaaaagtatttgtcttcagaacatacgcaaataataagctgatcacagccattttaaaacacactggagagtatgagttgggtttaaaagctgttaaatatagtggattttgtggggtaacttaggtggtatcttttaactctttactttgattatcctggaaaaaagggtaaggtgtttctgcaaagctcagacatgaccccaatgaaataagtagaattagatctaatttattagtgatgattatttcaaatgaaataaagcctaagtaagaagcaaagaagatgagacagaaaaaaataataataataataaaatgaactattagatagccacatgggaaaaaattaatcttgctcctcacttcattccacatacaaaaattaacttgaaatgaatcttaacacctaaatatgggagctaaatctgtagaacttatagaggaaaacaaagaaaattatagggacttcaagttgggcaaagatttcctccctccctccctccctctgtcccccttccctcccctcccctcccctcctctctcctcccctcccttctcctctcctctttctttttttcctttcttttctttctttctctgggtctccctttgtcacccaggctgaagtgcagtggcagaatcatagctcactgcagcctcaaatacctgggctcaagcaatcctcctgcctcatcctctagagtagctgggactacaggcacatgctatcacgcctggctaatttaaaaaaaaaaaaaaaattttttttttttttttggagagacgggtcttgctatattgcccgtgttgatcttgaactcctggcccaagcagtcctgctacctcggcctcccaaagtgttgggattacaggtgtgagccaccatgcctggcagagagatttcttaaataagacataaaaagcacacactaaataagaaaaaaattgataaattggacttcatcgaagttgaggatttttgttcttgcaaagacattaataagaaactataaggataagctacagactgaaagaaagaatttgccaagcatctatctgatgaaagatttgtatctgggatatatggagaggtcttacaccaataataagaaaacaacccaatttagaaatgagcaacatattttaagagacatgtcagccaaggagagatggagtggccaatgaatccctgaaaaatgcaaatcaataatgacatcattagtcatcagggaaatgcaaattaaagaccatcctgagataccacttcacacccactacaatggctaagattaaaaggactcacaatacaaagtgtcagtgaggatgtggaacagctgcaactctctgacatcactgatggaagtgaaaaatggtataccacttcagaaaacagcttgktagcttttttgtttgtttgtttgaggcagagtctcactctttgcccaggctggagtgcagtggccccatcttggctcactgcaacctccgcctcgcgggttcaagcgattcttctgcctcagcctcccgaatagctggaattacaggcacccaccaccacgcccagctaatttctgtatttttagtagagacggggtttcgccatattggcccggctgatctcaaactcctgacctcgtgatccacccgcctcagcctcccaaagtgctgggattacaggtgtgagccaccacgcccggccttggcagctttttaaaatattaaacataactcacaatatgacctagtggttccactcctaggtgttcaaccaagagaaataaaacctatgtccactggaaaacttgtatgtggatattcgtggcagctttattcataggacttcactgactgtcagctgaagaactggtaaacagctgtggtatgtctcagcagtgggaaggaatgaactgacggcacatacagcaatgccagtgagarggtttgatgttaagtgaaagaaagccagaccgaaagactgcatggtaaatggttccattgatgtgacattcttgaaagcaagacagagttaataggagccagagggtggtgtggtgggactgccyagcaagggacaccagggcattttcgagggcgatcaaattgttttataaastgactgctgtggttgttgcaaactgtatacatttattaaattgaactgtacgtttaaaagaggtgaattgtgatgatgtaagatttttttctcgaagaatgcataaacatactatcacagaagtaaaatcaaacatcaattactttaataaacgtaaatgctttaaactcttccattactggataacaactttaattcttggttaaatagcaatatggtgtgagtgtgttaattttagactaaatcaaatacaataaaatatatttaattaggtacaactaataattttaaattggtaagtttaatacccataagaggatagaatagccgagttattttccaagtagaaaacttccagatatactaagcacaaaacaaaaattgatagaaatatatgttgggagagctttggccacagaaaagaaagatgaatcatcttgttaatgacagaaatgatttttaaaacataatatcagtagttattgaactgcctatcatatggaataaaaatgagtgaagtgttcatcaaaaaaattacacaaatgatagataccataaaaattacacaggccctactcttgaccacagtgcagcggaactacatatcagaaacaaactattaaatgggaaattcaaacttcttggaaactagaggagggtaaagattcttcctaaatgctatttaatccaaaaggatataaaaactaaaattatagtctgttttggtatcaacagaagaggaacatttcatagtaaagtttatggaatgtggccaaagctgtcactggagatattttaatagcctccacttctttcattattcaaaaacaaaggtaatgataaatgaatcttgcatttcatgcrgtaattgaaatatgaacaatggtgtgtccctaaggaaagcagaagggaagtggagttcacagcagaattctgtgaagtaagaaaaataataaacagaaaagtaaacaaatattaattttcattaatttaaattaatgaaaatattaatttttaattaattaatttccatatataagaagatggcaaacctctggtaaatttaataaaacaatggaggaaatattaataaacagaacaatgagtaaaggtatacaacaatataaatttgmaaaatggtaatcaaaatcaatagccaacatttacttgtcacttatcatgtatcagacatagtactaaacatttagtgttatctcattgaaatctcatgacagatccttgaaattagtgctgtgataatcttttacagaggaggaacctgagagtagaggcagctagaccaagacttcttagctgtggagtggtggaaacaagaattgagccctgcagcctagccgtgggccctagcctttcctcctcacttactacagttgaactctatgggaaattccatgcagatttatgaaagcctggaggtgtaatgttgtgtttgcctggaagcagatttgcatttattgcggcyagttgcctgaggccctgtcagtcctaatcactttgaattaaattctgcatttgaggtctgtcagacaccagatagcttgagtccagacaacacaccactgtgtgatccatcttgagggtgctaattctcagggaaggcctcccacccccactttagtagtcatccagataaaaatcagtgtgttttctgttcctcccttctgtgtgtgggggtttgtttctaaatcacctttatactaagagtgtaggattcrggtcctaacttcatgcaaaggttctctctctgactccctcttaagccaggccatgggcctcatcttctccctcctgcaccctcacagcagtgaaagcagaaggtcaagagccattcccctcaaagcaatactgagtttcagggattacttatattctaattttccaacttggacttgcttttcatttttgtatttttgctgtgatgccaacttaagttttatatgcgtgcgtgcgcacacacacacacacacacamgcacacatatatgttccttgttaacttttcaaaatgttttcactgtgagggttttgaggttgtctagttcactatgttacctgaaataggaatctcccttccycatctttcttctagagctcagttagcatctcaaggaaagtgttctgggcctggcattctgttcaaatttgggttccccttctataggttatctttccacctgttacttcattttttatgacattgatccttgtgtacttatttgttaaatacctttgatgcatgggtattggtggatgtatgtctcacttgccactgcagtgtggagcctacgtggatggacccctcggctcttctttctgcttcccaattcttagcatgtgcttgctcatagttggctctaaccaggtgtttgaatgaagaagtcttggtaagaattttgaggctgtttcattcagcacggaggattcccagtaacgttattttatctgccgtgaacataaaaagagaaggccgataacttaagttctgggtatccatggtctcttgctcaagaaagaatttccaacctgtagagaatgaatggattttccaacaaaaggcattaatgtgattgaggatttgggaagtgatcaaataagatatcaccagattaaaaaaataaattttgtattgattgaaagcttgaatttaaaaacagaaacattaaacaaaactagaagaaaaatatgaaaatgttggtctaagaatgaggaaggtttctgtgtgcctaaggaaaatgaaaaaaaaaaaatcttaaaggaaaactccagtagatttgattaattgcaatggaaaaaatcaaggggaaaattctgaataaactgaaacaaaattaaaggacaagtaataaattggaaaaattgtacttgaaacagatayagcatgtaatacataaggagctgttgcagataaataggaaatacagactcgcagaaaaatgggtaaagaataagaataagggaactcgcaaaaaaatgcaaatggtaaaaatatacaaatatattcaaagaaagaagaaaataagattttatataggagtctttaaaaatttttrttacttattaatgggaagtatctatgagggccaaccctycttaaattgtctattgtaagtcaacatcagaataccctttttggatattttggcaatatcaagattcttaaaaattatatacaggttctgtgaggcagaaattctttgctccaaggaaataaaggtggaatcaaaggattttcatcatggtattgtttgtttgcaatagtaaatcttagacacaacctaaatcccaacattcatgaaaggttaggtaaagtatggtacatcgttgaaataagatagttgaagcttttccaaatcatttttaaataacattttattgatttaatagcaacgttgaatgttgcttcaataagtggaaagggaaatgctcatgatgtaatattaagtttaaaataagacacaaaactagttctcttcaaagtttaaagatgtctgtgtagttatataattatttacaaaggcagatcatatgacagtgtttaatatgttacctctgggtacatgtattctagttttctcgttttcattgcattttgcagactttctgtagtagcacaatttttaaaactatatttttctctcgactgtgaaaggagcagagggagggaaggaaagagaaggtaattaatgacttcacatagataatgggaatagtaaccttgttgttctcagctgggcgcggtggctcacgcctgtaatcccagcacttcgggaggctgaggcggacggatcatgaggtcaggagatcgagaccatcctggctaacatggtgaaaccccatctctactaaaaatacaaaaaattagccaggcgtggtggtgggcgcctgtagtcccagctacttgggaggctgaggcaggagaatggcgtgaacccaggaggcggagcttgccgtgagccgagagatcgtgccactgcactccagcctgggcgacagagcaagactccgtctgaaaaaaaaaaaaaaaagaaatcttgttgttctccctgtttgggggcagcatggcgtattcacaggtgtaagggtgcagcataccatggggtttggctcacctgcatatgacttgtgactatcatgggtgtcattgtctctgtaagaaggacttgcaagggataatccaggtagaagagcacccacaaacttatagaggctttgtgtgcatgcgagcgcctaccctttttacttaggtcattttggaggtgtcttttgggaacacgtaaagagtaacatcaggttttccaagccagctggtttccctgtgctacggaaaaaaatgaaaactcaactggcagtccatccatcttaatcctgaaggaactgggaccttccccacttacttaactaggtgactcagaaaatcctaacgtgatccaacccaaactccaaactggctaacttagaagtaacagatgaaaaagagagagtgggccgggtgcagtggctcacacctgtaatcccagcacttcgggaggccgaggcaggtggatcgtttgaggtcgggagtttgagaccagcctggccaacatggtgaaaccctgtctctactaaaaatacaaaaattagccgggcgtggtgagcataaaggaacctaatggggagaggtcacgaaagactcactttacatccctttgtgcagctacagtgattcctccctgcattacctgtgtgatcagtttcctgatcttttatgttgtgatctaatatataacctgagtaaagtgccttaaacaatctactaattttgtgtcaaatatcaagaagcccttcgattggcagttccaagagtggtggttattatcttgggaattttcrtgggctcctcatggtggaggggtgagaataaatccagaaatctgctgcctacaggactgtagatgggaagagggaaggcaaccttattctcatatgcactctgtctctcattaccaaacagggaatcttctcccccagatttcctaggagactttgcttcatgtacattggccaagatggtgtctcaggcccatgacctgtcttcagggaagactgaaaaagtgatgattctttgtgtctttgcctgtgtgtgcgtttctatgtgtgtctcagtgtgtgtgtctgtgtgttttcagccttctcagtagggaatctgaagtgtagctctctggataggcaaccaaaagaatctcccccgtctcctttgtaggtttgctgtgagaagaaaatgcttatctcagaagcaggaataattaatgtatataagtgagtttctctctcctctcacactcctttttctgtggtgtttgtttgtttgttttgtttgttttttattgagacgaagtcttgctgtgtcacccaggctggaatgcagtggtgcgatctcggctcactgcaacctccacctcccagattcaagctattctcatgcctcagcctctggagcagctgggattacaggcgcgcatcaccatgcctggctaatttttgtatttttagtagagacagggtttcaccatgttggccaggctggtctcaaactcccgacctcaagtgatctgccagcctcagcctcccaaaatgctgggattacaggcgtgagccaatgcgcccagcccactttctctttttcatctgtgacttctaagccagtttggagtttgggttggatcatgttaggattttccgagacacccagtacgtatgtggggaaagtcctgcttccttcaagattaagatggatggactgccagctgagttttcattttttttttttcagtagcacagggaaaccagctggcttggaaaacctgatgttaactctatttaataggtagctgaattctcatctgattaggaggaaacaactcaggtctgtacctagatacaaatcagtcagtggataaggatttgctgaatgcacactgttccagaatacagatgaggaaaagctcatgtcttctccaagaatttagtgaaaactaatgaaatagggaagagtgtagtaccaatcagctaccagctggatagtcagggatgacttcacagaaaaaggggaaccctgagccgagccttgggggccactgtgatttccaggagtcggggggaagtgtggtgttcccatgctaggtacatcattgtcgagaacacagaagctttgaggaggaggtgaagaggaggcgtaagagcattttatcttgctctttgagttaatgacaggctttcgttgcccaaagaagagaatactttttcccaagcaaaactcctttacctgctttttatctgctcagcttagctataaaagttaatactcttattaaactttttctwttagaaaggaaagaaatgcacttcttttctctgcctgacacttccttctctttttcacttatgaagggcatacctttttgataattgaggaaactaataaaccagatctcaaactaacatccaggactggtcaggatgcccacagcggggaaagttgggccaatttttatytctgaggtttcagtatcagtatagtcagtatgtccacattttgattaaaagaaagcaaataaatggaatgcctatatatgtgtcttggaaagtgctaagggagcttccaaggtaaaaatagtaactatctatcacaaagtgtgttcttatgggggagatatgtgtgtactgaagtgcattactgaagggatggacaaggcgagggaagcacacttcatactggatgggggggacccaactgtccttatatttggaaaattgaactttcattttatagtgtacagattccattttaaaatcaatgtccctgacctattcagtgggctcagggrcagaagatggagctgaatgggataggcgttgttaaatttctttccgaggttctaattttcttatttatcgggtaacttgcaacaggttgccagctatataccttgagaggcattgattgctactaagtccaaaaccctgaccttaaggttttcaagtccagtgacctagtgacaatatggatcctgagggcaggaatcttggtagatgagtagaaaatcaagagataaaattgatttattttctccagacttaatattttgccctgtgatggttctcaaaaagaaggtgttttggtgaaaaactacctccatgcactgccttcatcctgtggaggtgactgcattgagaggcagattcatttttacagctgacttgacagggagggtttgacatggtggctgtgacagaaaggtagatctgggatgtgggggagatggatcatgtctagctcctagaattctggaacaagctggtgggtgcatggtggtaggaagatggagaaaactgaggaaggattgagctttagcaggaagagcaagagtcctatttgtcatctagacagggtataatatatgtgactggaactgtccaaggtagacatgtgctcatacttaatgtggtttgtttcccctgaataataacatagtacagtatccgcagggggcacaaatgcccattctttaagcatcctgcaaagaggtgttcctggttgaaagcacagccaggtacaccttggagctactatctagcagaaggaattcactctcctcttctttttgtacaagacaagcatgaggatgctcttgacctaatgaagttaacatttgggctcagatgccaagagtctgaactttggtggaagtattcaggggaatgctgagtaacatcagctgtccagcacctggagcttggagcccttggttcagtgtgaagttgggttttggatgaggcgtacctgctgggtgaccagggtgcctaggtacagtggaaaggcgtaatccctcttgttgagagaatggcagccaatggctagttcattgccttcagccaagagagatgtccctgaatcagtcactggacaatcttgcttatctaaactttatattctttcatgtataagtctcattcaattctcttatatgtagkggttaaagagttgtcacttttctttctttaaggattctgaggacttcaaactcatctttttttttttcctctttcaaggtctttcctacttccagataatgcaatgttttccattaggtcaaaacttagacaaaatgtgtactctcmtgtaccaggacaaagacttttcatccacatccatttttttctgagtttcagctggtacttctgagcaaggtgcctcaaccttagcactcatgatgttctgggccagatagttttttgttgcgggggctgtcctgtctgaggatgttgagtggcattccttgcctctgccccctggatccrgtagcaccccagtgcccaagtcatgacaaccaaaagtgtctccaagtattgccargggtcctttgggggcaaaattgcccttcatattagaaactgacacaattggggtgaccccacgctctaggcaggtgctgactgtgaaggtgatgggatagaaaatggaagtactaaagtcagaggccagtccaatggatttgtgtcattttattcccagccatgtgaagctttaagatgtatctatcacttggtgaccccatggtgatgtccattcattactctctttcctcatttgggacactgatgggtcagattctttttttttttttttttttgagacggagtttcactctgtcacccagactggagtgcaatggcacaatctcggctcactgcaacctctgcctcctgggttcaagcaattctcctgcctcagcttcctgagtagctgggattacaggcacgtgccaccacccccggctaatttttgtatttttagtagagatggggtttcaccatgttggtcaggctggtcttgagctcttgacctcgtgatctgcccacctcagcctcccaaagtgctgggattacagatttgagccaccgtgcccagtcagattctctctgtcttctaactgaagcatggaaaacaagccaggtcaacaaaataactttatttatttctaaacaaagttactttggataggaaacttggaaacatttcaagttttcatccctggttgtaccatttcaccaagctgattttaggaaaaggtgcacaaaggtatcaaaatgtgaattttcttgctgagaacagtacgtgatgcttcacagtctcttaattccatctgtttcccatgataaagttccagcattaggtactggtgttagaaggccctccacattatgacagtgattttcctgaaggtcagaaggggcaaattttaactctcccacttactagcagtgcaatttgagacaatgatgtttctaagtcttagtttcctatgtgtaaaatagaggtatgaatcccttacttgcttaattcacaaacttatttcaagcatccaatgaaataatagatggaaaatttcattgaaaatgagaaaatgctgcacatgcattcttattacttttgtcatcatcatcatcattcctattatcatttttgaaagatggacgtcttacaaactgaccggttatgtatgcttttgtatactcaactcccttggctaaaaactcatctaactagaatattttcattggatttaaccactcagccaggctgaattcaagaaccccagtgggttttaaatctgctcactactggctaaataacatgtttgaagagaaaatagcaagcaatgatcaacatcttattcagaggcataatagcactgctgaaactcccctttctcatcccctgttattattaatgtgctgctattacttattgtacattgtgtcccagagtgtgtgtgttgcccttacattgtatatatacataagtcccaccctccaaaaccagccgttataaaggagagaaaatcacaactgatgccatgtggtaaaggactagcgtctcgagctcactcactgtgatcaggcctttattccacctgtcacataatgaaatatttcttccttcttgattcagaatgaaccagcagctcgattctgtaaggtcctctgctgggtattttcctgtacatcatcccattttcaggctgacagagcaataggtggccttgtgtctgcttttttttttttctttttttgtgacagtttcattcttgttgcctaggctggagtgcagtggtgcgatctcgactcaccgcaacctccgccacctgggttcaagcgattctcctgcctcagcctcccaagtaactgggattacaggcatgcaccaccatgcctggctaattttgtatttgtagtagagatgggatttctccgtgttggtcagggtggtctcaaactcccgagctcaggtgatctgccccccttggcctcccaaagtgttggaattacaggcgtgagccactgcgcccggccgccttgtgtctgctttacagatgcaaaacctgaaattcagagaagggaattgccacactccagcttgtattgaagayagtgctcgtgccatcattccatgttgcttccagatcaaggacgcttaaatattcccaggggattaaaaaatatgtatactatgtaggaactcagcaattctgtgcaaacagaaaataaagttacagagctgtgctattaagttgggtcttgatcttccscagttagaattaattgattggctcacttcccaattgttgtgtacctcaggcttgattgcacctaagaatcacttggtactgttggtaacacaaaacaacaccaccaaaacaatgctaggggccactctggatgacactttagcatggcttgtgttccaaacccaaacaagcagcaatgccaggccctaccactagatgtcatagtttagtttttctggggtaggcccagtagtgcgcccatgtaattccaaagtgtggccagccctgggctggggctgcagcaggtctttatcagtgtcctgaaggaggacatccaggctccacttggctcctgctcaggaccctccgtaatgtacaaatgctaaccgttagttttagaaggctgagactttccctggcacactgtattagtccgttttcatggtgctgataaagatatacccaagactggacaatttacaaaagaaagagatttaactggacttaaaattccgcgtggctggggatgcctcacaatcatggtggaaggcaaggmggagcaagtcccatcttacatggatggcagcaggcaaagagagagcttgtgcaggggaactcctctttttaaaaccatcagatctcatgagacttactcactgtcacaagaacagcacgggaaagacttgcccccatgattcaattacctcccaccaggtccctcccacaacacctgggaattcaagatgagatttgggtggggacacagccaaaccatatcacacactctaaagtacagaagttaaaaatccaytgtaacaatcttcctgggtctggacatatgtttccaagcttcccttcctgctttgtattttggtgttaacagctttctcagtagagcgttactggccacttgcagtcctttagagattggagaaacatttgttctgagaaggtgtatgactctattataactgcattggaatgtttgtttctgctaacagtatgagctcaatctagtagtcacctttgtctttcctgattttacttcccatttctgagtacaattaattttgctatgttctaagaatgttggtaagaatttatatacagatttcactgtgtaataatcatgtgagtatcatatttgaatccatttccaaaaacgattaaggtttttggaaagaggcaaatctgatttttaatcccagctcctataattcattataattgggtgatttccttgatgtctacatcacacacagtaataaaggttattgggtgaattaaaagatacttgtaaattgctttagtatactgtctgttacatagtaagcattcaacaaatgcgattgttattataaacataataatattttctcccatttaatggtgatcttctaagaaagaggaacatttttcatttactcctctttccttagtatctagtacagaatttggcacacacaatgagtgtttagataaatgactcactttcggaattaggtgatttttttaaaggggatttagagcattaggaattcctttgatcagtagccaaatccccaagtggaagtaaaggcacaatggaattaccttgtaccttgtrccgtcttctatactactttttaagggtgacatttttcccttctgcattctcatgtatgataaattctaaatctagaaaggttagacagccatcctcacaatctggttgccttgacaaccatcatattaaacagtaaaggcctgttgttggcggggggaggtgaatgtcaatattaccacggtctaaatcttctgaagcagggcttgaaggtcaaggttaaaagtattcaaaattgcaataagacctttggttaatgtttgttagatgtattacaagagctgagtgaagccatcatcttttcagggtgaccagtgaagagattcattttggctgtcagccagaagacatytggactgccattgacaaggttttccttttactacaccaagagacttttgccttctatgtgtggtgaaagaaaacagtttttaaaccaatcagaaattaataaagggacaactctggatcatcctcctcaactgtctttgcctgcttgtaagttgctgtccgtgtgtttaaactcacctgcaaggtgtatctccgcagctagtaacagagattgtcacaggcaagggtgtcacctacaaagtgctaaagagccctctgaaaatgaaaagcaaagtgcctcattaatgtagagcagtgtggggcttctttaattgcagcctatgtggctgccctttttagatggctccatgggaaggcggagstaagagtggaagaaggtatggttgtgagagcragagaaattgctccccaaatatccagatgaacttgacaacagagaagtgtgttttctgattcagctgccttctgattaaattcagaaaggcaagaargaactgttggattcagcagagrctaagatcggggagcaggtttttgagatgtgtatgcgtgtgcttttgcatacttctctgttttgtggctattttagtgttgtaagatcctggagggtggtgtttcttaacctctttttaaatattatcactcccctctcctatgtgcctttttatactttttatttccctgattaaacctctaacatgagattttaataccaaaccattggaatatcttatttttttttgatccccacaagaaccaacttttgtgtctgttaagaatgcatgcartagagtaaatttatggtaacagaaacaaartctttttttccacttgcgtttaatagcagagtgattatctctcttcttagcactttgaacaggaatgaaatataactaaatacaccacgcatacatagtcacctatctatawctgtgggttctgtattcttgggttcaacccaccaagacttgacagtattcaggggaaaagaatagatgggttacacctgaactgaacatttatggatatttattttcttttcagtatgctctaaacaatactgtataacagccatttacatagtatttacattgcattaggtattaataagcactctagggatgatttaaagtatatgggaggatatacctatgttatatgcaaatactacactwwtttacatcagggracttgtgcacctgaggattttggtatccttgagggtgctggaaccaatcctccacagatagagagggtatgtatacacacacatgtttatccatgtgctttcgcggtgatatctgtatatatgagcatattcacatacataggaagactacagatagacaggttatggcataccctgataaagcaccgtgtcatctaacttaaaactagaacaatagcaccaaagccacctggatatcttcaccatcccatgccccacctccctcactcccacctcctrtcagggtaaaccaccaccctgacagctgtgaccatcctttctgaaattatttgttatgtctccccaaactgcactgttatttcctcaaagcaatcatctggcacagagctttacacttagaagtcgctgaagtgttgaatgaatgaatgaacgaagcaggtgcatcagtatatccccatcagaagcaatggttctcaataagtgttttctgtgtaaatgcattgtttcactttttcaaaactattcattgagtgccttctatgtgtcagacactgtgctaagtctacatacataaatacatactgtgcacggtaataagaattgcagcttctaaaattattaagatcaggctacgcagcagctaatgcaattttctcctcagtgcattgaaaaatctattagtgaagaaggcagctatatttcaggaaattaagccactgtaacagtccagttcacaaatcagaattcccagtgctttgaaatgctccatttcataacataaagtactgaaggatgttcaggcagtctgtaaatgctccagtgaccaatcccctcaagcttcgcaaagctaaatagaggatgcttcttgctgggcgatgagagaggaaggggttttgtgccaccgataggaggagggacgtgtctgtagatccacgatcacattccccttggttcacttctcctttgtcatcattctggaattatttatgtttgcagaagatggttgcttagtagacttctgaataatgagcatttttaggtgcaagccagctaatcttattttgggctagggttgtatgtctgaataaatgttcattgatgcttacgggagattgctgtcacctgcaaagaccagcttccaggctctctcaacatttccttctaagttgctaatataagaaggcatgaaatatgtaattcagttctcctgttgatgctggttactaagaattttgctgtagctgacctagagctgcttgtatttaaacaggacttctaaatttaaaaagaagtacagccaagaagccttcctggcctcactgtcataaactgcctatgaggtatagagatagctaaagaactcctgatcttacatcaacacttccttttattaatatttgagaaaggtcttctctccccataaatccaacaaagtattagtttcaggtggggcacttaagcttggggctatcttatgacttgtttctgaacaataagttggttgttgatccagtgtaaatgattcagccaagaagaccttgagaaatagcattttctgtctcctaacttggtgtttcttagagggtaatctatggagacttgcttttgaatcacccggggtgctggttttaaaatacggatttctaggccctaccacaaatctaatgaattgtaacctctcaataggatcctgggaatctagattttcaccaggcttcctccaaggttctgatgcctctcagctgccttctgttaatctttcctccataaatcattagagtatattccaaaaatatagatgagatcacatctcttagctcatgaaaccccttttgtttttcccactgtctctgggatattatccagtgctcttttgtatggcatatggtcctggtcttctccaacatttgatcctgtcctacctttccatatccatctctatcattttcaactctaagctttttcattaagtgtrtcagactatagttattttacacacacacacacacacacacacacacacacacacacaattgtttatatctctgtgccttcgttgtcctatcatgcttttctcccaatatttgagaatctcaattttcaacccatttttcaagaccaaatttaaggtttatttcctccagacatctctatctgattgttgtccctcctttcttatcactcccctttaattgtccttctactggaccastgctatacgtatctcaaacaaccaagggctgaaaacacttgaaaaaaaaatagatggttgcatctatattgaacatgtacagagttttttcttgtcattcccaaaacaatacagtataacaactgtttacataatttttacattktattaggtgttataagtaatctagagatgatttaaagtatacaggaggatgtgcataggttatatgcaatagggcaccattttatatcagagacttgagcatctttggattttgatctccaraaggggtcatgtaactaataacccacagactccaaggatggctgtacttggaatttatcacagtccagttcataacattctataattacagatgtggtagccagtttccaagatggcacccagtaattcccacctcctagcattcattcactcccatgtctagtcccttcccacattgcataaacttacctatataaccaataagatgttgcaggaatgatgccatgttacttctgaggccaagttttcaagataaccttgcctccaccttgctgtctttgggaccactcactttgggggaagccagcatgttgtaaagactctcaagcagacttctggagtggcaaaaacgtgagccttcttattgatagctggcatcaactgccgggcatgtatgtgggagccagcatagaattagatcttacatcccagagcaagtattcagatgactgcaacctcatgaggaatcctaagaaccacccagcgaatatactctgagattcctgacacacagaaaccatttgagttaataaataactggtgctgttttaagctgctgcattttgaggtaacttgtgcagtcatggatactgaatatccactagaccatggactccttgagaacgtcagccatgtttccttcatcatggaccctggtccctcgccctcctcagtacctgccccatattaaggtgttccataaatgtctcattaaatgatctcaactgagctaaactggagtttctctgtgctgccaagggtgaatactcacaaatgcagatgactttttttgttttgttttgagcagagtctcgctttgttgcccaggctggagtgcagtggctcgatctcggctcactgcaacccccacctcctgggttcaagtggttctactgcctcagcctcccgagtagctgggattacatgcgcacaccaccacgcccggctaatttttgtatttttagtggagatggtttttcaccatgttggccaggctggtcttgaactcctgacctcaggtggtccatccgcctcggcctaccaaagtgctgggattacaggcgtgcaacagcaggtgcctttaatagatgtgaatattgtcttttgctcttagtatcatcagtcataatattaacagttaacaatatccattgcttagatatagcaccagaattttcacaatcccatggagtatgtgctgtaagtagcyccaatttactgatgaaaactgaggtacatagaggtttaactgcttgcccagaatgactcagatagtgaatgatggagccagtattcaaacccagtcagtcagtctccagactatgtgttgttaaccattttattttatttttatgtatttaattttttttgagacaaagtctcactctgtcgcccaggctggagtgtagtggcacgatcttggctcactgcaacctccacctcccgggctcaagggattctcctgactcagtctcccaagtagctgggattacaggcatgcgccaccatgcctggctaatttttgcatttttagtagagatggggttgtaccatgttggctggtcttgaactcctgacctcaagtgatccgcccaccttggcctcccaaagtgctgggattaatggcatgtgtcattttaaacactcatatcgagccctgatgtggcaagcattgtgctaggcactttgactctcctacctcatttaatgctttttcaaacctcatgcaatgtgtattgttttctctattttatgggtggggagcttgagacttagagaggtgactttgccaggctggttgtggtagagtcaggattcagaattgggccagccagactccaaagctcgtgctcatttcacgatcttcttccaaggcatctgccagtgtctctgtcccagcatctcaagccccgccccacttctgtttcttaacaattatactctgaacatataggttggttgccaagacaaccactcagaaacaacatgaaaggcaaatgacttttcaaacattctgcagctgggatgacttctttttttaattttttaaaatatgtcaaggtgatttgtaatccacagcaaaatgttaatatgggtaagcaatctattttgagcaaaaaatatttccagtatggcagaggagagcttacagattacatatatagtaacgccttaggaaggaagcaggatatactactattaccctttttacaggtgagaaaattaaggcctggagagatttggaagccaggaatgcccagctctaaagacattgtacctaattgtttgaaaaactgcttggagaatgaaaatgtgtctggagggaggcagaggctcagtcctgaccctgcagtaaatcagaagagtgaagagcacattgaataagccaggtccagtgggaagggagggaaagagagaaacacatcagttcagagtagagtatctaggactgggggactgaaagttgaggtaaggaaaaggaccaccaaactttgggtactaaataatagacaacccttaatcttggtaggaggagtttcaataggtcagcccatataaaggtcttgccacaatgcctgacacccagcacgtgctaggcatattttctattattatctttactggggtatctcaatgactcctggaaatccacatcttggagaaggagtgagcatcatttcctgacaaaaccagtctcttttcctgtttttcccttatttatcaaaggtcagaaatgtgtcatcaccattgagacatggctttcctccatcccctgtgttttgggcagtcacctgtagaggtgaggtgtgtccactgtccagctctctgcctccatgctcatactgctaatctggtcaacttctctgtggaccacctggcatcagatataccctagaatcacttacaccgcctcatagatgctcccctttgggtctrcctggtaattggcagcttcttcaagaaggcagatttccctttgagagcatccccaaccccccagtttacataaaacccttaaaacctggggttgcctgtgctccctttacataagtgaattaggtgataatcttgggcatgactgcatttttgctgattgaagtttagaccatgctgcttagaattattaacagccattgcaaggataatgatctgcccattaaaataaactaactctcatttttattatcattttaattacacgaaccctttggcgtgttgatagtgatgaacaacatggtgggatattactctgccaggtgytgacttctctatggggtgctctcgggaaaatttgcctggtgccctccaggtttcctcagcctgccttcgagggtgctcttctctccattgaccccatgatgtaagaagttcctggttggactgaagtgtgttgcggcatggaaatgagattaataccagtgtggattgcatggagagactgccccaaaaggttgcatggctaatcactcccacgcacttttcctcctcctcaaacccaawgtgtgctgtccagttttggagatctaccagagggagggactttgcattttccagatttcagcttgtgattttttttttttttttttttttgaaatggagtctcgctccattgccaggctggagtgcagtggcgctaccttggctcactgcaacctctccctcctgggttcaagcgattctcctgcctcagcctcccgagtagctgggactgcaggagcacgtcaccatgcccaactaatttttgtatttttagtagagacagggtttcaccatgttggccagggtggtctcgatatcttgacctcatgatccgcctgcctcattttttacagaaacataggacaaggtgacaagtgacttatttcccctgacaaaaccatctgcattcctgacttcccctttactttcaaaggtaccagaatttgctgcttttatcatgccccaaattctgagtcatctgaacttcggtattgctgacaggcattcactgagaggagaagtgggcttagaggagacctgttgcttgccccgcatgaggctggatgctgtgccttctcctgtgaatactataacattgtaggcccccattttccagatgagaaaactaagactcaaggaggttaagtgagttacctgaggtcacacagctcattaaaagtagaaccagttctatagcccaggcttcagggctcaacaaactatgcctcttctgttgttctgtcctgaccctggattttagcaatcatgaacacttctgctcctaggtgaggaaaatatcagagaaaaatgaactcaggcctggctgactcygtagtcatgcacattcatcaaacagtttttgaataattactgtgttgttaccacagtcaaaaagacatcgtccctgcctcaaggagtttcagtcaagtgcaggagaggggcatggaaaattgaacccagcaggataacatgctgtgctggaggaagggaaacagcttgcttcttgctttgggagcccctaatccagcctggggctgtgggggtgggggtggctggaaggcagtgatttctaagttgagacttgaaagagggggagaatgtggayggaggtgggggaagagtgctagatatcatgccgtctctaagagggtgagctatttgtaataaatgtacctgcttcttaccacttgttctttccccaccaccaaatttcttaattttccaccttttcctggggctttctttcygaatacaaactcatcccattgcctcctttacaactaattgaacacttggacttaattgattatgtattaagttggggacttggagtgacattcaggactgggctcatgttgagattaatttattcctgtagtcttcctgttttgcagtgtaactgagtgcctcacatgtgtgttaaaaataaaacggagagtcagggcaatctaattagacagcttaacccatcactctcgtgttcagtcttcacccagctctcctgctttgatggtaaccaaaatagatgaataagttaatcaaaggtctgattaaatagcacagctctgcagcatggactaatgattgccaagcctcagttcaggcagattgctagaggagagaggaagctgagctgagctccaaaggccagggctttcatgaggaagatgtttataaagcacatgggagggaattcctcactgagtcctcggatcttaacggtgatggctcactctaraggaaggataatgtagtttggggaaagaacacaaaccttctcctggcaaattctgactcttagagctttgcatcttgctggctgtgggattgtagacaaatcgcccgccttcctatgcctgcctgccatccatcatccatccatccatccatccatccatgcattcatccatccatccatccatctgttccagatatgtgttttgtacctattatatacaaggcattgtgcttatttttttttttttttttttgagactgagtttcgcttttgttgcccaggctggagtgcaatggtgcgatctctgctcaccgcaacttccgcttcctaggttcaagtgattctcctgcctcagcctcccgagtagctgggattacagacatgcaccaccacacccggctaattttgtatttttagtagagatggcatktctccctgttgttcaggctggtctcgaactcccaacctcaggggatccgcccacctcagcctcctaaagttctgggattacaggcrtgagccactgcgcccagccagggcattgtgctttgattttgttgttgttcatttaatttgcccttgtgttaactgtatgactcggttgtgtgaggtttttccttctaggtcctctcttgccgtaaccctcactttatgctccatgaggctgatgcataaagcatctctagtctcgctttcgctctggtttccgttagggttgactggagggctgccctcccgggagactggtgggcaggagggaagtgaggttgagatgttttttcctgttctggcttatgcgttgccacaggtaggctgtgtccctctgctgaaggtcactgcctcagccaggtggccttactcaaacagcaattctctctggattccagcatctgctggcctgggcccttttggccttggggtggtaatggccccaagtactcttcccctcctcaagtaactgcacggttcttgttactgcccctaattctgcatatacttagattaaatagtccttttattaaatcttccttagattccccaggagagtgtgctgtttccacccacacmctgcctgataggatgaagtaagtgtagcaacatggatggagctggaggccattatcctaagtgaactaactcagaagcagaaaatcaaatatcacatgttctcacttacagatggaagctaaacaacgggcatacctggatacaaagytggaaataatagacactggggtctccaaaagargggagggtgagagctgtgtgaggggtgagaaattgcctgctggatacagtgttcaacattcaggtgacaggtatactggaagtccagtctccaccattacacagtgtacccatgtaacaaaaatgcgtgtgtacccccagaatctaaaattaaaaattttttaaaaaagaaatcatgacctttataaatagcagaaactcagaaaagctgagcaaacctgtccaaggtgacatggcgattaagtgatgatactagaatctaaatccaggcatgcctgaatctaccacccagggtgttttgctctcctgcatacatcccacagacccttaccttcatctggaagcaccaaaagaggcactgatagctaaatacatggaataagatagagggatcaggaagaagggcgggagcttattactgagtatattttgtgtaccacgcccttgagtcctttaatataatttaatttttataccactgtgtgaagtaggcatcgtctccattttaccaacttttaaaaatgagcaactactcttaaaaaaaaactaagtaaccacatttttttmtaacatcatagtctagtgatggtggcacacaggaggccaatttagggcagctatgagacaggttccccatgctgactcatgagacccattccatctctgaaacacactccattttacaggtaaagaaaccaaggcttagagagatcaaatgctttgtgtggggctagagcccagatttgaacttctgtcctttttccccacctccatgatgcctgggtgtagggtgacagggactcatacayagagttggggatgctttttttgaaattgatgagaggtgaagccagctggacttcctgggtcaaatggggacttggagaacttttatgtctagcgaaaggattgtaaatgcatcagttagcactctgtaaaaatgtaccatcagtgctctgtgtctagctaaaggattgtaaacacacaccaatcagcactttataaaatggaccaatcagcactctgtaaaatgaccaatcagtgctctgtaaaatggaccaatcagcaggatgtgggcagggagaaataagggaataaaagctggccaccccagccagcagcggcatccctctcggcttcccttccaagctgtggaagctttgttctttcgctcttcacagtaaatcttgctgctgctcactctttgggtctgcgccacctttaagagctgtgatactcaccacaaaggtccacagcttcactcttgaagtcagcgagaccargaaccccccggaaggagccarctccgcacacagtttgatgtcttgctgctatttttttcttcctttgcatagatttgggtgaatgtgtttcatttggtttgattacacgtagttgtttttaagtaaaagcagttttaaagcttgcttttttcccctttaacatcatatgcaggtttttagaaattatatcttgatccacattgttttaaacaattacatagtatgctatcagaaaaacaagagtatcatgtttgaattaattgttccattttggggcattttgatggctgttctttggtaacatggtgatgaacatctttgggaataaaactttggtgtctaaaacaaaatttttaaatttgaatttttttaagaacatctcctcaacatggtattgtaaggtcaaaggagatcaatattttttggaatcctgagaaggtggccatgttccctgttttaaagggttctattaaaagtgttaccctcttgaaaataagtgtgctttggctcccatggaaactccccatggcagctaggttggggcctctgcccacartgatcttcataaatgactgtgcatagatgagagctttcatcacactggtgcttttatttttatccttgcctttggacacaaaatggcacccgtgtgtgtacctcgctgatgactctgcccacctgcaagccattgattgttccattatgttatgtgaggatcataatgtcagtgctccatgggtggttcatttctgtcctatgtgtgtgtcctctattgctgtcaggtgaagagtgtcgcgtgatgactaggtcctccttgactaggaggtgaagagtgtcrcgtgatgactaggtcctccttctgtcctatgtgtgtgtcctctattgctgtcaggtgaagagtgtcgcgtgatgactaggtcctcttatttatctgagaataaagagaaggcagcagtrgtaatctattcaattacagttttaaaagaataagcataagctttaacaatactactgcccactaatctttaatgacacgtaaatggaatatgatttaaagaaatatacgtacataggaacaatttgatactggttgcaaaagtatttgtagtgggattcaatttttggacctttatgtttttgcatatcctttttttctctagtggatctatttaatttctataataacaaaagttttatttaaaaatctcaacataggatttgcagtaataattatttcataactattacttttcctctcccttaattcagatacattttcctccagaaaacttcacatgtcaaaatgcaaattatataaatctttaaaagaaaactcattcatttattcaacaaatttttattggatactttttgtgtgctaggcactatttataatgtttaagcaaagaattaatatagcaattttttttccctttctccaactctctctctgccttgttctgtctagtctgaagtttcctggatccccaataaacattactctgggatttatggtctgatgaagcttgtcctgaccaagactcttcctgccaacctggagagagtcatcgtccttgacacggatatcacctttgccactgacattgcagagctgtgggctgtgttccacaagttcaaaggtaatggtagcccattcgttttttccccgatatccttgtaggtatcagcatgccaagaataggggttgacttttttaaaaaggtgaggtctcctcgaatgaggtcgtgctaatgcagtgsgtgaggaattacaaatatggttcaatatcaactctgcntggatttgaaaaataatagagtaaaacagaaacttgtttacatgtctttagtaaatgaagatgtttttaacagataaatatcaaatgtgtgtattttgtatgcagatagcggagtgttcacatactggtcgggacgtgtgttcattggttttctttttatcgaaggatagtctaattgccaagaaagcctgtgaggtagtagagatgagtattgattctagagtttttgaaaatgttcatatggcttttgctttcattaacgttgtggtttatcattttaaggagatgtatgtatttggctttctttacaagacgttctttctagtctggtgggtttctttatagctattattgtaactctcgtcacggcctcaaggtatatgagagtacctagggggaaattgtgagctcagtaggtgtactaactgtggcatggatatgtgagagaagtggcaggttagcacaaatcttaggctgttattttaatacccctctcccagatgtctttttaaaaattatattattttaaaaattcttctatactggatgagtacaatgagaaagaaattcgacagtgaaatttttagttttatatatttttttaattgcacgctagccccttctgtgtttaaaatcccttctgccattcctcttagctccatatcctatgaaagcaaaatactacttaatgattttaaatcccagcattttcataaatcacaggatattcctgttggtttctgtttctattcatgaacagagagtaaatttccttgcttgccctggtcactccctgcttccttctcagggcttctgagctctgggctaattgaggaaagtcttcaccaaatcatgggaatgacattttgatccccgggactctttcccttatcaggatcaaaatttacttttcttattcgtgtcaataatgacactaacaatgacatcatttaggacagctgttgaaattgagtatggcacagctctctaatcttcatagaacgtgtggacgtgtccttttgtttcataaagaaagamacggaagcttagagggatgcaggcttttcccagagttgagatcagagtgcccgtgtcttggcttccatccgctgctcttttcaagttcccctatcgtgtctgtttgtttttctcttcctgatcacagtgaactcacgaggggcagtttttctataattacatggtgttttattcattttcttatgctgatgttgagtgttcagtgatgcatttcttcaactggcgtttatcgaatccctactgggtgtgaagcagtgtgacgggctctgcaaatgaggagatgagtaatgaggggacagtgagagttgtcacctctcctagagggggttagagaaggtagctgggaaggtgtcacggaggagctcctaattgtgctctgtctcatcagatgagaatggtggtcgtatgtactagactcccacattttcctttgggaataaaggccttattacgccagctggtgggagcagtccctgcagcgggggctctcagaaaaggcatcagccctttttgcagttgcctctgttgaagtgagtggccatgcctgtggccacaccccttcgtgggacaccccacatcacggaatggctgatgaacatgaggtcctgcaggatcatctgccacactcggatactgcctcacaggctgattttcccctctgcctagtcctgctttctccccttccctttcataggtgctgttctcaagagctctctctaataaacctcttgtatgctgacatccatctcggggtctttttccaaagaaactcaacccacagcatatatttagagctgtaagyctccgttggataagtataaccaccatagtcaccagaacaggtcatcagagattgtagagctgtagctaggaaatcacgtttattctcttgcagcttgcaatggctatagtgctagtggcgctctgtagccaataacaacgtgaattrtcatggttattttaaatacgctgatatcatccgtggaagggaaggcaccagagctcttgctgctcccatagctggcccaaggacttgatttggaggactctcagattcaaggcagctcctggggttgagtagggtatatgggccaaggtcaggacagggacaaggtaaatttgaatgcaaggagctgagttaatgggctgcattttatttgttcattcttttgttggtttatttctagcatttgttaggcccccactgtgaagaggaatagattagatgctgttgttccctaaagctgttgagaacacagcacctgccttcaaggaactcagaaacaaggcagagtgcattgcgtmtttatcyakcaccagcaaaggaytacaaaacatcagaagttttcccatgcccaccctaatttttctggaaaaatacagaggtgaaaagaaaataagtaaagctcatctcttctccatatgtccctattttgtatcacttttgtatgtgtgtgattgtttttctaaaccaaactattagaagccaggtcatggaataggaagaaagcctgttaagtcaggcgcataaatgtagaatgttctgatccaagagagagtgtccttcataaaggcaattgtcgttgacatccttcactgtaaacggttggagtgatgttgatacaatgtggcctggctaatttttcactttttgagaacagctggttgtctggggctgcagtggctcttggtcagattgcgcttgattcctttgtggcgctgtgaaagccccttgttcctaaattcattaccgggagaattacaaagaagcctttttcaggagttagacccatcctcagcctctaccagaagaagcctcttagagatgtccccatcttccctgagctcgacttcagctaagtagcagatacctccctcctatgtcagcggtttgcacctttacccagcctgcaccaacagctggaagattttcagaaccaccaattcttagcagaaagaatcagacataccattattggccagggtcaggagccacccattcggtcaatatttactgagctccttctaggtgccaaatagcttactgttgggactgttgcaagaataagactgtttggtgagcccgtagctacaccggggtgctagtaccagagtggctagcagccctgtcctaacagaacattcaggggagctggacatgggtatggtatgcttctcacgagatacttctggtatacctggcaggggtccctcacatgggaaacttattttcataggcagatgtccttgcagctcttgtctgacctgtgttcagtttacacctgtctgactaccaactactctgccactgggagcctgaccttgtcctctccctggcgtaccagagaaaaccagcctggggcagcccctggttcttcaatggaaggcgcaaattcaacacaccattacaatggtggagctggtgaggaggcaggtggctaaatgagtgtttgtaaaacagagggaaagctaactaccatttcttaagcacgtcttaggttctaggcactgagctagaagctttgcacacttgaaagttaaataaactgatggctcacgcctgtaatcccagcactttgggaggccgagcccggcagatcacgaggtcaggagatcgaaaccatcctggctaacacggtgaaaccccatttctactaaaaatacaaaaaattagctgggcgtggtggcggacgcctgtagtcccagctactcgggaggctgaggcaggagaatggcgtgaacctgggaggcagagcttgcagtaagccgagatggcgccactgcactccagcctgggtgacagagcaagactctgtctcaaaaaaaaaaaaaagttaaataaactgggctcaagagagattaaattacttttcatgctcagagagctattacatagtgaaactgaaccccaatccatacggctttggagtctgtgctctgtccactgacccaggaggctgtactgcacttagaacgggtgtgactgctgagtacgtgtcaccttggacccctgcatgccttagtttttactgcacaaaacactggaaataatatgtgattgttgtcatttggggaggctgttgtgaaggcataaataataaatacacacccataatctgaagcttttggaagaaggccgtgctgaatattcaagatagtgatttgatccataagcacagatgcctcccctctaagaggatcttagtgccacagagtaaaattctcaccctacagcaggtatggtcaaactatccagcgtacatgggcactgccttcctcaccctcacggcaccgcagatgtgccatgccactgggtatcattcagggcctaatagactctgtgttgttccttacaactaacatgtttaagcacttagtctgtgccagccactctgttaaggactttatggataaactcatttaatcctcacaaccctcccatgaagtgattactgttgatgttcctattttagagatttgggagctgatgcttagggaggcatagtttacctggagtctcacatttcttaagtcatgaaaccgagatttgaacccaracagtctaactttgaatccagtcctctttactctgcaccctcctttcccttgaagaggagtaagagaaatcattgtcatgtgggtggagttaagagtgtctttggagagaccgaagttagattcgtgaaagaactcaaagtgaccatatacaccaggttgtagagggcgggcccaaggcgatctaggcattcagagaacaaaggcagggaagcaaaattagcatagaaaagtgtagttttcacaggattcgagaaataaaatctcagtctccagaattctggcccagcatgtgacctccgagaacatcatctttaagtagctgtagttggggtccaagagctctacccagagactcagcatgtccagagaataaggcaggatcaccctgatgactctgtcagcgtgggcagatgctgtggcctgaaggtttgtgtcctcgcaaagttcctatgttgaaacctaacccccagtgcaatggcgttaagagtagagcctttaggaggtgattacctcatgacagctgtatgaatggggttagtacctttatgaaagaggcttgacagaccttgttcatcccttatatgtgaggacacagttaaagggataccatcagcagggtgtggtggctcacgtttgtaatcccagcactttgggaggccgaggggggtggatcacctgaggtcaggagtttgagaccagcctggccaacatggcgaaaccccgtctctactaaaaatacaaaaactagctgggcgtggtggtgtgtgcctgtaatcccagctactcaggaggctgaggcaatagaatcacttgaaaccgggaggcagaggttgcagtatgccaagatcacaccattgcactccagcctgggcaacaagagcragactgcgtctcaaaaaaaaggkgtaccatcaatgaagcagagagttctcaccatgcatctgatctgccggagccttgatcttggactgcccagcctctagaactgcaagcaataaatttctgttgcttataaattacccggtgtcagatattttgttatagcagctcaaactgaataagacagcaggttatcttagttgatttaggctcagagaaggaataatgctaacggggtctttgtgagaattgtacaagataatgtgcattatttttccacattccattttctctaaggactcctgccagagtgaatgggatgatggcagacatcgttaatgtgtgtctgctccatttcctcacagttctgtccacagagccattggggctgtacaataatgtagaaaagctgaacatgaagaacattgaagtattacttttgaaaagacatttgtagaaattttatgcttataatcagttgcctcgaaggagtttttaawgctctttgaagtttcttcaggtcttgtctttctttgttaccttgccgccctgcctgtctcctctgatggaattggtggagtcagaagagcttagcaaaaaagagaccaagcttcaagtccctgctggtctactttatcagcagggtgatctaagggaggtcattgaaccactcttgacctcgcttctgcacctgtagaaagaagatactgatatctgctcacagtggttgtgtgaaatttgaggaggtgattcagtgatcctggtacctgacggacacttggaccttgcgtgtttctttcccctttccttcctcctctctcctgtggttaagtttggtgttgtcccattggcccctttttatttgactttaaatctcctttcctgccttcccttatctccaaatgaagctcagtgtcccccgccctgttagcccataggaaaggaatcaaagaagacctttcaagacaatcccatgaccttatgccagtcagattttcctgattaaaggcttcccttcttggctggcccagtgtgcccccttctagggctcaacatggacagatttccacgcatctcacattcactcctgacagttcctaaacttgagagactgttttgccccggggaagaaaaacataaattttaaaagatgaaattctcaaagtgctttaaaatgacaccaacagctggtgtctgtagaggtgatgtgcttctagtacagaaggcgctggaattcagctgggaaagggcgaggcttggcctgttcttggtcagcaatcatacagttttgttaaaagtcctgggcatttctttttaatctgtacggggcctttagaagttctcctgggccgggcttagtggctcgtgcccataatcccagcacttcrggaggctaaggcgggtggatcacctgaggtcaggagttgaagaccagcctggcaaacatggcgaaaccccatctctactaaaaatataaaaaattagccaggcatggtggcagtcacctgtaattccagctacttgggaggctgaggcaggagaattgcttgaaccctggaggcagaggttgcagtgagccaagattgcaccactgcactccagcctgggcgacagagcgagactgtctcaaaaaataaataaataaaaagttctcctgcactcccagtattgataaagttccctcctcactaccagttttcatggttttgtttaggtctttaacgtcctctagctcctagttgattttccacttggaaaattttgatgacctcttccattatttcctccttgtaccctcctgctttctctgcctctcttaaccagcctgccttctactcagaatcagaaactagcgctttgattttcttgatagacactactggttcttccattggtccagccaagatgtacaccattgaagcaacaccaaggatttttttccctggcagaattgggtgaagaggttttaattattttcagattaactttgaagcaaatctgccttgtcttatatattagaaagatcatttaacttctcagagcctcgtttttgttgttgttctataaaaatgagagaatgatacattaataaccgccccatagggtttattttggtgattaagtcaggtaatggctctgtattgcacaatacctaataagtgatagttcccttcttttctttgtatgtctcagggttgtttgtttgttcgtgaaacagtctcactctgtcgccaggctggagtgcagtggcacaatgtcagctcactgcaacctctgcctcccgggttcaagtgattcccctgcctcagcctcccgagtagctgggactacaggcgtgcaccaccacgcctggctgattttttgtattttactagagacagggtttcaccatgttggccacgctggtcttgatctcctgacctcataatctgcccacctctgcctcccaaagtgctgggattacaggcgtgagccactgcagccagcctcttttttttttttcttgttcttcagcctgaaatttcagagagttcacagaccagaaaccaaccctaacctctccctaccttcctgagttcctttctccctccttccctccttccctgcctccctacctgcctgccttcctgcctgcctgcctgcctgcctccctccctccctccctccctccctccttccctccctccctccctcccttccttccttctttccttgccttttgcacccattcagtcattcattctttcattaatttactaccttctgaggctcttggcctgccctaggccctgggggtaaaatattaactgagacagacctagctctaccctcctgttgctaatatctattaaatgtgttttatgtgtcatgccctgaaccatctcatttagccttcataaaactctttaagtctgttgcctgaaatcactaactacaagttagtggcaaaacctgggctgaagccaggctggtctcagagccgacacttaaccgctagattctagatacatctgaacacatggttacatgcaagtgtagaaagtctcttgaaagggaaaagtcagggtgaggtcgaatcacattttagggaaagcattgctagtgagggaagttggagggagtcaggagggcttctaaagggagagaggtggatgcattggcctctggtctcacttagagggagcagcatatgtgaagccctgagatccagagagagattagagagagtgatacagacagaaactgaaataaacattaaatctacacttttttttttttttttgagatggagtctctctctctccacccactctagagtgcagtggcgtgatctccactcactgcaacctccacctcccgggctcaggcagttctcctgtctcagcctccagagtagctgggattacaggaatgtgccaccacacccggctaattttttgtagttttagtagagatggggtttcaccatgttggccaggctggtctcaaaatcctgacctcagtggatcctcctgtctcggccacccaaagtgctaggattacaagcatgagccaccacgcctggcccttcaatctacttttcaaacagaccagacaggctcctacctttggccctctgctctgatgttcctgtacctggaatgctsctcctccagatcattccctgtcttgctaccataatcccagcccttcgagtctttgcccaaacctgagcttctcagcaaggctttccctgactgtcccattgaatcctaaagcctgagacaccatcccatttttctctactgctctttcatattttttttttcaagaggactcatcaccttctaatgaatatctaattacttatcaagagggctgctctgcctcaccccatagggaggacagacccaggtaccaggatacagctggctccatctggttattgtgtgtkctttctagggacctcccacggataccaaaatctgcagatgctcaagtccctgrtatataaaaaattgcatttgcacatcatctgtggacatcctcctgtatgctttaaatcatctctmgattatttataattcctaatacaatgtaaatgctaagtaaatagttgttagactgtattgtttagggaatagtaagaagacaaaaaaaatctgtgtatattcagtacagaggcagttttctttccaaatattttcagtccaggttggttgaatccacagatgcagaacccatgggtgtggtgggctaactcagtgtaagcaccaggaaggcagggatctttgtctgttttatgcctgatatgtcccagcacagaacagtgccygacacatagaaggtgcccgataactatttgtcaaatgaacaagtaaagcggatgtttcttggtgaagtgagtggtggggaataaggtaagagaggtataaagggtcttattaagtgttagctttgggtcttctccaaaggtcattgaaagacagtttagaagatttgaaaagatccctttggctgatgtgtgggggtgatataaaaagtgcgacaggaaaacagtactttcaaaaagagttggcagcaggtaggaggcttcagtctcagcaaaagaccactgtggcccgtagcgggatgttagccttggagtcagagcaagggatgcagattagagatgaatggggaygtagagtgaatagcactggacggygagttyggttttggacatgcagagatggggtaaacaggtctagatcttacaagaagggtcggggccaggggtctcttcaggtgtttgttgttgttgttgtttttaataaacttgaaatagagctttcttggtgttaaaataggtattctcaccagattgttacagtttccttttctgaatggccaggtgagccccagtgtagaatccagttgggcagctctgtagtgcgyggtcctgcagggacagcagaggggatttgatgaatctaacacagggctcattggatgggggcaggatgaaatcagcaagcacaaagactgggcacggtgtgattggcaagctgtgatttgcgagggggagcaacggaacggatgctgagcagaactcatgaggagggatcactggactcaccctgattgtgtcctgagctcctccttgtacagcccacacccagtgaatgatgttcactgctgcctccagctgccgctgcgttgaaaagtcagccatgccctgggtccctagctctgtgctgcttactgggtgggagtgaggagcctcacggatccatcaccaggattccatggacctctctatcagttgtgggtctttcttagacacacagggctcagactctcacggaggtgagctggaggacccttttaggctcctcaccaagggggaggaaagacatctctggaggtagatgtgagatgtttctttccccactccctttcccaactcaagtatttactctcagtcaagggcccttccttggggttgctttgcatcctcttgccatctttgcaacgtcggggtgttgctcaactctaaacctctgtttcctgtgggcaagatggggagaatgatacccatggggtattggcgtgagggtaacgtgacatgatacatttcaaagtcttagtgctatacctgacacagtaagctcttgacagtgttagcttctgctgttattaatattagagctattttgttttgttttgttttgtttttgtgacagggtcttgttgtgtcacccaggctggagtgcagtcgtgggatcatagctcattgccacctgaaattcctggactcaagggattctcccacctcagtttccagagtagttgggactgtaggcatgtgctaccacgtctggctattttttttttttaatttttatttttgcagacacagggtctcactttgttccccaggctggtctcaaattcctgggctcaagcgatcctcccgcctcagcttcccaaagtgctgggattacaggcgtgagccactgtgccccgctgagtcattttattgtaatcacartaagatggctgtctacatacctctaaacagttcaggatgggagaggttcttaatatcagaggagacaatacaaggccttggagtaaacacrtttccaaaaataatctctgtcaagatggggaaagaagcctgagaaatggttatgtaaaagcataggagttgggggtttgctcctaattggaaagagctggccgtgtatctcagtggggaaagtacaggctgtagagtgggatgattccaagacctgggtttgaggccccacgcttccakgcacttcgcaattcagcttctcattctcaatgggaatattatgttaggagcaaaatatgtaattcacctagtattttgcaggtgttttgtcatattatctcagttctatgatacaggactttgcacattttcccatttccgaaactgagatgtgacttacaaaagcaacttgacagatggtctttttctcctggcaaatgttttgatatatcgtacaatcagcagcctcttagaatccagaaaatatgttgtgattatttttattagcaatatctctctagcttttctttttatctttgagttgtacaggggagaaggagggcgagtaggactgtagactaaaggagaaagagctgagtcagtcaaagagaggatttgggggtcttagcagactcttccttgatcaacttttattgtttgaccacagggtcctggagcatctgcaccattgctatttttttttcttttgtaaataaatatcgtgcttgtgtctcccgtgttgagataggtgccatctcttggtaagccctcccatgtggagactgactgtctgtttcctggaagcaagtgtttgtataggttgggggcaaggagagaggggaggtcaagggacagagttgtggtacaaaaacatctgggatttctttgagaatatcaggaagaaatattgaaaagcagaacagcattaaatccagaactccaggaagcctgctctgccatgatgtctcttcttgctcagacatttataaatatttattgagcacctacttgttaccatatgcacaagttatgctctttaatgctcagtccgttagaaattcatatgactgacttagccttccttgaaaagatctgatatttctgggaacattttagtattacccgtgattaatgtgaattttttagctagatcacttttttttttttttttttttttgagacggagccttgctctgtcgcccaggctggagtgcagtggcgcgatctcggctcactgcatgctccgcctcccgggttcacaccattctcctgcctcagcctcccaagtagctgggactacaggcgcccatcatcacgcccggctaaatttttttgtatttttagtagagatggggttgctagataacttttaacatcagctgctttgagttcaagagattttgattgcagacacagctattgtggatgcgtagaggggacagggctttccaaggacattctggacaaagagggtgagtgagtaggttaggacctaataaaggcaataaacaaatcccttgaggcaagaaacaaatggcttgttgaatgaatttatggagataaagtccacacctttagaatcatgtgctaagaaaagaagccagtttcctttttcttgtttgttctagatgtatcttgtctgggaatcccacatgaaagtcagggttactcctactctccataagcaacaggccaaattgaactaatagccatgtgaaggctaagcagcagcctcatgatcattgacagctctgccttttgaacagtaattctgagccatggagaggagggtagctgaagtactggaattacctgtagggtcttttcaaattgcacaggttcatgtccactcttatctctgcacagtggcctgctcatcaccagtgactggagaatctgccttagtacggggtttctccatgttggcactattgatattttgggctgtatatgtctttgtgtgtttttaacagttgtacaaatgtatggggtacatatacaattktattgcatgtgtagattttgtagtggtgaagtcagggcttttagggtatctattatacgaataatgcacattatacacattaatttctcatcatccacccctttcccatccctttacccttctgagtttccattgtctgtttttccactctctacatccatgtgtacacattttttagctcccatttataaatgagagcatgtgatatttgactttccctgtctggcttgtttcacttagacagtaacctccagttccacccatgttgtttcagaagacatgattttattcttttttgtggctaaatagtatttcgttgtactgtgatatgcatctgtataccacatttgcattatccattgatgggcrcgtcggttgatttcatgtctttgctattgtgagtagtgttgtgataaacatcagtgcaggtgtctttcttatataatgatttctttttcctttggttagatatctagtggtgggattgctggattgaatggtagttctattgttagttttttgagaactctccatactgttttcttctaatttacattcccaccaacagtgtataagagttccgtcttctccacatcctcactaatgtctgttattttttgtctttaataatggccattctgactgagtttaagatgatatctcataactttttgtggtggaagggctgtctttcacactgtgggatgttcagcagtatccctagcctcttccctctatcctatgcccctccagctatgacacgcaaaaatatctctaggcgttgccaaatgtcccctgaggaaaatgtctttccctgttgagaaccacttccttaatgacccactgttactgatggaaatgtgtagggtcctttaggaatatgtagtggacttggtagttttaagtggttaawagcgactggcccaagaaatgaaatctaaaccttccacaacttctatatatatatacatacatacatatatatatrtgtgtgtgtgtgtgtgtgtgtgtgtgtgtgtgtgkatactttaagttctagggtacatgtgcacaatgtgcaggtttgttacatatgtatacatgtgctgtgttggtttgctgcacccattaactaatcatttacattaggtatttctcctaatgctaaccctcccccatcccctgaccctgtggactggattaagaaaatgtggcacatgtacaccatggaatactatgcagccgtaaacaaagggtgagttcgtgtcctttgtagcaacatggatgaagcaacagaatgatgggaaaccttcattctgagcaaactatcgcaaggacagaaaaccaaatactgcatgttctcactcataggtgggaactaaacaatgagaacacttggacacagggctgggaacaccacaacttctttttcagttcataactcatagtccacgatccatgtgctctttgacttgacttttcttaaactcctattttatgtgcttctgacttgctttcccttcttatttgtaatccacactagcctcaaaagatgcatgaactgtgaattttcacttccagggccatggatagttgaacatctagtagtgaatttcctctttcagaagataaataaattcattcattcccctggatctagaaggatacacaataccaagagaaagtgtgatcgaattaaccagactcaaaagcattcacatccacaaaagggcacagattcagttaggacccattagaatttatggtcttccctcgaaattacaagagggaacaacttgcagctcatctgcatatccgtgaagagaggaaccagtgtatgccattctatgactatcaagaagacacaacttttttttcctcctaaatgcatatacatagattattagaagcatctaatatatgacaaagacatatgtggcctgtcaatgaagacaaatatgctggtctcttctctgcaccatgcactgggcttgcccatgtggaaggatgcagcaggcagaggtatgtatgcagggtccttattgagatgaatggagggtccttattgaaatgaatggaggggccttttaaaggaacactgtcaaccagagtaggtcctggtggaaattaccagcttccctagaagcaaagggatacttttttcattaataaccacctccatcagaaaaggaaggtctggcttttattttcttatttgcctcctgatgaattttagggacaaagaaggcatgtggattttaggcttctcttcrttactgcttagatgtcaaaaatgaccacaggtcatatcccatggtagcacaaattcttatgagataaaagagaagattacccaaatccagccaataatcctctttttaaattttatttttgagacattgtatactacaatataaataacaaagggagcctgtattagtctgttctcacactgctgtaaagaaatacctgagccgggtatgatggctcgtgcctataatcccagcacattgggaggctgagacrggcggatcacctgaggttgggagtttgagaccagcctgaccaacatggagaaacccyatctctcctaaaaatacaaaattagccaggtgtggtggcacatgcctgaaatcccagctactcgrgaggctaaggcaggrgaatcgcctgtacccgggaggtggagattgcagtgagcagagattgagccattgcactccagcctggacaacaagagtgaaaagtccatttcaagaaaaaaaaaacggaatgcctgagactgggtaatttatatgaaaagagatttaattggctcacagttctgcaggctgtacaggaaacatggcagtatctgtttcttgggaggcctcaaggagcttacagtcatggcagaaggcagagcgggggcaggcatcttacatggcagaagcaaaagcaaaagagcgtaggggaaggtgccacacattttttaaaaaaccagatctcatgagaactctatcaccagaataccaagggatggtggtaagccatttgtgaaggatccaccccagtgaaccattcacttcccagtaggccctacctccaacgctggggatcacaactgaacatgagatttgggtggggacacagaacccaaaccatgtaagagtccttgaaacatctgccttatattgggagttggggggtggggtagggttggtcggcagtgatggactctttattttctttattaaaaataacttttttatggcaacagttttagattacagaaaaattatgaagacaatacagagagttctgatataccctatagcctgttccccttattattaatatggtacatttttttagagaacctgcttttttttttttttttttttttttttttttgagatggagtctcactctgtcgtccaggctggagtgcagtggcacagtttcagctgactgcaacctccacctcccggattcaagcaattctcctgcctcagcctcctgagtagctggaattacaggtacatgccaccatgcccagctaatttttttttttaaagtagagatggggtttcaccatgttggtcaggctgatcttgaactcttgacctcatgatccacctgcctcgkcctcctaaagtgctgggattacaggcgtgagccatgagaacgtgcttttaagaagcctggtatggtctagaccaggggttcccaaaccctgggcgccagaccggtgtggtctgtgtcctgttaggaaccaggcgagcaagcattacagcctgaccttcacctcctgtcagatcagcgctgggattagattcccatagtagcgcaaaccctgttgtgaactgcgcatgcgagggatctaggttgcatgcaccttatgaaaatygagctaatgcctgattatctgatatctaaggtggaacagtttcatccccaaaccatcctaccctcccccccaccacccttcatggaaaattgtcttccgtgaaactggtcactagtgccaaaaaggttagggactgctgtacatacagtttaggtatcatacatacatacattagcttctttcatcttcacaaaagacctggcatataacagttcagtccacatcttagaagagaaaaaaaaatgcttaaaaaggttaaataatactaaatactaaaatcttctaactggcaagtggcagagccaagattacaaccatctccactattacgagttgatttattccacaggttttgaagcactgttcctcatcaatctctaaatcagtacygagtttgtaagaatggataagatgggccaggtgcggtggttcacgcctgtaatcccagcactttgggaggccaaggtgggcggataacctgaggtcaggagtttgagaccagcctggccaccgttgtgaaaccccatctctactaaaaatacaaaaattagtcagatatggtggcatgcacctgtagtcccagctacttgggaggctgaggctgagaatttcttgaacacaggaggcatakgttgcagtgagctgagattgcaccattgcactcccgcctgggtgacagagtgagactgtgtctcaaaaaaaataaaaartttaaaaaaagaatggataagatggttcacctgccttcatggaggtcctgttctgagaattccgaagggcagtcaaagataaaggactatggtgagagaaaagggggcatgtgccaaacataatggtgttgccatggagacagtcattaatttcggaacctgggaaagacatcccccataacctaagagaaatcggtccttgttgattggctggagatctccacctgggaaaaggggaacaaataggccattccaaacaaaaggcacagaatggaccaaaggcaggaaggcatgataaagcgtggtgtgttccctatgtcagttgcattccctaaggaatcaggtggttggtgagatcggagggtttgggaaggtgatggcagatcgaaaagtaggtaggagctaggtcatgaaggatttagcgtgctgtgccatgccaaggagtttggccttttctggaaggcactgaaaatccactgacagtctcataaggagaagactgaccaggtcatactaatcagtcctcagtgtagaaaggtgagtgtgcgcttgtcagagaaatggtttggaggaaccaaaaccgagcatccaattaggaagccatgtcaataattcatgtaaggaatgatcatggcctgaactaaggcagaggttgagcrcaacagcagaatcaaatgctattaaagggttaaaatgggtgtccagggcacctgccatggctcacgcctgtaatccaagcacgtcgggaggccaaggctggtggatcccttgagctcaggagttcgaaaccagcctgggcaacatggcgaaaccctgtccatacaaacatataaaaattagctgggtgttggctgggcgcaggggctcatgcctgtaatcctagcactttgggaagccgaggcagacagatcacttgaggtaagaagttcgagaccagcctggccaacrtggcaaaaccccatrtctgcaaaaaatacaattagccaggcatggtggtatgtgcctgtagtcccagctacttggaaggctgaggcaggagaatctcttgaacccaggaggtggaggttgcagtgagctgagatcgtgccactgcactccagcctgggcaacagagcgagactccaactcagaagaaattgtgtgtgtgtgtgtgtgtgtgtgtgtgtgttagctgggtgtagtggtgcacacctgtagtcccagctacttgggaggctgagttgaacacaggaggctgcggctgcagtgagctgagatcataccactgccctccagcctaggcaacagaatgagaccctgtctctaaaaaaaaaaaaaaaaaaagaaaaggaaagacataggtgttctggtcaggtgtagtacaaaagaaaaaagatttgtacatgacctactttcccagtttgcagattargtagggaatacaaaaggaagcgcagatttagagtgagagaatgaattcgtctcttctatgtctgtgatttttctttttgttgttgtggttttgatgtttcactataacacgtgcttcctcatgatatactgtgtttgtgttctactgtggtagttgtggtgttctgcctgctcagcatacgtttcttccttccagtaacatcagcagaatgactgtttttctgttgaacaccatatctctccttgcttgtttcagttggtttttagtgtgtttgaggggtgttgatctcatccctggctgaagggataaggacatgactcagtcctggccagctgcaagaccacagacatctccctggctatagggattggtttagggcagatttgtgacccaagctgaaccaatcagaactagtaagcattacgccaaggctttttgctagtgctgttgggaaaggtactcgttgttgttgttgttgttgtkgttgttkttttgagacagggtcttgctctgtttgcccaggctggactgcagcggtgtgatctcagctcactgcaacctccacctccagggttcaagtgattctccttcagcctcccaagtagctgggattacaggcgtaccactacacccagctaatttttgtaattttagtagagatggagtttcaccatgttggccaggcaggtctcaaactccttacctcaggggatctgcccgcctcagcctcccaaagtgctgggattacaggcgtgagccaccgcacctggtagaaaggtactctttccactctatttgctaaactgtgatgaggcaaagctggaaccaccatttgtcattttgacaccgccaggagtttccaagaccacccctaaattcactggtttgctaggaggactcacaagactcagtgtatgtcatactcacagatatgatttattacagcaaaaagatataaggcagaatccacaaaggaaaaaggctcatggggtgaagtccagaggaaaccaggctcaaacttcaagagtcctcccccagtggagtcacgcaggacatgccaattcccccaacaatacgttgtgacaacacacatgaaatgttgcccaaaagggaatctcatgagagactcascacccaggatttttattgggggctggttatgtggacattctctaggacataccaaaattctagactcccagaaggaaagcaggtgtttatggtaaaccattttgtttgcacagtttagacacagtgagctcttagagaatagcaggaagcttcccaaaaccccagttctcagatgccagccaagggccagtcttgcaagcagttcatcgttctaaggacagcagtgtcaagcctgccgtgttacctctttcctagacagtcagtttgtctgagagggcaaacagatctgagagcttgaaaagagaagacagattttagattacattgtgttggagtctctagttccagccatgcctgaagcaaaatttctctttttaaaaactgcttaagtctcagtaaagtctctgtcacttgcgaccttaagaagcatgctggctgacagaacccatgctaagtaaataaaatgttttcttytgacttcttttccacttactaccatcattgtttcccttcttaaattgtcagagcctccttattgacagggcctttacccccatagcctagcatagtacccagcttatcataggcatttgtaaacttttgatgcgtggatgagttttctgtagccgtttagaggattaatctgtttagatggaaaaggtggtatctgcagcctatttatccatgaaagtgacctaaattaaaattctgaccaagctgaattatctctttgatcttcccttttacaaattcctcttcactgagaaattggccaccgctcttattaagtagtactacttgggctcaccatcctgggcctttttttttttctttttttcttttttggcctaattaactgtgtcaccattcaagccaattaggtgtgtgccttactgggagatcaattaaaaaataaattagtgtcaaagtggaaagggatgtgtcgaaagataaattttctttccagtcttgtacagaagcagcgggaaacagagcattttgtagctttacttacatgcacacatgtaggaaagaaggactggaagggatcttagaggtsatgagttagctcagtgccttttgttgcaaaggtcaagaaggttctaaggtctttgacttggatgatgcaatttcaagagaacttcgcttggacagaagtctgtgtttcatctttactagctgtaggcgagtccctctacctttctgatcctaagctatctgttcagtaagtgcttcactgagtgactatagaaagcatgaatgattagtaamataaatggatttgagtaggtgggcccagtgtctctttcaggtctatggatctgatgcaaattcacactgtcaggggcaaagccagaaccatataaaagcgggcatctttggtacctctcttgtcctcataccctacatttatcttccagtaagtcctgctggctgtgccttcaaggttctatatacctatccaagcctactagatactaaaatattagttattgaataaacaaaattaggtctctggcctctgggctctttggattctacgatatatttttctcccttctgttcctttaaaggagcaaataasagggaccctgaagtcaccaaggggacttgagtcactgagtttatatccggcatgaaacactgtccaaggcaggaatggagacacagagtgaggaagaatgacgaaatctgccccaaacagggttcccatgagagttcaactaatgaacagtgacctgctggctcagcccagggagaatctcaaaacataacatttggcttccaaatcatgctagattgtagtctatatctctggagacagatctggtagcagttacaatggaagtgggcttttattctttttttttttttttttttttgagacagagttttgctcttgttgctcaggctggagtgcagtggtgcgatctcggctcaatgcaacctctacctccttggttcaagggtttctcctgcctcagcctcctgagtagctgggattccaggcagccgccaccacacccagctaatttttgtattttagtagagatggggtttcaccatgttggccaggctgttctccaactcttgacctcaggtgatccacccgcctcagccttccaaagtgctgggattatagacatgagccactgcacccagccttgaatagctcttaatgtttctcatagacacgtacagtaggggctcaaccccaaatgtttgtttccttgacttaagattttagagataccctgatatcccatgacatcagcactgccttttttttttttttttaatttttggaaagaaaatgtgttttccttgtagaacagtaagacgatgactccagacaggatgagggcagtcagcacaaaaagaccctctgggcctcattgtaatagtgaaggaaaaaacaagaattgactagaccttttcaagaatggattgctctgctggaggcatcattaaggttctccagactgatccactttatacatgtgtgtcatgaataaaacaatgcatgtccgtatcagcacaaaggtaaagaatgaaactcaattgtgtatatttctactacctacagtcagctattgttaatatttcagatgcttttctgtgcatataggatggattcttttataaaattgggatcataatataatcctgtttgtataccagtctttttcgtcttaactttgcatcacaaccatttttctttgttatgctaaaacataaaagtcaaaaagtcggcttgccctgtgttcaagtcccagccccggctccgtaatcttggtgatccaattaacctctccctgccatattttctttttttttttttttctttttttcccccactttttttgagacagggtcttgctctatagcccaggctggagtgcagtggcacaatcacggctcactacagcctcaatctcttgggcttgggtgattctccccctgcaacccgccccccgcccccccccccccgcaacccaccaccccagccaccatgagtagctgtaactacaggtgtgcaccaccacacctggctaatttttatatttttttttaatagagatggggttttgccacgttgcccaagctggtcttgaactcctgtgctcaagcaatccgcctacctccgcctctcaaagtgctgggattactggtgtgagccgctgtgcccgtctgccatactttataggaaaactgggcaccttctcttctctgagtgcagttgttgtcaacactgcctttaagttataatcatctggggagcacgtgaagaataatgatgcccaggtctaccccatatcagccaagtcagaacctctggtatgggcagtggcctgccgtatttttgaaagctccctacataatgctgaagtgtggccagggttgagattcactgccctaaggttgctatcccaggatctgctggctactgcaacaaaagagacactgtgtcttggttgttttgccatgggggcagtggggcagggtactgtttgggaggagtgtttggagacgggattaaaatcctggcacttgtscctcccagggaaaagggtcatcctgtttattttgtgtcaagagctcaaacagtgatcaaaatccaatccaacatcataaataccagaaaaggtcagggctgggctggtcataggatcaagcacacacagccgagctgaggttggcacttagtcaactccaaactcttcactagcaaacagcacagggggggacttggcaaggcccggcctcttggcgccccagtcacagaatggaggttcacatggctctgttgtttttgtcgaaggaggagaaatgccattttctcagcagtccttctccttgactcattagtgtagttggcaatgtggttactttttaacttctctgcaaatattcatagaaagagaaggggagtagaaggcaggagctgttaatgtacaccaagctcctattttttgcaggcctccacagggtaaaagggactggcccccrtgcaccaggccactgccagtggtgcagatgaaggacctgagcccccacaggcatctgaggtcacatggtcagtagagctgggaattttatcccgggtcagaagaacttcaaagcccatattttgtcttattactacacatcttaagagattagagggccgggygcagtggctcacacctgtaatcccagcgctttgggagggcaaggcaggtggatcatttgagcctaggaatttgagaccagcctgggcaacatagcaagacctcttctctacaaaaaaatacaaaaattagccaggtgggtgtggtcccagctacttggtaggctgaggtgggaggatcacctgaacctggaaaatttgaggctgcagtgagctgtgatcgtgtcactgcactccagtataggtagtggagcgagaccctgtctcaaaaaaaaaaaaaaaagtttggaggatttaattagatcatttctagatattctgatcttgattgtgacaatctaaaggaaattgcattgtaggctatttaaggaactttccacataagtttgtcaagccagcctagctaatagaacaggatatgtttgagcaagttatttaccccattgggcctatgtggaatcccactggctcctttaataaaagaacatccagtcctcagggttggtgatargatgagtgtgaagtgcggatgcccatgggcatggggaatttatttaccagttcttttattaaaagagctggcaggattctgttaccaggacttgcctttttttttttcttttaatcagaaaattttgacaaagaatctatgaagtgcagatgtagggccaaccatacttttcacacttttttgattgtatcctacagtcagaaatacatttttcatcacaatccaaaagacatatgtgtgtrtgtatgtttatacaggcatatatacacacatatatgcagatgagcaattaaaacaatattttcgtaaaacaatacttgaccttactatgttcagtgaatttttatatttcttttctaatctatttaatgtattttaatttttaaaatgcttgctcagatccactgaattattttcacaaccttcaaatgtgttacaaaccctagtttcaaaaacactggactggaagatatcctaaaatgccttttaactctgtattaagcattctgaaattcagcaaacttgccagcaatcagagaggagatcagaagctcattttctagaacccatttgctggaaggggcagtgagtaatctcttgtagamggcttccttgtcctccagtggccttccccttcattgagttactttgtgtggccgtgccaagcatggtggctgccacgtggtggggggagccttacatctcattttccttacttcccaggcaggtgccctgttttatttatctctgtattccaagcatctagtaaggctcaacactgggctcagtaaattgatggggaaacaaaataaaaaatgtggctccattttcgtttttcattaaccttcagggaagattgcacaakgtaccttcgtaatgctattcrttttttaactagcttcaattcagctcagaaatatgtatggaaatatgcctactatgtgccaggtaatgttggacacagaagacactaaagaatgcgcaagaaagagaagtgattcttgctctgaaggaaatcctgtgtaaatggagaaggggaagaaaaaagcaaaaataactacaaagtaatatggccattgcttgtgcagagagtttccaaaagcatggtgcaggcatagttgaaggagagttacttccacttggggtaggtgaggttgaggggaagcactagagctgggctttgaagactaggcagcagtttgtgagggtccaaatagcagggaattccaggcaaaaacagcaccttggaaaaggcatggaggcatgatcctgcaggagctgtttgaggcaccatgacctgtggatgtggataaagctgagagttcaccggaagcaggcctgcaaggggttgggcactctgcctcagagacataggacttrggttggaatcgcaggtcctcctctttctacctgtgataggctggataatggcccccaaagacatcctcagcctaatccatgcactagaacctgtaaaaaagtaccctgtatagggccaggcatggtggctcacrcccgtaatcccagcactttgggaggccgaggcgggtggatcacgaggtcaggagtttgagaccagcctggccagtatagtgaaaccctgtctctactaaaaawtccaaaaaaaaattttgctgggcatggtggcatgtgcctgtagtcccggctacttgggaggctgagggaggagacttgcttgaacccaggaggtggaggttggaatgaaccgagactgcgccattgcactccagcctgggtgacagacragcctccgtcttaaaaaaacaaataaacaaataaaccctgtatagcaaaagggactttacatamgcgattaagttaatggtcttgagatggagggagtatcctggactatacaggtgacccccaaatagaatgagtgttcttggaagagggaggtggaggaagatttggctgcagagagaagaagcgatataatgatagaagcagagattggagtgatgtacttggaagatggagttaagggccacaagccaaggaatacagacagccactggaagctggaaacagcagggaatcgaattctccccagagcctccgcagggaaccagccctgccaacatcttgactttaacctgctaagactgatttcaggctttctgacctccagaactgtcagagaacaaacgtgtgatttcaagccacgtcatttgtagtgaaatgtggtacagaaggaataggaaaactgacacacttctttaaatggcctttcacygggcgcggtggctcacgcctgtaatcccagccctttgggaggccgaggcaggcagataacctgaggtcaggagtctgagaccagcctgaccagcatggtgaaaccccatctctactaaaaatacaaaattagccaggcgtggtggcgcatgcctgtaatcctagctactcaggaggctgaggcaggaaaatcgcttgaacccgggaggcagaggttgtagtgagctgagattgcaccatcgcactccggcctgggcaacaagagtgaaactctgtctcaaaaaataagtaaataaataaataaaataaatggcctttcaactttattccacctctgtaagcctcagtttcctcatgtgtgaaaacggggatagatgggagtcatcatgcctgacgtggcagcctcatcgggtaaacctccttctggtaaggacggtgtacgtgtcctgaaacatgggccttagcccactctgtgacgcatcataaggccaaatttattcatgaaagtagataaagatgaaacaggagagataattatgttttattgaaaatgcttgttgacttgtctttgtttctggcaaagctacaagtgtggagtggaaagtgccttatctgtctggtttatcactctctcctcagtgcatagcagggtgctcagcacgttaagccttctgtaattaattgataactgattaaatgcgtgctctgttgtatttggagatcccaaatcatgaaacatacagaaggccatttgtagagagagattacaggaagggaggccaatgtgaccaccacagtaatcttcatgagagatgatttttcatatctacttaaaatccttcatgttgcacttttctgctcatgccctttcgttctgttctcagagcaagagaacagctgcagattgtcctcaaatagtctcgtctctaccattaatttgttctccagccttctctttccaaacaaaatgacccaaattattttggctttcccttgttcagagtgccgtattgtaatgccctgcagatgttgcaagaggatggcccagaggacaaagtgggcttgcacatgtgttttaagtgaccatgcggacttttttgtttcatgcgaattataaaacatggcaacttgaacacatgagctcatttccatggtctctcaaagtccaccaagatggcaggaaaggaataaaagaaggcgtagttcacaaggactaaggtactggaagaggagaatacagacaagggttgccggcaaatttcaggagtgaaaatacagatgggacgggggaaccgacatcacagatcagcgatcccaccgggcaacaaggcaaggagtgggctgattgactttgctgatcccagacagggctcagccgtgagaggttccaggtattcccaaatgccacatggaatggatccccagccctatgagggggttggtcaatagtttgtataagaaatagttagaacccctacctcttctccagtttatacagccagggagatattcctctttggtccctgcatattgctgcattttttttctttttttttttcttttgtttttggagttttactctcatcacccaggttggagtacartagtgcgatctcagctcactgcttcctccacctcccgggttcaagcgattctcctgtctcagcctcccaagtagctgggattacaggcgcctgccaccacatccagcaaattttcgtatttttagtagagacaggttttgccatgttggccgggctgatctcaaactcctgacctccggagatccacccacctcggcctcccaaagtgctgggattacaggcatgagccaccgcgcctggcctgctggaggttttctcttggacccacagcatcagcgtggctccggacacacgcacttcattgtgcacagatagggttgcagcagggtgctggagtgaaaccaaggagatgaacagaaggcgtacgccctgacgggggaggcccctcagcccctcctctactcagaagtcagaaggcttgaggccagttttctgtcctccagacaagagattgtatgattcctctttggggaaacagcccagcccaagattgtgataatgatgcttgggatatgccaagtgctcatgtaaagtcgtattaagttattactctcggcttcaacccaccctactggaccctgctctgagatggtggggatgggactctgcatttcagcactgccagtatcttttgggggttttacagatggagcgccatgggaagactgagtccagaggggaagaagagacttgctcctgcctgtctgcttcctgttttttgtaaaaatcagcccagcattgcaacctcacctggttgtgttgttgattctagttgtagtccatcctctccccaaacccagaaccagcactggggcagccccgcctcggaggcctgggtcccagcactgtggggctccaaattctaataatccacactctttctgtgttaccccagccctaggattgcagttgacacttgcagtcgccatttgtgtgacaggtcagcattccccctttgctcttacatttcccatgcctggctagcagctctttatgaaggttccgctagctggggtttcttgactggaccctcactcgtggatgcagtagaagtcagtgagtgacttcatccctctttttttttttgtctgtttgtttttgagacagagtcttgctctgtcgcccaggttggagtgcagtggcgtgttctccgctcactgcaagctccgcctcctgggttcacaccattctcctgcctcagcctcccgagtagctgggactacaggtgcccacsaccacgcccggctaattttttgtatttttagtagagacagggtttcaccgtgctggccaggatggtctcgatctcctgacctcgtgatccgcctgcctcggcctcccaaagtgctgggattacaggcgtgagccaccacgcccggctgacttcatccctctttagtgaaggcctgcagtcaagaagcccacccacacactcaaagctgcccacctacttttaatgcctcactcatccgcattatgaagagtcagtaaacattggaggaaaagctctaataaaaaagtcaggttagttttgacaaaatgaaaaaaaaaataaagaaatggataggraacagtcaaggcagagaagagcggaaaacgtccaaaaaaaaaaaacctgaaattaatgtcctaagaaagatgaaacagctatttcacccatcaaatatgaacaagatcctacatttttttwaaaaaaggcagctttgaaaaacaaggaagagctttaggaaattaaaagcatgagtgttgacatttttaaaaatgggtcaaaaattagaagatgaagtggggcagtttaccatctaggttcttttagatgactttagactcatgagaaataaacacaaacatacatttattgagtgcagttgctgggctaacgtttcccgacttgatattagcccatttattactggtaaaaatccacaaagtcggggcattttacatctgttggattaaacaactaaggctgagggagccctgcctgattttgcagcttctattagcctcatcgcctcgagaaagagaactgtatgccaatcgaggcagcctgccgcaaagtttccaaggggccgtatggggagacagcatcttcattgtctagctaattgaaaaaaggaaggtgctcgaatggaacycagctgatatgaatagtctcaagtgaggactcggtctttcaggcatggacagggccacccagcagctgacgacgttaataaaattgtcaggcagctattagaatagcttaaaattattcaatttttataggtacctaaaaaagcygaacaacacttgtctttgctcataaaatgaacatctgttagctcccggaagactggtacccattgttagtggctggccctttgtatgtcactcagcccaggatgctcataatttagcttgggttttactcccttctttaacatgggccctgcagtagacatgcatatacttgatgtttcttttttctcaattttgtttttacttttctcattccttccactgaaagaccatgaaatcaaacatttggattcaacacgcaccactttgagctgtaacctaccacgtgtcttgctctgtactggccctttggggcactagctcatgctctcagtggccatttcaagtaaacgactaactggacatcatcgatgagcaggttccagggccgttgcgcctaacactacttggcactcacaaaggaatgaacacattcttggtgtatgtataggggaaatggatcttagggctgaattcttgcttgcattctgacaaatcagcacagtctgaatgttacgtcttagaaatgtcaacagaaggacccaagaagcctaaaactttaagcatggatgatgatgataagaataatttgcaagcaagaactatgccacctctcaccctgagttggtgacagccagcctctgttagccttagtttttatatctgtaaagtggggatgaaaatctctgccttagagtgttggtgtctggatcatttgagataatgtatgtgaaatatatggattagtgtctggcacagagttggggttcaggaaatggctgttctttagtctcccccttgtcagggcttgcacatctagagatttccctgctgcaggtacagacccaacctagatcctgtggggacagaaacaagtataaaacagaacatttttcctcaagaagctttctgtatcacacgtagcctccaaaaatttctcaaaggtggttagaacaggtgttttaggtggggaggaaataaaacrttaaaagaaattctgaagcccaagatttctttgtacaaggaaacaaaagttgggagagattattagagttagcaagtggtgggaatgaaataagggatagatttggtcctcttcatccctgttctattcatccatttatttagcaagtgttaattaaatgctcactctgtgctaggcacatcagagtggtgcaccactacggcatctaagttgattgcaaaaatgtactaaaacagctttctagatcatctaggcactcctgaggcttcaggcgcctccttgcaatccccaccttgcaggcatgcagtgtctgttgcatggaaccattggaaggaagctcaccyggcaagataatcttctcttgttccgggcagcctgagcaaaccttgcatcctaaaccattctttctaacttcctctcccttctttgagtttggtccttgagaccctacagctgaggctgattggttgtactgtgacagtccttcaggtaattgaagtctactatcagagcctcctgggcggtttccctcctccatgctgcatttctccaggtgaaggattccaagttcatcaggatctttgtcttaagacagcagcacacaattacaaaagcagcatcggtgcaacatattcatgtttccttgtgccattttctagctgtgtgatcttcagtcagtaaattaatctgcattaggcttctcaaaaggaagtgtggaggtcacagtggtgtccacatccaggtagttggagagataattgatataattcaaaagaatgctggccaggcacggtggctcatgcctgtaatcccagcactttgggaggccgaggcgggtggatcacctgaggttaggagttcgagaccagcctggccaacgtggtgaaaccctgtctctactaaaaatacaaaaattagctgggcatggtggcgggcacctgtaatcccagctattcgggaggctgaggcaggagaatcacttgaacccaggaggaggaggttgcagtgagccgagatcgcgccattgcactccagcctgggcaacaagagcaaaactccatctcaaaaaaacaaaacaaaacaagaatgctgcacatggagtaggtgatccagtttgtctataagtatagtactactggcttgatgttgtcaggtgtcaggttatggatggagaggccaaagtacaattagggcaagtcagtcaccaagactctcacatctgttagtgtgaagatgaggagtgagaccagatatcagtgccctgtccacattgaatgactgggtagagagtcaagctctgcaattcctgagtctctggtgtgtactctatggtacttaatggccagtcaataagatactgttcttttagtagcaaagaaaatgactagataaccaaataattacatcggagtccagggtgcatcatgtaggctgctatttctcaaatttgaatctgcatgacagttcatcacacagggagcttttagatcctggtcctcatccctggagactcaggctctgcagggactgtgtgataggccttgtacttgtgaagctgatgcatgatcctcatgggacatggtcctcagagcgcaactatgcctagcttctaaatgcctaggtgagctgaatcttgtaaggccagagaaaacaagagtgcttaaaggagaaggacgttttctgcctagttgttttgttttcgttttaacttaccaggaaaatataaaaacagtatcattaggagacttatctgatggctaaaaaaaaaaaaaaaaaagcctcagcaagagtctttccaataggcaatggtgtttgctagctttcagtgagttttcttaacgtttccaaattctgggccagatgttatttatataatctcagttaggagagcttttggctgcaagtaactgtgctgtaagccataaggaggtagagagtgtttccaaggcccctgattctttccatcctttttccattcttagcacattggatttttatcttcatgctttccacttcatagttgcaagatggctgccatagctccaggtgtcttgtcttcagagtcccaaacaggaagcaagagcaaagctaaaatcccttcttcccagaagtctgcctttttatttaggataggaacctccaaagcagacttctctttacatctgatagtttagaaattagttataagctgaaccctagaccctatcgctgctagtagggaaggggattaccatgtctggtttatagagattatgagttattccctgaggataggaagaggcccacctttcctgaaatcagcagtctcccgctgctgccaaaacacaaacacatggttctgttagctggtgagaaggaggaagatggttgggtagatattaatagcagtgagaatccctcatgaagctcagaaaggagaaataatcttccgagaacacacagccagcaaagacagagtcagttgtcaaatttrggtttgcctttgaagcccgtgtgcttcctattttaccatcctgcatcttagaacatgcagccttctcatcaaccagagatgctatctgttccagcaaacctcagaaaaagatccgatcccctgccttcgtttcacagatgggaaaataatggccagcatgggggaagtgattcacctaagttcactggcctatttggcaggctgtgagcctcgtcatctttccttttggcatttagtactttctgacccggttaatagctaggcacgttggggctgcttttgtcttgtgtatactttattgtctgctatcattttttgctttagcatccccattggtaagtgctcttgcatggattcccagtaggtaatggggcaaccacagtaaattaggaaggtaattcgagctgtagcatttgatgcaccccagtcacaactatgttgtgctggttcaacctgagggacacatgagcaggagggaggatagagagctcagggcttgggctgccaaggcaaggggccatcatggtcctcaaaggcgatgagccagggattagagagggctcaccatttctactcctgaaaaaaaagcaagataagctttaaagtcccttcccaattctttatagagtttcctttggctaaggcataagctgataggaaagatactgaggaaggacaaaagagagaataattagaggaaaaaaagtgctattccacgtgtagggagtgagataagggaagwggtgagttgatgagtttctctcctataaaagatgaggctgatgacatgaactgtctttcaggcttgttctaagaagagatgactccatacrtgcaaaatgcatagaacaatgcctggcgtatagtagacactcaataaatgttaagtactaagaaataaaaataaaatcctaagctccctaacaaatcagaccatctcttggtcaaggagaccccagagtaaccttgacaactaagttgtcggccgtgatgggttgggggtgtcagtgtcaaacatacctcgttatgccccctccctcgctaaccaccgttaggctttcttctgcaagggattgacaaaaaccagccctctcaagagactgatatctactaacctgctgatgctgcccctcctttttcacctgatcagagatcacccaacacagagtggttctggccagtctatggagaatgtgcaataagagtttttgtgtcctttgcttcaccttttgacatcagaggatcaaaacctccacccttggataatgytaactctgccattttttgttcatgagacacatgaagggccatgaagctcagttgctcatgggcacgtgtctccttttataaatattcatgactcctcctatagcttattgaatatgtatatttggtcaccctgatcagcataaatttctgtttcctttttccctctggtgaagtgtctgtttctggtttctgamggagtctacagtccccagcctgttagaatagccaccatgcaggctgcgaccctttatgagaaataaatctctcctttccaaatttatgaacttcatcattctttagctgacactactgtattatccttaatattggacattttgtgagattttaccccgccccgccccccccgacctctgccagaacccacagtttgaagaacaaagtgggtatgtctactctgtacaaggatctgttgctagaatattttactcatatgggtttttttctcgtttaatctttccagcagcctgagagatcaatattaatattctgatgttacagagcagaaaatctgggggaccctgaaagattaagatctgttcaagtccaaaaagacattggcaccaaagttgttctgcttttccatgcaggaactccacctctgcctacagccagctgagtcctgctctaggagcagatgtggtttgtcatttgggaaccactgtttacacctcctccactgtctcctgggccctttctccccctcccttctttccttttgttattatggtttgttctggtcaaggggccagtcactttctctttgtgctgtcaccttcctttaatgggttccacatctgggcagatgattctaccttccctctaaagagggtgtagaggagccagagaacctcagactctgggtggggtgggtgtcacaccgatgcaggagcatgtcaaggagaaagacagcaagagggattaaagttggcactcatctttgagagagcctctgaactgattgccatccgagtgccacccaccaatgaaaggccgttcagaatttctgtcccctgggaacataaatccgatcgccttggctctgtgtctccactgcatcatctcactggccctttgagctccttccacgtggtaatgccgttatctttgtacgtgaaccacctgcctcagaaccatttggagtacgcttgggaaaacagagttccaaatctagctcatccgacctataggggtttttatccttggaattcgcttcttttttgagacggagttttgctcttgttgcccaggccggagtgcaatggtgcgatctcggctcactgcaacctctgcctcccatgttgaagtgattctcctgcctcagccgcccgagtagctgggattagaggcatgcgccaccatgcctggctaattttgtatttttagtaaagatgggatttctccatgtaggtcaggctggtctcgaactcctgacctcaggtgatccacccgcctcggcctctcaaagtgctgcgattacaggcgtgtgccactgcacccagccggaatttccatttttaagcaactcccgtggtaacgcaggtgctgtcttcaggccatgctttgagaaatgctgtagtcaactgtgagctgcaggggagcatgtctgtgactctctctttgtattcacaaccccttgccttgtgtatttttttaatcaaatggtggattaattgagtatttgattaattagtgtacaaagagaacagaaggaagtccgggaaatggaaagttttagtttctcaagagtaaaggaaaacagaataaatcaaagttaccctggaagatcagaacagcctttgcagttgatggacttgtgttctgtgttctctctctgaactcttcccagcgcctgtccagcgtaggctctctgctgagccatgtgagagcacacggatactgcactctctgaatcttgtacactacagaagtttcattacaagcaaaacccttagtccaggcacctagctgaaatgtgaacaggtgcccattctaggattcttcatctgataaatgcctgcaaaggctccaagtccagcattgaatactgccttttctctgaagcctcttctctcccctcaagccacgtaaggtccatctctcttttctttaagtgtcatctgtggcgaaaacaggcctctttaagtctctggcattgtacctatttgttcacttgtgtgtttccttcattagactagaaactcttaagacaggctctccactaatcctctgtagaattttttttcatataaatatagtttttttctcttataaatacagtcgtaaaacattgctatcttttgtagcttctttcaacctaacataatgttttcaaggttagtccatattgtagcatatgtctgtagcacattttttatggccgcattatactccgctttatggatatataccacatttgtaatgctttcatcagttgatagatacttgggcagttttcactttttgactaccatgagtaatgttgctatgaatatttctgtacatagtttgtgtggacatacattttcagttctcttgagtatattcctaggaatggggctgccgggtaatatgttgactccatgtttaacatttcgaggaattgccaaaccattttccaaatggctgcaccatttgcaaggctgtattttacaagtagctgttcatatgctaagaataccaatccgctgtgtcttcactgaatgccagctaaccagacaggtgaaacacaggtgatgaatttggagtcaagacctgcagaagcttcccgtccccgtagcctctctgagcactcattcagaaataatgagtggatccagtatgctgggggggaaacataggggacccaggacttacgggtcacctaggaacagatgaagttgtttaaccatgagctaaaggcaggatggtatttaatagatacattttcatatctgggacctgcatcttgattatagatcaaatatcacttgcatttgtttttctttactctcagtgacatgcaacagaagacaggctttatttgagaggctgtttcatgcagctttcagcttgtttcagtctctttgtctaccttgcccagtagtcacaaccaagattctgaatacctccaatttcttcttggagatcatacttcttatgctgcaaatcaaggcagtactatgggcctggggtggtagtggaatttgcagcggaagcagtttcattgaagacatattttctttgagcctcaatcttgaaggattaagctgagcatattactgtcagaaggtcaagggaccctctgttctctgtggcagacctgcagaatggagtcaggtttcattctcttcctccttcctccgtgccctaattatcacttgacttgagtaagccatgagttccatcttgatgacatcaacacattgcctgatggaaagatgctaaacaaaagattaaacatttacaccttcctaaaccagaagacctgtgtgctaaagaaatagtagtaagccatctcagtgtttggcaaccttattggatttcagacaattctctggaatctctcttgcctggtttctttaccaaaacaaactacttttgccatctggagattaattcagtagataaacatgggacagaaaggaccttctttgcagtactttttcccagtgggctgtactttgcttatagcttctgtgggacttagttttttttgtttggtttggttttgctttttttttttttttagctttacctagaaagttttggcagatcagccaaccaggaagagtgacgtggttttctcacaccctgggggagacttgttccactttctcacactcatgttggagtgggaaaagagggcttactccaaaccctccaggaggaaaatcattgtctggtaccagatgtaatttcagaaaagggtgggttggagcgaatgggagagcatgggaaagtgatgaggggtgagacgttatgtggccccaggattgagttggacatttcttttgctcaagtaaacaaattatgcatctgatcctgtactaagaaacttattaragaagattttataagatgacaagagggtaaattagaaaatagattagaaaggtgataatattggtgagtgccaggagttagagatgtggggagcctggcaaggaaatgggcttgattttwttattattattwtttttttttttttgagkggagtctcactctgttgcccaggctggagtgcaatggcgcaatctcagctcactgcaacctctgcctcctgggttcaagcagttctcctgcctcagcctcctgagtagctgggattataggtgtgtgccaccacgccctgctaatttttgtatttttagtagagacagggtttcaccgtgtcagtcaggctgatcttgaactcctgacctcatgatccgcccgcctcagcattctaaagtgctgggattacagtcrtgaaccaccacacccggctgggcttgatttttatagaggtgtagatttaaggagattttagtgatgatggcacagttctctrttttgattgccatgatggtttcttgaacacatacgataaaatggcatagaactatacacacatattgtacccatgacagtttcttcatttggatattgtactagttatctaagataccaacattggcagaaactgagtgatggatacacagaacctctctgtacgttttttgcaatttcatatgcatctattgttatttcaaaataaagttatttttaaaacctagaatgaggacaggaaatagtaacacaaatagaaaaaaaaaaaagaaatgatatgatggacaatgcagataatggcatagcattaagcaggtgtaacctctactgggctcctgacaaatggtgacatttaaaacagggcaaccacactgcatctaatgtggtggccttcattaagattttccaagaggaaaatgtttgcgattcatgtcacagacaataggctaatctcaaaattagatacaaagaacccctagaaattagtattttaaaagacaagtaaccatgggtacagagtatcaacacacagttcacagaggaggaaatgcaggttgttggtttttaaccacagaaagagaagcaacttctgcctcgcaaaaataaaaagaaaggaatgcaaataaaaacaatagtgagggctgggcagggtgtctcacgcctttgggaggtcaaggagcactttgggaggtcaaggtgggcggatcacctgaagtcaggagttcgagaccagcctgaccaacatggtgaaaccccgtctctactaaaaatacaaaattatctgggtgtgctggcacacacctgtagtcccagctactcgggaggctgaggcaggagaattgcttgaacccaggaggcagaggttgcagtgagccgagatcgcgccattgaactccagtctgggcaacaagagtgaaactccatttcaaaaacaaaacaaaacaaaacaaacaaaaacagtcacccaagctgaagtacagtgatgcagtcttggctcaccgcagcctctacctcccgggctcaagccatcctcccacctcagactcccaagtaactgagactacaggtgtgtgtcaccatgcctggctaatttttgtttcttttttttttttcttttttttagatagagtcttgctgttgaccaggctggagtgaagtggtgcaatctcggcccactgcaacctccacctcttgggttcaagcgattctcttgcctcagcctcccaagtagctaggattgcaggtgcatgccaccacgcccagctaatttttgtatttttagtacagatggggtttcaccatgttggccaggctggtcttgagctcctgacctcatgatccacccaccttggcctcccaaagtgctgggattataggcatcagccaccgcacctggccttttttgtattttttttagagacaaagtctccctatgttgcccaggctgctttggaactcctgagcttaagcaatccacccgcctccacctccacctcccacagtgctgggattacaggcatgcaccagagataccatttattaactctcagattactgaaaatctgtaagtttggtaacacattctgttggtgatgctggtgggagtgcaaatgagcacatcccctgtgaactgcctttcagcaacgtctacaaaatgcctgtgacagaggtggctaactcttcaccaaaaatttgtcttgctcttcctcagtaatacagttacagctggcaagtagctcagcagctaagggcttgatatagtttggatgtttatcacctccaaatctcatgttgaaatgtgatcctcagtgtttcaggtagggcctgatgggaggtgtttgggtcaagggagcggatccctcatgaatggcttagtgccatccccgtggtaatgagtgacttcttgctccgagttcacatgagagctagttgtttaaagaagctggcacctgccctttctctctcccgctcctgttcttgccatgtgacttgcctgttctccctttgccttctgccgtgattggaagcttcctgaggccctcaccagaaatagatgcaggcgctatgctttgtatatagtctgcaaagctatgagccaaaataaacctcttttctttataaattacccattctcaggtattcctttatagcagtgtgaatggactaacacagagctacacctctcagcttcccttgcagacattgctagtactctgcattagaatgtgagtagaaaaaacgtggtgtatgtatatgtgtttgcaaamaatggccacaagtttttcccctgcctacatcggttactttcaccaagactgtgtagctcctcccattaagaggaggcatctatgtccacttcctgaatctgggccggtcttgtcgtttgttttgaccaatgtaatggtatgagcatgacacaagcagagacctgaaaagtacttgagcactggggctccccctgccactctgggagcctgtctgccctgttgtgaacaaacccgggctagcctgttggaggatgagagcccatgtggagagaggccccatcatctgagctatcctatgctagcaggtaaggccaccctatagtwgccagcccagctgatccaacagctgtacttayggctgcagaggcatgagcaccgtagcccaaaccagaacagcccagctgtgtcaggccagcttgcctacttgcattttaagccactacatgtgaggattacttgttacacagcaatgctgactgatacagtgtgctacttcttggagaaactttttaagaaccacgtatttcttcactgtgttctctttttactgtcctatagtcattcctgaaataacccatagttcccagccagtgggacatctcattttgcaaccaggcaacagtgccaaaatacactcatccaggctcctctttggcaagcgctggggactgaaaatcagtgccctggcctcaaggagctcacctgccagcaaagacagacacatgtaaacaacacaatcaaattactacttatttttattactaatagatacattgatttcaggtgctgatcagtgcaatgaaaatacagctggaagcttgttatgccttaaggaagtgagcttttgggaatcagttcacggagccactccacgctttctttttacattgaaggaagagaggcccacacagaagtcccaaaacagcagctcgtgttttgcacggaatcccatgaatttctgtcagatcatgtctcatagagcattactaaaaccaggacagaaagacgcagaacacttccgggagtcaggcagagcagactgggattaggattcagatgtgaacagaaagcagctgcaagctgatgtggctcagctcaatgcccaggtgggcagtgggggcaggtgttggtggggaagtgagttagagatggcccagctcagcactgctgtgttctgcagagagttcagagtcccctcccgtgcttgtcagagagcagaagcttgctgtctccctgcgggattgtgggatttggagaacagccacccccatgaatctcaggtacaggatggtttaagaagcactgaggccagacacagtggctcttgcctgtaatcctagcgctttgggaggctgaggtgcaaggattgatttagcccagggtttcaaaaccagcctgggcaacatagtgagaccccccatcagtacagaaaataaaaaattagccaggcatggtggcacacgtctgtagtccccatttcaggaggctgagcgatacaaaaagtagaaaattagccaggcgtggcagcacaggcctgtagccccagctgcttgggaggctgaagagggaggattgcttgagctcaggagatccaggctgcagtgagctctgatcacaccaccgcactccagcctgggtgacagagtgagaccctgactccaaaaaaaaaaaaaaaaaaaaaaagagaaaaaccactgaaacagatagacgaacagtctcttagcctctcagcaagaggaagccagggagtacaaacttcttaatcctaaggaaaagaaaatgctacttaaactaaatatcaagaagagacaaattcccctgtgcttaagaacacgacttggaaatgttctctttttacccagcgtcataaacagaatgtgggctggtgatgtggccatgtagatcagcctctcaaagaatgaattgttttctttctcttttttttccttgtttttcacttctaaaatactatgtttcctcttttggttaaatgacagacttgcttttaagaagagcagtcaaggatgtaaaaatagtgatttcaaagaaagctgggagagaatcatcatttacgtgtttttgttttttcaatttgggaataaactcccagtgtgggtggggagtgtctggagcctgagagggaacctgggtgtcttcgggagccrgtgcaggggctggtactttattttatggggacctgtggcctgagatgcgttttagaggtaacagtgcccccttctggtgcaaatgaataaagagttgaggtttctgtaagtataatttagatatccccgtggcagagtggagcttttaaactcattgtctctggggcagaaattatgccttggctgttcctccctccaaccccagggagcccccctgggtctcctttgaggcatgctcctctctgaggcatatgtgaccacacacacacacacacacacacgcgcgcgyacgcacgcagctcagggacctgcagaattgccagagatcattgcagtgagtcaggattcctctgtcttgacttggatcttcattcttcagcttgagcatatccatgagatttttttttaatctgcagaaagccagagtgctctgtggaatcaagctgcctgtgaaagtgtttcttttcttttcttttgcctaaaacaaattccaactagctgtcttgttttaggtaagttccaactagctgacttccatctggtcagctagttgtacagtcatatgtgtacacatccaggggcagaaacatctaggatgttggtccctggatgtgcgggtccctggatatatgtacacatgaccgtctcttttgatgtatgtcaggatgtgatcagaattaacacttaaacccccacggtcagtaccacacccctttctctgccccactccagtcccctcagggggtgcagttacacttccactcctgtcctagtgaattctccttggcctggtgacctgggagggcctcattggagaacaagaatattggacactatcatgatcaacactaggggagaagggcccagactccagagccagtcagcctgggttcaaatcctgtgcctgaggccgggcgcggtgggtcgtgcctgtgatcccaaccttttgggaggccgaggccagcgcaacacctgaggtcaggagttcgagatcagcctggccaacatggtgaaactccatctctgctaaaaatacaaaaattagccaggcatggtggcatgtgcctttattcaggaggctgaggcatgagaattgcctgaacctgggaggcggaggttgcagtgagctgagatggtgtcactgcactccagcctaggcgacagagtgagagtgtctcaaaacaaaaacaaatcctgtgtctgccatttgctggcgtgtgaccttgggctgttgatttaacctgtttgggattcaattttctcacatagggatgatgatcacaatatgtaattcctgggatttgtgtgacacacagatgagttcctctatgccacgtatttagagcagcgctcagcataaaggacttcatgcacattaaccattattctagcttcttggcttaaggtatgaagttgccagatcttctcagctgtatgatttcctcaagtcaaatcctggttcccattgccttgagaagagagggtgcctcagatcccagaaaaatctgtaggagttggagtgatctaacgacagcaaggagagtgaatttggggcatcacccagttctccttataatcttcaggccagtcctgctcactgctgtctgactttgtagcctgatttttccagatgaagctgctcttgttgacccaggtctsccccttcttctttaaggtatattgtatctgtgggatacagacatagtgcaggactgaggccatgcattctccttcctaagagcttcttactccgggtctgtgggtagattccagggattctcagactctctcagaagttgtatacaaaattctctgggcggcccggcacagtggctcacgcctgtaatcccagcactgtgggaggctgaggcaggcggatcacaaggtcaggagttcgagaccatcctggcccatatggtgaaaccccrtctctactaaaaatacaaaattagccgggcgggtgctaatatttgctaatattggtggcaggtgcctgtattcccagctattcgggaggctgaggcaggagaatcgcgcttgaacccagtgagccaagattgcaccactgcactccagcctgggcaacagagcgagactgtctcaaaaaaagaattctttgtgcattatatgtatgtttttgtagctctactccaccgagttcagccctttttattggacaactttcctagaggttagagtgcgtctttagtacttgttgggtgatgatgggacagagaggggtgtggaggggttgagggatataagtttgtagccactttccaatttttcatcctatcgtagcttctcttagtaatccagagttagctttctagtggctcaggtgtatagctctggaatcatcagttaatacgtattcacagttaaggggaatttgtagggaaaaaaatgccacatgctgcttcccagagctgaggattttcatcagctcttctgaattattcacactcctcgtcccttttttaatgtagataacaaagagttggtagcaatataagagtgcgtgtttgccttttaaggctatagtcaacatataaaaagaaaatgatgtgttcccttgagtacttactactgtctagtaaacaggggacagaggtgcttaaataggaggaagtgggctgggcatggtggctcacgcctgtaatcacagcactttgggaggccgaggtgggcgcatcacaaggtcaagagatcgagaccatcctggccaacatggtgagaccccatctctactaaaaataaattagccaggcgtggtggcgcctgcttgtagtcccagctacttgggaggctgaggcaggagaatcgcttgaacccggaaggcggaggttgcagtgagcggagatggcaccactgcactccagcctgatggcagaaggagactgtctcaaaaataataataataataataataggaggaagttggggaggcttccaccccatcatcttggtctgtcctcagtggtctgatgggatgcaggaccagctgtataatttgtgaggcctggtgcaaaatgaaaggtggggcttcctttttttaaagaaatgtgttaggagtttcaaaatggtgatagcaagccattaaaccaagcacagggtcttcgtcagcacaaggccctttagatcctgtgtccctaaagctggccctggtgagacatagggatgtgggcctctccccacatcctcacactatttcagcccgctggatgtcttgcctgccttcgtcacaccaggcacacatctgccttgcctgctttgtgcttactgtttccccgcctttaagcctctctccccagatagccctagccctcgctccttcatttcctgcaggtttctgcccagagctcaccttagcagaggggcctccgccatcagtcttctctcaaacagcatccctcacaccctccctgcatcctctgcaacaaactctcagctttcactatggatttatctgtctatcattgattgctcttctcacgctggtgaagcgcaggctcttagagggcctggacacggtggcgttgctcactcccggactctgtgaagctggcaaggtgccaggctggtgctgtgtgtgtggaatacacaggtgggagtgttctttgctaactggggaaggcaagccaaagggtgagaggccaaggggagggtgaggggtgactctggactcgtcacctctcatcctgatcttgtcaggcaggagcaccttcttcctgccagtgttcatcattctggaagccttttgtaagatccagggcgctgaccagggaactttccatgcaccaccttttgggcagattaagtccggggactactgcctcccctgcctgggttcttcagtgtataaaatgagggggtttctggggtagcttttctggctgttttctcgttgaatgtgttgttgatgagtccagagttcttgtttagctccagtgttctgggaaagatcgtcctggctgtctattttctgctccctgtgaaaatgagttcattcattcaacaaacacataccaagtgccaatcatgtgtcaggtacgctaacaggccctcagaatacagcagcaacaaacagcaagcagaccctccggagtttaccttttcatggatgtgatgtctgcagggatgaacagtttgtcatggatagatttgctgctctctttctaggtctctgtgcatcaatttgcactggaaaagccacttgcaatgctgtaaaagaaggagtatttggagcgaaagtctagggaccttcattaaaatctaggtttctgggcctcagcaccaacaagtgtggctttggggtcaagagcttgcggtctggaatcacatcatgcagcattcattcttttttgttgttttttattttttattttttttttttttagctacacctgctgaaatgggaggggttcattcttggctctactgttttctgagaacttgaacaaataaactgctcgatatcaatttgtttttattttcaatagcaaaataaagataggaacattacgtgcctgcgaggagatcctttacctaaagcgcttagcacagtgcctggttcatgctgttcacacagtgctgtgtgttcatgttattgacagcctcagtgacagcctcagtgagcttaggtcactatctttgggccttggctgtccccttctatcaaatgaagtgattgtttcacccctttataggtccgtgtttctgactcactttaataggactgaaactcgtgattgtctctcctccacrtgtagactagccgactaaaagaaggctatatgatatatatatacacgtagttgtcccttcatatccgtaggggcctggttccaggaaccccgtggataccaaaatgtagcaatgctcaagttccttatattaaatggggttgtatttacatacaatctatgcacatctcctgcatactttaaatcatctctaaattacttataatacctagcaccatgtaaatagttattatactgtatgaatttttaaattttgtgttactttcgtttatttttattttcattgttttttcttagaatatttttgatccacatttggatgaagtcgcaaatgtagaacctggagatacagagggctggcagtatacacctgtgatacatatgtgtgtgcatatgtctatgaatatatatatacacacatatgcaggcataactgtgcatcatcgtgtgtgtgtgtgtgtgtgtgtgtggacacacatagactagccgactgaaagaaagctatgtgagatgtatacacacacagtcatccctcagtatccacaggggactggttcacataaacatatatgcagtctgtgacacttaatgatggggatatgttctgggaaatgcatcattaggtgattgcatcattgtgcaaacatcactgagtgtacttatacaaacatagattctatagcttcccacacatctaggctatatggtatagcctgttgcttctaggctacagcctgggcagcatgtcactatactgaatactgtaggcagttgtaacaaaatggtaagtatttgtgtatctcaacatagaaaagggacagtaaaaatgcaacgtcataatctyatgggaccacaacactatactgtctgttgttgaccaaaacatcattatgtggcacatgactcgtgtgtgtgtgtgtgtgtgtgtgtgtgtgtgtgtacatcagctcttaagtctctagagctttctgtatctggcattgcagtctctcagccagcattccaatccctgagagatgctgctttttcacatgtgggagcgttccgggattagaaaaatgaactcttgtctcttccaactcaagggttctatcagtcctgttgcaatccagacagattttacttaatttcctctcttgcatgtgtttgttttgcttgtgtattgaagagagttgcatctcgctgcctcctggatctgcttatcagcatttttttcaggcagagtgtgttcttgcttctgctggtctccatcattctggataccatttgtaagattcaggaccctggccatataacagtctggaacaggaaccaaaaagtgtttgagttgctgtatgctcaataatgcactgatttcacaaggtttagcccatttagctcacagaggaatctcagccaaagtttagacttgggcascttttcttattaccttgaaattagtctcgattacccttaaattactgaagattgaccaccatgcaaagtggtttctcctttcattaatcttactaactggctgcattgttacaaatcttttttcctagccagcacaagattccttttctgcaaaagggcttctcccgcggtgcctttcttttacattcctcacttctagtggtttgattaatggtcacaccagtacacatcctgacagccgtgcttccacttgtgtctcaccagcaaaaccatctgggtggaaggtttgcatctctgggatcctcaggcattaggcacctccttttgcataaacctgggttggagtgatgtcacacatctggctcaggcatttaaaaaacaatttaaaaaaaacagtgaatgtgtttgcttattatagagtacattgtgagcatcacagggtatgttgaagacaagagaaaattaggggaaaagagaagaatcatacatctcctactacctgaagatcaccattattttaattatttatttttgagatggagtttcactgttgtcacctaggctggagtgtagtggtgtaatctctgctcactgcaacttccgccttccaggtttaagtgattatcctgcctcagcctcccgagtagctgggattacaggcgcctgccaccactcccggctaaatttttgtattttagtagagatggggttttgccatgttggccaggctggtctcgaactcctgacctcaggtgatcttcctgcctcggcctcccaaagtgctgggattacaggcgtgagccactgcgcctggcccaccattatttgattagttacttgcaatctacttttctgtatatttttaaagactgttgttttcctcctatatgtaattctgacttctgccttttattttcacttaatattatcgatctttgtaactgtcactttcattgactgggtaatgttccatctagtgataaatcataattttttaaaagacattctcctattttgggccagttaggatgtttctggtattttgaagatttaattaaagactgttgaatttctttggcatacaacattccctatttcagattcatttttaatataaattagcatagtatgattcctgggtcaaaggatttgaattctcttaatctacaatatcagtttccttcctaagaggcaagtgtctctttatactgcaaccagaatgtcagagagagccctgtcagaggtaaatttaatattttagctcataatgaagttctatgacattaattttttacaggacttttttaagaacaaggaaaaaaatcatggctttacaaaaaacaactgtatggtcaaccyacaagtaaacagttccctttcctgggcctcaggtacaataaagagatgagacaagaagatatgctacagtcccatccacttgtaggggagttagccattgcagttagacagtttgacaaaagccatctctggctgtggaatcaaaggaggaaaggctgggtactaagtagaaaaatgacatttcgtttcgtggaaaacaagcaaccttgacataactcagatttgtcttacaaggatggaatgagcagaacttgccttgccagagacgcagttcacaatggaggtagtcagagataagaagacagactagggccatgcagagctgaatgcattccttctaccaagtccttttccagggtaaagctctccatccctgtcatagggtctgcaaacatcacagctgctggggtagaggaagggtccattctctagactggatcatgagatcagtcccactggttgtacttcttaggtcacctaaaatccatggaatatttgggaactatgattacagagctagacgtgccctggaatttatcatgcaaagctgaatcccccctcactctgagtaacaacacagaaaacctctttaaatgccagggaaatatcacccttgttgtctgtatcagagactaaaagtattcttaatagtttaaagggtactcaataaatattaccacatggggtattaagcttccagattaccccacctcaaggcatacagcagtacacacacaggtacaactcatgtggctggcatcagcaacataaagaaatagcagcagtaaaagctgcgtgtgaagatacctgagtacagctgccacatgtggaaacatctgtccaaatgggaggaaagtctggctgcccccgtttggtctcatcagtcatttaatggcccatcagtaaaacaggaagaaaatcactatgtgtgtgatggattgcccgacaatacagaactgtatcggcacccgccaccttgaattgggttcatttgtatatatgcttgccttctctcaagaacagggaccatttgccagtcattggagagcctggggcatgtagcacggacttcagaaccaaaagctaagccaggctgggtgtggtagctcacgcctgtaatcccagcactttgggcggccaaggtgggcggattgcttgagttcaggagttcaagaccagcctgggcaacatagtgaaactctgtctcaacaacaacaacaaagaaatacaaaaaattagccaggcacggtggcatgcacctgtagtcacagctactcaggaggctgaggtgagaggatcatttgagcctgcgaggccaaggttgcagtsagccragattgyatcaytgcaccccagcctaccctcctggagttagatcctgtctcaaaaacaaaacagaaaacaccaaaccagtttttagcctctgtggactttggtattttcttatcagtgaaatgtgggctatacacacttaccagcggaggtgatagagtatagcagtcattagcacatcctctggagacaggcagcctgggttccaattttacctccactttttactagcacggagacacaagccaattgttagaggtctcctctctatggctgaatttcctcatctgtaaagttcctaactcatatagttattgattaaatcagtaaatatgtataaaatgcttagaggagacttgggacctagtaggcatgttattcgaatttgctgtcatcaccactacccccttacaaggtggctgcagggattaagacttgcatgtttagactgcttcgtgcatggtcggtgcctaataaatgtagttactattattgtgtttacatccctaactcccagtacattgcttgcttatggtagtttattaagtagaataatgagctcatttctcaggtttattctctaatctgttaggtaggtgctggaatattgatttggttttattattgtactcacacattcttgttctttaggtttcaaatgtagatcaaagcaaggtcagagatgagggctcacaggggagcggcgagactttttcccaaatgcaaaattgtcataggttggtgaagcccaggtaaacatgcaccgctcacttttccttcactctctgcgattcatttctgtctaaatgaaagcagacgagagagattttaaattgcccagttaggtttgggcaaaacacagatcatttataaaaacrcagaacatttataaaatcttggacgcaatggcacacacttgtaatcccagcactttcagaggccaaggtgggaggatcacttgaggccaggagtttgagaccagattgggcagtatagcaagaccctatctgtaccaaaaaatttaaaaattagctgggtatggtggcatgcacctgtagtctgggctacttgggaggctggggtgggaggatcacttgagcccagggctttaagattacagtgaggtatgattgtgctttgctctccaggctgggtgacagagcaagaccctgtctcttaaaaaaaaaataaaaatccctctttccatagaggactctattaaacatgacaccatttcatccttgcaatggaatgtgtgcttgggacctccaagacaattgtttttgttgcactgcctccattttgcagatgagacagatgagatggggagagggtcttggatcaggttgaaggagagtattgatgaggccagtggttctcaacaggtggccctgggaccagcagcatcagcctcacttgggaacttgctggtattcaaagtcttggggtgcaccccaggcatactaaatcagtaaccctaggggtggggccctcagtgattataatgcgtgggaaagtttgaaacccactgggttaggcggatcattttaggcaggtgatgtcttttggaaggacagcctaaggcctgatatacctgttcttttcctcactccccaagcaaatatatacctgtgaccacacaatcagagcggtaaattgaagccaattagcagctaagtaactgccagcacttgtcaccagggtagttgttagtaattagcactaatgactctagagaggaaaacagttgtggttcaaagacatccccaccatttgaattcactctgggttttttcccacacttccctgccatattttccttttgcatgcaaacaccatcgcagttggatggatgcttctcgggagacaaatgtcacrtgaagtaataatatgcgatgagtttttaatgcttgccaggatgagattgttctgttggggtatatattaaagttgccwatcaaccttttggatacacctgcataattctgataggatgtcatggatgtacgttgtaactttctccaggaagcaaaaagtgatttataagcatgacaaattgttgaatgagatcaccacatgacagttctctgcatttggtgagagtgtcgcgagaaagaagagaaaccaaggaaagagaattttcacatagagagtcaaatatgtacactttagtgttgagttaccaaatgtaggttttagaaaacccttttaagaaaatggtaagggtgtaattaacatgaccctcttacctggttacccatgagtatagtgtgcattggaagaggagaaaggctgcctttgatccatgtgctccttgaagttggcagtgattgtgttttactcgttcccagtgccctgcagtggcccctgtgccttgcccagggtgacacccaccagtagagtcttcagaatgtcagattaaattgagcagggtgggatctagcaccacctggttttggctatgtgaaattctgttgttcggtgtagattctgtgtgctccactgtgatcaaagctcatctctgtgaaagtttttgaggctggcagatgtttagttgtgcaaggtcttgttaattaggagagggagcacattatcaaagggaagtgtggctgtttctgttctgtctcttttcttccttcaacccaaaggtataaaattagggaagttagtcagaaacgcaaggaggaggtaggaattgtgggatttaaaggtccccctcttccagaaggtgattgctgttaaaagatgctagattgtttgtaaagtgtgaatcctcaacagtccccctaggtatgtaattctggtaccacaccagtgtagagcaagctggagttcctaaacttccatagatgagaagagggtggtcatgaatgtgtgtcttccaccagaacaccgtgcttcagaaacattattatggtgaaatatacctaacaaaattttaccattgtaaccattttaaagtacatagttcagtggcattaagtgcattcacgttgtggtacaaccatcgccaccatccatctccagaactttttcatcatcctgaactgaagctttatacctattaatatatataataactgtacattctcccctcccccagcttctggtagccaccagtctcctttctgtctcaatgaatttgaatattctaggtatcccatataagtggagtcatatgatgtttgcgggtttttttttagtgtatgtctggtttatttcacttagcatgatatcttcaagtttgatccattttgtagcatgtatgagaatttccttctcctgggcatacacttcaggactgtcagcatccttagctctgcactcagagcccctctctaggattaactcccagcaccagatgcccattcagacaaccttgtttcatttgcacctttctgaagcaaacagcatacctgctctcgggtctctatgccattgcaaaagctggtccctatgcctgggatgttcatgtcatcarcctgctgaattccatctcattcttaaggcttcccttgactatcactgtgacaggggttggggggtgtttacttggatcacagcatgtgacaccatcatgaccatcaattcccttacctcttcttcccactccctcttcagcctgtgagtaccttaaaagcaaactctcccttgctcttgtgtctcccaaatagctgacatgaagtctgggggtacagtctgctttgttgtctctaatacttctcctgagtttttttgtttgtttgagacagagtctaactctgtcgcccaggctggagtacaatggcgtgatctcggctcactgcaacctccgcctcctgggttcaagcgattctcttgcctcagtttcccaagtagctgaaactacagacatgggccaccacacctgtctaatttttatgtttttactagagacggggtttcaccatattggccaggctggtctcgaactcctgacctcaggtgatctacccgcctcagcctcccaaagtgctgggattataggcgtgagccactgccccaggccagttctcctgagttttaagaagaggtgggcagcctgctagacaaaggccagacaagacagaatcctcctccacttttgacgtaagaaagagaacatctgtgaccatgcagagtcatcatctggctccatgcccctttctcagctcctccccgggtggaattgtacatgctgggttcagcctatgggaggaggaagggtttcctcgaggacacaggaacagcatgtctctgatgccagatccctgctctgggggcgctcatctstggcctcaagagatgtatggcttctgtgcctagtgcagagttgggattgattgctcagtttaaatggaaaattgttccaaaagcagcagctgcctctccagccctgaatgagaagaatgtatctttctctgagtccaaaaatatatatatatatatattatgtagcacatactatgttcagggcatcctttgaggggaaggtttgaaatgaggcccttgaaatgaggccccattcttcccttcagggaagatctaatctcaaagggaagctgggtaaatgcacagaattcatggctgtgagtcccctaattgagtggcagttgtaaagcctggggaatgctgccactttgatttgcacattggcacctactatgcttcaggactctggggtgtcagggattggcatgataatttgtccaatacaaactatgtggtgctttgtctaatagaacagaacatagaacattctgagagcaaagttgtcagatccatcatttattaagcattagtaagtgagagaaaagaagggaaactgattgcaagtgacaggaatcaagagatgattcctgaaatgacacagtcgcagcacgacaaggaatcctgaaagcctgggatggccactcacctaacccaagtcatcaggtagcctgtgcacagactccccagtgacggggaactcgctacctctcatgacagcttgttgtgtctacaaagagttctggcttttgaaagttcttcatattcagcccaaaatctcctcttgtaacttctccctttgttctgggttttacccctcaccatgcagaataaatctctcttcccagcatcacccttcagatgtgtgaggcatctataatgggccctgtgagccttttcttcttccagggaaacgagcccagtctctgcctcccttctaggggtagggatgacacatgagctgggcagaggattagtaaagcccatttggatcctctcatctctactacgataatggtattagcagtagctccagacagaaacctggcattcccctgcaaacctgacagttcaaagcctcagcttcacccagcctctgcagaggctacaggatggatgtctgctctagcaggccgctctattccactaatcgtggtcctgtcctgagcacaggtctcctctgctcactgtgggacacagggagaggacaggacagtagatagacaagctgttgaagctgcatgcctgttcagtgctcacgagactgtgtaatacgagctctttaggaatcctctgtgtgttgagcggctttaactttcagtactgaggagttagagatgtagttgcctcctcatacctgatgcccctggccatggcttgaggttaccacctttgccacctggaggttgtcacctttgccctgttgctgtatccaaatgaggatagatgctatacactttagcaatacagtgcttgcctgcgaatatgattagttgtgctttcaaatgccacttgtggttttcaaaatcattgtctatttaaggtattatgttttgttaactactatgttattttttttaaatgtgagtatcttatagcaactgtgagactaatgcttcctatgaaatatttcattttatagtcacagcaaccccgtgagttggtgttacgcatcttgaaccaatgcgggaactaaagcttagagagagaaattcatctgatctatttcacacggcttagtaatgagtagaactgggatttgaaaccagcctgccagtctctaatgtctgaacttttagtcaatatcctttttaaaaaagatatatttccaatggctcacgcctgtaatcccagtaccttgggaggccgaggcgggtggatcacctgaggtcaggagtttgagaccagcctggccgacgtggtgaaaccctgtctctactaaaaatacaaaaattagccggggatggcggtgggcacctgtaaccccagctactcggaaggctgaggcaggagaattgcttgaacccgggaggcggaggttgcagtgagctgagattgcgccactgcactgcagcctgggcaacagagcaagactctgtctaaaaataaataaataaaaattcacccatttgtagtgtatagttcatgggattttagtatattcagagatgtgaacctcaccacaatccaactttaaagttttcaactctccctaaagaaatcctgcatccattagcagccagtcctcattttcccattaccgctgccctaggcagctactaatctactctctgtctctgcagaactgcccattgtaagcacttcctgtaaaagtaataatatacaacatgtggcctttttctgtttggtgtctttgacttakcatgacattttcaaggtttgtccacatcataccatgtatggaattcctttttatgccacaataatattccatggtatggctaaaccacattttgtttatccattcatcggttcgactgacatttaggtaggttgttctcatggtttttgttttgttttgttttgttttttggtgtttttgtttttgtttttgttttttgagacagagtcttgctctgtcgcccaggctagagtgcagtgatgcgatcttggctcactgcaacctccacctcccgggttcaagcaattttcctgcctcagcctcctgagtagctgggattacaggcacccacgaccgcacccagctaatttttgtatttttagtagagacgtggtttcaccatattggccaggctggtctcaaactcctgacctcgtgatccacccgcctcggcctcccaaagtgcttaattattgtgaataatgctgctataaacactcacataaaagtttttgcatggatgtgtgttttcattctcctggtacatatgtacctagaacggaattgctggtcatatggtaactctgtgtttagtattttaaggaactcctcgggtgcctgtaatcccagctactcgggaggctgaggcaggaaaattgcttgaacccggaaggcggaggttgcagtgagccgagatcgcaccactgcactccaacctgggcaacagagcaagactccatctcaaacaaaaaaaaaaacaaaaaaaraaaaaaaaggggaactcctaaaccattttccaaggcaactggaccatttcttggccactgttcttcactgcatttttgagtaaagaaatcacgtctttggtgttgcggataacctttcccacatcccttttattctagttcagcaactcatctggtggttttggacctccttgcacaaaacagccatgctgtagagtttctgaagcatacctgattcgaacctcaacctgaactcaccacctcagtgaccttgggtttttcagctattctttctttctgtatcagacaaatgaatggatgtgaggattcaatgagatatgatgtgtaaaagcctggtacgaggcctagagcatagcagggactctttcattcacccagcacttgtgcttcaatttctgctgtgcaccgtaaaagcatgtggcttgggaggctgaggtgggcagatcacgaggtcaagagatcgagaccatcctggccaacgtggtgaaaccttgtctctactaaaaacacaaaaattagccaggcgtggtggcaggcgcctgtagtcccagctacttgggaggctgaggtaggaggatggcgtggaccctggaggcggagcttgcagtgagccgagatcacgccactgcactccagcctgggtggcagagccagactctgtctcaaaaaaaaagcacgtggcaggatatgcaggatacgcagaggtgggtggcacctatacaacattatatttggaggctggagaaaggcaggcctccactccttcttgcctgttgaacttcacckctccctrcatgcctgctccgtggytcactttctgcagacaccctcatgtcccttcttttcagagcaaataattctccctccgcctctggccctttacacctgctcttccttcgtactggaactttctttcctctgtttcctaggcgaccatcccacccttgcttgactgatctctgcatgtttttccaacctcagctcaccgccgctgtcactgcctggggagtgtgtcacctgtccagataggttcctacagtttttttttttttttaagatggggtytcactctgccatccaggctggagtgcagtggtgcaatctcggctcactgcagcctcygcctcctgggttcaagggattctcctgcctcagcctcctgagtagctggaactacaggcgcctgccagcatgcccggctaattttttgtgtttttaatagagagatggggtttcaccacgttgaccaggctagtctcaaactcctgacctcaggtgatctgcccgcctcagcctcccaaagtgctgggattacaagcgtgagccatcatgcccacccagttcctcctactttgtacctccacaagcacctgtgtttccccttcatagcacatggttgtcattttacactgaagtgcatttgcatgactgtgtagctaacgtccatgtcacccactagactataagccgttgaaaatcacttgctttgggctcgaaggacggcatcacccacatcatgcctgggtgagtggagagtcatagtccaggccgcctgccgccccatctggatgccaggcctggcgttcaattcaaataagtgttgatggacagccaggtggtaagcaggttgagattaagaacgacttggatcatttcctaacaattccaagaaagaaacccagagcacattgagatcagaatcgagggctgccagtgggcagtttcagggaaaccagcccatctcccactctatattcaagttaattaatcctccctcatctccatcctcctctcccctgtggccaccgccagctactgatcatcgcaggtgtaagtgtccagattcatgccccctagggcctggctccttttgcagcaaacacagaggcgatctcccatcctctccccaagtcagcgtcttctgtttcctgctcctgtttttgtgaggagcagcccctttccccagcccctctgccgctcactgcctttgaagtatacataataaacttttacagatggtgacaagaaaagctacattagcttcgtcccttacttggagagtggctctaatccactctccttctgagtatgactctttaatgtaccatttcaattctttccctctcaaatacagccctggagcttctttgaagtgtcaccctccaccctccgtctttgattcctccttagggtgttctaatcatggagggtcctaggctgtccaggaagccttccatgggcgcccgcacctccacccagtctctaaacccttttcactggtctcataatgatagttgtccctctcccctgagctagcacctatgctgggagtgaatgatcttctatttcttctggggctagcaatccttcctgtagtttagctgtgaatttccattaagccacttgtttggatgggcttctgtgaaagccactgttgaagtaatgatgataatgatccattccatttattgataatgccactcattagattaatggcttcctgtgtactgccttatttaatctcccaacaatcatgtaagcaaaggtgctttcatcatccccattttatggatgaggacacaaagacttagagtggttaagtagtttgcctgaagtcaaagagtcaccaaagagtgattctgcagttagagtcaggcagagggatgctccactgtgcccttacccacgttgtaaaccaggaagctatgagaccaatttttctttaacaaattcactagaayttttatatccaaatagtctccygcgggagattccacactttaatgatgtttttcttttgctttaattgtcaacatcatggtcctcaaagagtgtttgtacctataattgaacaggtaagattaggagttttcgaagattgagataaagtaagtgccttgctaattcctttgctgcctgaagatgttccaaagcttaaattgaatggtcttttgagaaaatcatctcccacttagcacctaactgttggcaaagcagcgtgctaatcatgggggattcaaaggtgaattagacccacttcctactttgagaggcttttatgtgtaaaagaaaaaagaaacatagaagcagacttacatattatcttatagatgtacatgatacatatatttcaatgtatacatggtatctttatgatataaaattacatattttagtccagtcgtggtgactcacgccttgtaatcccagcactttgggaggccgaggcagrcrgatcacctgaggtcaggagttcgagaccagcctgaccaatgtggtgaaaccccgtctctactaaaaatacaaaatgtagccaaacatggtgtcccgcgcctgtaatcccagctactcaggagattgaggcaggagagtcgcttgaacctgggaggcggaggttgcagtgagccgagatygcaccattgcactctagcctgggtggacagagcgagacttcatctcaaaaaagaaaaaatttacatgttttatctttacatatctaatacctattacaacacataattgcrtaagatgctgtaggaactgacagaggagcttaggactcctcatgcctataagtcaataaaatctctaccatattgagttaaataatgaaggaatggattgcttcatttaactgaaaaaacagagataggacaggtgtcacgggaccctggctcacttctccaaggttctctcatccrtgtcctcgggctggctccccttttggtagtggatgatttccatctgcccctggggctgcaggcttccacttttcatttctcagagaggaagagtcctgtgctgcaccatgatcgtgccatctcaggtcacatgcccattccttaaccaatcgttataactaaataagtggataattgccatctgccttagttagacagggcccatactttgaacagggatgaggtcagtcccatctaaaccgaacggctgccacaaaatgagagaagagagtaggaaataggaggaagctgtaagcactagccgactataggcaccttcctttggcgaatcctgttcagggcagaaagccctgggcttgggttccactctgaccctagagtccaccctgctactaagcacagcctcaaggtgtggaaggtagtgggtaaactgcagtgtcaaagaggctgctccagatgtctgtcatcccaaaagttatatacacaattgcctttaaagccacaagagtctctgttttatactgttttatttcaatttttttttaaattttttgtttatttatgtatttatttttttgagacggaatctccctctgttccccaggctggagtgcagtggcgcgatctcggctcactgcaacctccgcctcctggattcataccattctcctgcctcagcttcccaagtagctgggactacaggtcccccgccaccactcccggctaattttttgtatttttagtagagatggggtttcaccctgttagccagggtggtctcgatctcctgacctcgtgatccgcccacctcggcctcccaaagtgctgggattacaggtgtgagccccmgcgcctggcctgttttattttttataaagaacacgccctgctatcctctgttagtacttatcttatttacatgatttggaagtgcatgggaatgttggcttgttctgaaaattaaatcagctctgaaagggaaagatatgccaacccttaggtgtttagaagagtatgttgtaggatctgagtgcagttccaagacactcggctgccgcagtggtgattttaacaatagcagcatcgttaatatatgtatccagcctccttgatgactgttctggagaagaagatgttctaatcacagcttgctttttcctaccaagtcattctaaaaagttgtagagattattttaagagaacagccctgcctgaaggactgttactgttatttgaggctaaaggaaatcttgcaatttgcaaaaaaagttaaatctgaaccctcccctccaccgtgggggccagggacaaggcacaattccatttccaccccccagctttcttattggaaaaataaacacccctgccagacacagtggctcacacctgtaatcccagcattttgggaggccgaggtggatggatcacttgaggccaggaactcgagaccagcctaaccaacatgccgaaaccccgtctctactaaaaatacaaaaaaattagctgagcatggtgttacacgtctgtaatcacagctactcgggaggctgaggcacgagaatcgcttgaacgtaggaggcggaggttgcagtgagccgagatgataccactgcattccagcctaagcgacagagcaagactgtctcaaaaataaacaaacaaacaaataaataaatgaaaagtaagcactctgtaactcttgctttgtacagtgtagatgaactgagatsaagtacgcaaaggctcttctaaaccactaagatgccagtaatatatgattgttatcgttagcatcagttacttatatgaactacagatatttagcagtgttaggaaaaagttagaagtaattaataatatattgatgccttcttctagaagaagagttactgtcctttattgaacatatactggacactttgtatgttttgtcrcatcgaaaaattgacaagaatgcagccctaagcttctggcagtgatcttatgtgaatgatctctactgaagcacaagactctttttagacactgtgcagaataattatgatagctgatatttacatagcccttactctgggccagtcaccagaaggcaggcattgttatttttgtccctmgtttatagtgatgaaactgagacatggagtggtcatttcatttgcctaagaaaatagcaggctgggtttgttggctcacacctgtaatcccagcactttgggaggccaaggtgggtggatcacttgaggtgaggagtttgagaccagccttgccaacttagtgaaaccctatctgtactaaaaatacaaaaatgagccaggcatagtggcatgcacttgtagtcccagctgtttgggagactgaggcaggaggttcgcttgaaccagggagtcagaggttgcagtgagccaagattgcaccactgtactccacatcctgggtgacagagtgagactccgtctccaagaaaaaaaaaaaaaaaagaaaagaaaagaaaatagcagaactagtttccaacttccctgagtctggaatttgtgtccctacatatactgcctttccaagtatcagatttcttcagaaagagcctatttttatgaacaagatcccaaacaaaaataaacagaaagcaaaaataaaatgaaaaagataaaccamtgttgaatttattatttacttcctgataggcaagagaacagatgcccatgtaaaaatttactgagtgcatcacaaagagaaaaattaggagtttttaagtgcagaagtgggataaaagaggtggaatgagagatagagtctgaaaactgttttctgggcaggacctaatgagttcatagatttgtacaaagttgttgaaaacgatagcgtagttcattggccggaaaagaagagtgtttctttagtcctgtcgtggtccattcaggctgctaacaacatagcgtaaacrgaacgggtcataaacagaaatttatttctcacagttctggaggctgggaagttcaagttgctggcagactcagsttggtgtcttggtgattgcccttttcctggttcttggattacccttcytgctgtgtccttacttggtagaagaggcagggtagctctctgtgcctcttttataagggcattaatctcactaatgaggacttcgccctcatgatattatcactcmccgtgatggttaagattgagtgtcaacttgattggattgaagaatggaaagtgttgttcctgggtgtgtctatgagggtgttgccaaaggagattaacatttgagtcagtggactaggaaagacagacccaccctcaatctgggtggggacaatctaatcagctgccagcacggccggaataaaagcaggcagaagaacgtggaaagactagactagtttagtcttctggcctccatctttctcctatgctggatgcttcctgccctccaacattggactccaagttcttcagctttgggactcggactggcttccttgcacctcagcttatagatggcctattgtgggacctcaacttgtgattgtgtgagtcagtactccttaataacttccctttatagaagcatctatcctattagttctgtccctctagagaatcctgactaatacactcacagaggtaccacttcctaataccaccacactgaggactagatttcaacataggagtttggaggaacacagaccctcagaccacagcagatccagttagagtctaccgtgatcatgacccctttatggcttcagctgtttcaaagcagtagcattgaaatacaaactttagtttttttgttttgttctgttttgtttcgtttttgagacagagtctcactctgactcaggctggagtgcagtggtgtgatctcggctcactgcaacctccgcctcccaggttcaagcaattctcctscctcagcctcccgagtagctgggattacaggcacatgccaccacgcccagctaatttttgtatttttagtagagacaggatttcaccatgtctgtcaggctggtctcgaactcctgaccttgtgatcagcccgcctgggcctcccaaagtgctgggattacaggtgtgagccaccacgcccagccaaactttagttttgctctgtcctgggcaagtgctacaggggatggaaaacttgtttttacactatatagcatgcactgcataaggcgaccaaggcagtcaagggcttgggagagcgtaaataagcaagacaattcagatagcggtcagtgctatgaaagatgtaagactgcaacacgatggagactcaaaggaaagttcaaaggatgagaagcttccgccaagagaagatgctgtggaagtgttctaagcagagggaaggcagatgcaaaggagagakcctgtgatgtttgatggagagaaaggaggcctctgtgtgtccggggggtgggggtgtgggtggggaagagagtgttaggcagtggaatcatgttcacgtgggccttgctgatgaattgcagggagagaatagagggaacgaggaaatcagccacagttccagactgggatagcattactgagtggagtgtggctctccccttgagccctagggtgcagttatctgcatagaggcagcgccaagagaggacagagacttgaggagagttgcctgccctctcccagatttgccctgtgatcccagagagccgattatctttcttcactgtgattttgcagaacctgcaggcagtttggaaacagcactggcaaaggagaaaacgagactcagatttctcatcctagctgtgacagagatgccaagtaacctagtggctttgtgcaagtcctttaatctcacagaacctcatgtttctcatctgcaaaatgagtgtaagattagttaagctgcctacctgytagggtagttgtgaatatcagttgggaaaattggtgggaaaagagcttggaaccatttaaaatatacagatttgtgaggaatcaatgctatggatctaaccaattaaaatagaatatggtggcatgatagctaatcttttaatggaatcattgtcattttcttctaccattttgagcactaactgtgttaaacaccgtactgagcacttccacatacattaatctttgttatattttagaagcagctcagtcactttattcatttacgtaagctgtcaagtagcatttaaccaagggaaacgtcctcagttaatcttcacaacagcacacacaagccatctccattttatgggtagggaaactgaggcacatcagttcaattcattgcccaggacccaataacctataagtggaaaaattccagatccacagccagggctttttggcttcagagctcatcaaagaccatatgcaaagctttctctcagcacagctttatacagctgttgagcatcaatgctgtctataaattagtgttcaaacttggcatctgtgctgaagagcttaaaagttaatttctcgtatttgtccttggacctgtgttagccacggagtgggcatcgccttgcacaaagtagcaccttttaaatgagagccttcactagagattgagcaactgctgcgtactttgcaaatagaaagtgtcttgtgactgccacccagttggaagatgtagagcccttgtcagcacctgggtttggagggtctcttaattatgtcaggagtctgggcacactgatatttattagctctatactatgcagatgtggaccacagaggctgggtacctggagtcattgtttaaaataaaggatcttgagtgcagctgtgtggctgtgaatcccagccccaagacatcccaactaggtcaccttggaaaagtggttcaatccctctgtctgcagtttcctcatctgcaaaatgggtatgatcatactgcctacttcatagggttgctgctgttgtgggggtgggtgttgatttggaactatccacataaataaagcatattgcccagtacttggaccagcactcagacttggctgtcatcaccattaggttgaaccattttatcacctccacaaatgtcagatgtagacacattaaaaaattccatgctcaggccgggcacggtggctcacacctgtaatcccagcactttgggaggccgaggtgggaggatcacctgaggtcaggagttcaagaccagcctggccaacatggtgaaaccccgtctctactaaaaatacaaaaattagctggacatagtggcgcgcgcctgtaatcccagctgctagggaggctgaggcaggagaatcacttgaacccgggaggtgaaggttgcagcgagccgagatcgcaccactgcactccagcctgggcgacagagcaagactatgtctcaaaaaaaaaaaaaaaaaaaaaaarggccaccatgcttgtagagctatccatttggatagagatggttttagcaggaaggaatttgaaagaggaccctcgagttatgtgccagagcactgctactcttctcacttacacaggcattaaacacaattttgaatttaatgggatactctgataatttctcttttgtcctgaaaatggattgttagagaggaagcatcacagcagagtatgttgcctttcaaaacagggtgcgcattgcccacccgccgcccgcatttccctcctccctccctgtggagattcagcttttatcagatactgttcaaagcccccaggacaaggacaggacgtcctttcatatgaaagtaatttaaaacatgttttgttttgttttgttttcagttagcacacaaccatattatgaggtaaaatttaaaatgtgcacaattgattaaaaattgagacttcaaagaaatcactcgctcattggcaggctaatttgggctgtatattcgttctcaagggctcttaggaattgtgtaagtgaaagaatttgcaaagctcccggagcttgcagcctgtgccttcagacacagcagcacggagtccccactctgcttcctgtttactgtgcaactggagtttgttacttagaggcttagtttcctctgctgaaaatcaagatagcactttccatttcaaagggtttgaggggacaaaggagattcacagatgtaaagggaaagtgtggtgcccaggaggtggtttgcacccagtgtagtccccccactcctttgccttcacttgaaagacgcaaaagtgtcactggcaatgttgtgcacagagcagacgtcagagaatcaagatgggcctgcttcctgccatggactttggaccctgcagccccagcttcttgctctttgtgcctctcagctataggggcttaatctgggagcttggagtgtcaccatgcctcccttgcatctccctcagtgatgcattggctcatctgtcacctgccagtggccgacaaggccccatcagtcttgctgttacctatttatctacctgctttttcttctttctgtcatcactcatttagtaattcaacactattctggcacccactctgttcagaacactgccactgatacttttgtatctttctattttgaaatattccatgaaactcttcttaccatttgtggagccataaggccacatcaaggggtcggcctttcatctcagcaaaaattttgcatttcagctgcctcgggaatggttttctttcccctcgaccttgtctttatttcatagtaatttagccacatcttgaattcctcgtcttttctgtttgagtttgacagtttyattttgtttcaactatgcaatactagccttcaagactgataaattcatattattccaaagcttttagtacctacccaatggtgggcacaaaaatggggctgtaagatcgacttatgattaagttccaatttcagattaagtggtttattgtctaggcagagctccttgtgatttctcctttataggcaaagagctgaggctcaggagaaatccaggcaaccaacattttaattaaaaggaagttttgmgaagattctttcatcttcagaattttctctcaccttgaagtgagcgtcgagcattgtcttttaaattattgaatctgggctggatgggatagctcagttgggaaaatgcgttcatcttttttaactacttttatcagaggttctgtctgaccctccatgcatgtgggtataatgaccccaacctctttctagctgtatgcagttatatgtaaaaccgcttcctgctctttcctacataaaaattcttgcattgtatttttacattattacatgtagtgggtggccagctatcaggaaacagcattttagtgccctcgagcttttaaaatgtccctaaatttggaggtagacatagaacaacaatactattaacaattccatatactgtgtaccaacactgtcatattaagagatgtatatcctctcaactgccctgaaagcagctttgtgttgtcctaattttacaagagaagatccttgtaaacaaagatgtgtctggctgaggtggtctcacagcaattgaaggggatgtttgggtctcaggctcaggtttgtctggctgggctgctgaaattcttgccactttctctcagagaacatgtaggcaacaataaagagaaaaacaggagtaagagagaagagtacccaggaaactggcgacaatggtaggaagaggtgaacaacagagaaarctcaagaagtggagcagctctgcagctcatggtcaccggcgaagagctactaaagtgtcagtcctgtgggttttgcagacaaagcatctccaccatatttgaatgtggagagtgtcagagatgatgtaaagagtcagtaactacctctaacttggggcaatgccttcaaatgtgaaccttctctttagtgagccgggaagctgtatgggattcccaggtactatggcatccactatcagattgatctgactctagttggagactaaaatcagaagcgttgcagcagtgtactggataatgaatggagtgatgtagttagaaaacagttggcctacaaataattctatttagagtagtaatagtagttatagaaacaacacatgtttactgagccgttttcatgttcttggcactgggctaaacactttacatgcactatttcatttaaattgcactatttcattaaaataacatctcagtcctttgtgagagacgaatgaggtggaaagaaaataaggacaaaatgacagggattcctctttattctctggtagggaagcggggcaaggttcatggttgatgttccatggagcttctggcgtgaataaatgaagatggataagacgcagtcccagccctttagtaatgtgaacttggtaggaataacttacccgaatatataaatatgatgtaatattgcatgatgcagattaatcaagttatttataatttacaatgatccagttgagggagcaagtaattatgcctaagcagagcccccctagctccagagggaaagtgcttctggagtcaggagttggaaaaggaggagaaagtggccagggatacaaggcggggaaaccgtgttctagcaaaacagtaagatgtgcatgtgaagtcactgccttccctgggacaggcaccctctttagagacagcaacaccacccagcccagccccatctacgcttgttcatgtccacttagcacttccattcatctgagcgcctgcagtgtggtgtttgcttcttgtttctctctgccactaggatgtcagctccctcaagccagggctttgttttgttcattgtttctattagttcgctttcatgctgctgataacgacacacccgagactgggtagtttataaagaaaaagagggtttaatggactcacagttccacatggctggggaggcctcacaatcatggcagaaggggaaaggcacatcttacatggtggcaaacaagacagaatgagagccaagtgaaaggggaaacctgttataaaaccatcagatctggtgagatttattcactaccacaggaacagtatgggggaaaccacctccatgattcagttatctcctactgggtccctcctacaacacataaaaattatgggagctacaattcaagatgagatttggatggggacacagccagaccatatcattgtcctcaccccagtgctcagaacactgccctgcgcatagtgaagtgttcaataaaaatttcttgaatgaatgattgacagtttgaaaagacctgggaaggtaacatctaaatataaagaaagttgccctcttccctctccctccacgaccacacattttgtgatcttcgtagcacctatcaccatttgtcattatgtatcttaaatatttacttttctgctgcctgttttctcctgctacagtataagctccacgaggataggcatctgactttgcattctcttgtcttcacctctgtagcctcagcacctagcatcatatgtagacatggaagcacttaataaacatttgttgaatgaatgaatgaccaaatgagactactgctggtggactgagcagagaggaggaggtggtaaactacagttaggttgtgaaggggatcatatgtcatgacaaagactttgataggtactccagggaaaggagtgctttgtgaagtttttcaagttgggtgttgtgattacatttgcacttcgcaaggagcatttggtgtggccccagggagatttagagaggtaggttatgtctagaatgatgactgcttgcatcttggaatattacaaagcgtttccccagattatgatgattagcgcatgatttatttttgggaaactcttccttaagtgctaggttatcagaattagtattgtcagggcaaatgatagtaggtgagccatttggcttaagggaatggattctgtatgactttttaatgtctttatttttatctttacttattagtaaaatataatacttctgaatggtgctgaactgttagtaaccatagctactaaagctgtcctgtaaaaccatccaaataccccagaaagtacttgttaagacagccccaaaatgagaacagcctcactctgttaaccatgaaaaattattgaaaacatgccaacattttattttacaaacctccatggaattgactctcttgccctgttgttcacttttctcttatttctcctcccatgtcttattttccatccctaagctctgtccaacataactttctggactgatggaaatgttttacatctgcactctttggtatggtaaccactaccatgtggtcactgagcacaggagatgtgcctggcatgaataaagaactgagttttaatttaatccgagtttgattaattatttaaatttaaattgccacatgtggctagtggctactgtgttcaacaagcacaattctagacatttggaagtcaacggtgtttgaaatttcaccaagtcctttgggcaccagcaaagtgtttgaccccagaactatagaaaacctcttttctgggaaacaaatggcaaaattcctccccagtacttttactctgaggctaacatgagtagcacaattgaattaaataagattgtggttgataagctgcttcacacactgcctggcttctagttaatgcttaataaatgataacaattatttaatattcatggcaggcttaaagggagataacatgatctccactttgcagatagggaaacagaagctcagagtttcaacatcaagtgcccaagaggtcttgccgtcagtgagcagcagaacagagcttccttgcccatgtcggtgtgtgctttccagtacaccaggccaagaagcagtcttattttctagatttcagtgagttttatcctcttactcagctaaaggaggccatctcaacaacagcacaggctctgcatcctttgtggcaggttcttcgtctttcttgatcagtaagtctactgaccctgcgagatggataggcactttctctgattacccagcttggcagctggaggaaatgcctttacaactgaagggctctccaaaggtcctgccttgagaaactcatgagccagaaaagcaagcagaggagtagatactggggagaaggaccttaggctgctgtcaagaaacccgttagactgatgccaatcagaacaagaggaattggtgattttcatcaccaacatggagtggagatcagggaattcagcagacctgtgatgaggacaggaagcagctttccaactcctgatgctagtgaattgcatctgtctcaccagtttgaatagactctttatcccgattgcctgaatcagtgtcttgttgatggtacaggctcagtaattatccgtcagatggatgaacaggtgaatgaatgaataatttgataagcataagtttactgttgccctgaagcacattccttcttaaggggtttgttggggcgggaagcttgctcctgcaagcttgcagcaatccaaaagggctagagaatagacttaggctgcagtcactcatccagagcgaatgtaaaaaggaatatttgtgtccgcaatttggatctagccttttgataaaagtcacagaattacaataagagcacagttatataacccagtaaacagatttgatagagacctagatatattcttctaaatgtgttgcagaagtttcagcctcagatttctgaggattctgcaatcttcaagccaagtttgggggatgagagccggagacactcatgcaggtcccctctctccatcagagggacatggagaaagcaccaggagtcaatgaagatgactagatcaacagtggattgtgtaattcccattggattcatgaagtgtgacagttgccaaagcggtatttaaataagatttagatgaattctgtgaaaattaactcccctgccttttggtgctctttttttctctttctctctgaagttgcagttaatttccccaatggatttcctcagtctttccctggtgtgcgctctcctctctctctctctctgtctctctctctgtctcttctgtttagtcctgctgactctgccatgccattttaggtgctttccatgcttgatgttgatgctctgtttgagattcctgtgctgattagccaattgataaacttaatgagaaagcaaaagcactttgtaaactstcaagtcctgcaccagtggaaggagggataggtgatcagattctgctttccgtggctttggtctagagccccaggaacttcatgctgtcttctctgtagaggctgtatgatctcttcgaacaaagagatggaagcgccttcaggcaccacccacacccagccctctcatttctatcagtgtgaaactgaggctcagagtgggcaagccacatgccctggatcacccagagagttagcagcagagctgacacgagagccaagtctcagaatatctttcctcttcttcccctttgctggcagaagtgccagggagcacatctgcaaggccattgtcctgagcgatggtccttgtctctaagagttatttactgttgtgaaagagaagcacctgctcttcttgagataatcagggcgtatgtatccctgggcctcagaggtrtagcagcaaacaaaacagacaaaaatttctgcccacctggagcttatattctcccctggggaaatacataaatgtatatatagtatgtcagatggtgataagagccatggtggaaaataaagctgagtaagtgcggttgagagtgtgaggggagaggtgatactgtgttaaatagggggtgtggatcagagtagcctcacggataatgtggcattggaactgatggttgaatttgggggatgatctaacttggaacctaatttggtagaaatcaggacaagagtttaaaaaacaacgtctaagtgacagaaagtcatggaatattcactaaaatgttaaccatcccaatctctagttaatgggattacagttatttctagtttgcatatttttatttcctaaatttcctgcaaggaatatgtattcctttttttatttaaaaaaatgaactccccagcactttgggaggccgagggggtggcagatcacctgaggtcggtagttcaagaccagcctgaccaacatggtgaaacccggtctctactaaaaatacaaaaattagctgggtgtggtggcccgtgcctgtaatcccagctactcgggaggctggggcaggagaattatttgaacctgggaggcagaggttgcagtgagcccagatcgtgccactgcactccagcctgggcgacagagcaagactctgtctcaaaaaaaaaaaaagactcagaccggacgcggtggctcatgcctgtagtcctagcactttgggaggccaaggcaggcacattgcctgagctaaggagttcgagactagcctggctaacatagcaaaacccagtctctactaaaaatacaaaaaattagccgggcgtggtggtgggaacctgtaatcccagctactcaggaggctgaggcaggagaatctcttgaaccctgaagttggaggttgcagtgagccaagatcgtgccactgcattccagcctgggcaacagagcgagactctgtctcaaaaaaaaaaaaaaaaaaccacctcattatttactttgggtgagtggatatcactctaggacaataagtgacaatagtgacaattgtggcaatagtgtcacaaaaatgacaataaggaagaatgggtaagagaggtcagaggatgtgaagaggaagagaagctgaacaggaataaccagaccgggggcatggctttagtcctgatgctgcacctgttggcggatgggcgcaaaacagtttggaggagacaaagtaaaagcaaccattaattgactcttaacttaaagtcagcaaggcagtagaacccagcgctctcctgtcgtggaagcacctctgtcatggaggccagaattctagttttgaagctctgatctccagaaagagtcacagcccttcaaagccttcttgcaaactgttctgtaacatagctctcactttaagatgcagaaactctaagaagatgggaaaagaggaaattgatcatcctttaacatttgttttccagaaacattattctctttccaagtatgattcacagtaagatttattggataagtcctgttgctgcatttaaatcatgatgacattggttttagaataagaaagattcttatataatcattacattgaaactcctcaaggttagagatctggctcatttttctttgaatcacccatagcacctagccccataaatattgattttatcaagaaagattgtgtgatgaagtgagaggaacattagaactgtagctgacgaattttttaaacccaggaacatcaaactcttccccaaggtgtctgttgtcccaggctctttgtgtatttggtgaggtgcagctttagaaggtgtcacgtgtacagcccgggtagataaatgtatttgtagcaatgaggcccgtgtcgcggcttttcactgtccgcaccccgtatgctcaaggattcccagaaagtctaaacttccggccgtcaaggtcacgcatctcaccttccaaaggatggtgttgaccgcctctgctgccaggccatgcccagcagcaggctgatgagatgcatggggaacaggggccttggggaacaggattctccaccctagcatgccactccttccagatctccaattctttcatccctgtttctgtagaaaattctacaagccagtggcccactttcctgcctccatcagtttaacagagtgaagataatttaatcgtcctttaacgaggcaggatcttcagtgccctgtggttataattaagagcatcagcgatcattactagcattcattaatgcagcccgacccctcctatttcgttccccttggctacttccttgcccacactcacctgtttctttccttaaatgcctagagctgctgtttgaccatctttaacctgcctcttcactgcccttgctcttttacctctgtcctttctgtccctatctgttcaccatcaccctctcagtcctctggacatgggaactcaatagctaattttgcatgacactacctctgcccccaatatcagtgtgtttccaagctttggtggactgatggttgcaaggggaagcatttccattaataaaatgaaatcttggatctccagagtggctctggaagtaaaaataccttcctctctaagagagagagctggatgaaagcccgtattggggtcctctgaatatgaccttctctggtgaggcctgtctgccgagcctccggatgatgctatgtaacccttagtgctgtcactcaagtgtgaaccaaatggaaggygggccagccaagacttttgaaaagattgaaattttacaagtagaaaggaggtggaagaaaacgataatagtaaacagaacacaagacacataactacaacctaatgaagatacacggcagaggtttccggagctacattggttggtttgcttccaggccacgtaagtcctgtccatcccgcatgcaatctctgctttcctgatttcccagcatcaggtagagaaggtgccatttgtacccccaccttcctggagctgcctcaagtgctcaaactcttgacatttccaggaactatggagccagctttccattttgcttcccaacacctcaatagggacaagagtcttttctttaaatagggtgcctacagtcaataataatttcattgtacatttttaaataactgaaagagtattattggattgtttggtgtttttttttattattatactttaagttctggggtacatgtgcagaacgtgcaggtttgttacataggtggccaaaccatggccagaacgtgccatgatggtttgctgcacccatcaacccgtcatctacatttggcatttcttgtaatgctctctctcccctagcccccaacctcccgacaggccccagtgtgtgatgctcttttaacttgcagtgagacctgcctttaacatgcaggaagtagttttccaaatccagaaactgtgagtcccttgaggatccctattatgttttgttcaaccctgagcccccagttactggaacaaggctcagcatagaacaccatggcttaatgcccgataaatgtgtgagaaatacaaaaacagaagaaaggaaaaaggaaagaggagaaaagcatgaataacaacaccttgtctttgctaatattatagccatcaccgacccattgcaagagggatagagtctccgagaggtttttctaggttatgacctttcttgcaagtcaacttccaagactcctgcttttgacctcaaaccaaataattctacctaattcctgattcaaattggtcataaaatgtagcaatcattttgataacacttaacagttcaagaagtgctttcagttagatttaagagctagtttgtggagtacagtagatatgatgatgatggtaataatatctggtaggtagtgagaaagctgaaaatcaaagaagttgacctaactgtctggtaggtaggaaagaaggaaactctaatgcaggtttcctcactacagattcttgactctgtctgtgacctgtatgtcactcaaaattttattgtcctaaatgaggtggccactgcctgacttttgctaagagaactggtgccggtctctttatgaccaatttttacatcatctgtcaacctctgtttcagttggcagttgctctaacgggcaaggtttacccagggaatatccaccttgaatgttggcagttgttctaacgggcaaggtttacccggggaatatccaccttgaatgaaatctctgctcatccaacagaaaaattagtgatatacctgccgtgaatggtggtgtttctcttatctgctttagtatggctttactggtactgtttgacaagaagacaaatgaaaaattcatagggtgcatgagaagaggtaacaaaacaccattaaatttttgtttgaaacaaactattctagaaaaaatgtgcaccatagattaaaaatcatggatcagtatttcgatatgtaaaatgttcctacaaagcatttaaaaaaataatggcccacagacatgaatgttctccactgaagaagtaaacccaaataagtcatttaacacataaaaaaaactctacttcacaaagtaaacaaaaaattgaaaaccaaagcagtaattaaacactggcagtgcttaaaaaaaaaaaaatgtgtgtgtacgtgtgtgtgtgtgtgtgtgtgtgtatctatagtgccaatgataataaaggtatgaaaaatgtaaatacttctccttgctggaagaagtataaatcactaaagcgttttttttttgcagggcaattttaaagtatgtatctaagttttaaaatatgtatatatttgacacagccatttcatttccaggaaattataagagatgagaatagggagcttttagtattatttatgatgaggaaattttgaaaacataggcaacttccaaaaacagataaatttaaatttaagttgttaaattttggtatatccatacaattgaataacatggaaatcatacataaaatgtggagtgtcgacatgaggaaatgttaataacgtatttatagaacagctgctaagagtaagtaggttatatagtaattctaccgttatcctgtttttgtcaaaatatatctgtatatctaaacacataataaaagtctaagactgcattataaaattatctctaagtgataagattgcaagtaacttactctttttgtgttttttcaagtgtgcacattttatgaaaggaattttttttgttttatcatcagaaataaagataaaatgcatccaaagttattggaaacatgaaatttgatttactgagatttcatttacatgcagcccttggagaatatatacattacttaaagcagggcctggttctcctctactggaagaaggctgctttctggaaaatactccctgggagcacaggaacctctacggggctcacctcccctccctgggcagagaaccagagaaatgagcaggagatttatacccgcttgacttcttgttcttatcctttttgattaaaaaatacatcaagacatgagatggatggaaaaacccataaaaattgttttactgcatcataaaaggcttacatttctgacattaggatcatgaagggattaattgatactgtcactctctgtatttctagcagaacacactctagctgggatggcgcagccctgctccgaggtctgcgtgaagccgtccagggtgcctgttccttgcgcctcggttgtcattcactctctgtgttcagtttaggcaccgttgctttgagtagctcctggggggcagggtcagcgtcttgatgtagtcactgaactttgtacattgcttgaccgataagaggcattcttgccgggcacagtggttcacgcctgtaatcccagcactttgggaggtggagacagtcagatcacctgaggtcaggagttcgagaccagcctggccaacatggtgaaaccccatctctaccaaaaatacaaaaattagctgggtgtggtagtgcacacctgtaatcccagatactcgagagactgaggcacgagaattgcttaaacctgggacacagaggttgcagtgagctgagactgcaccactgtactccagcctgggcgacaaagtgagactctgtctcaaaaaaaaaaaaaaaaagtcattacttttgttagtatcccttgcccctcattttgatttacataaatattaaaatattctagtaattgtggggaacaaacagatcaggaagtaatctcagagcaatttgatttgttggtgagtaggaattatttactgctaattttccaaatagtagcttggcttattcagtcattcatcctttcatttaagaaacattgatttagtttctgttatatgccaggcactgttctagtcctgttgactgtagaaataactgacaaagtccctgtttctatggagtttatcttcccatggaattgagaccagatctttccttcctttctcccttccctttccctcttccttctgtttgttcatccaatagtccatccagtcatccattcattttatccacccatcatttgctgaatgctcatcaggtgccagatgctgtgctaggtgttggaggataccaataaacaagaccatgttcctgttctgaaagagcagagggtctaataggggaatgggacaatgtcagggctgtctagtaaatgcaacatcaggcataaccccagggcagcatcaaggggtgcatgggagacctcgccccccagttggagagcacctttctcttggccacagaggaagttggcacctgcttgcaggaggaaagttggcctcaggaattcaggcttaaacaaaaaaggatgccacttgctaccaggaacactcatatgaatggtgaggttccttgggggaaaagctgttgtacagtaaaaatccttggtgtcaactacatgttgagccacctgctccatcctgggggctaaatggaaggtctaagtcccccggtacccaacatccatgttctaggaaatctgtccactggagaagatagttagcgatgccctctcacatctttaagtgccacatcagggacttggactatccctgctacgggaacacagtggaactaagagaagaaagaaagaaatgcttattgagcacctactagattcctcctaggcattgtgccagatgctttcatgtgctatctcatttaattcacacagaaatcctgtgacagttcattatgtttttacagatgaagaaattgtggttcagaggggctaattgacttggccaaggtcacaggtagcaaatagcaaaaggcaaaactgagttcccaaacaaatctgtttgacctcttcatctttctgcagttaggaaagcagcatggaggaagtttcgccctttggctctttatttgaagttctctcatggccattatttcatcctactttgcaatgcggtgttgtttcccagactattttgcagaacacaagatgttaataggtgttctaggcaaaagagcctccatggctaaatacattggggagattgtgggtgaaactggtttaagcctggagctcctttagccttcagtgtacttccatgtgttttgaagctcaaagaagagactatggcaggcacacagtggctcagggcactggtgtccagtggaagcccgtttggaaagtattgcttatttcccaagcatttgatgagcttctcctctgagaatggcccctgtggtccatgttattgctccctctggactggactgtgagcagagatggggccctatcctcctctctcccagtgcccattgaacttgacataattagagcttaatcaacctatgcgtgggtgagtgaaatagggctcacctttaaccctgaagaggtagaggaaagagccattgagttagaggagggcttccaggaaaaggaaggagttagacctgtgactcagatgcaaatagagatgctgcccatttgagaaacgtagaaagaggtttggtttcagcagagggtgagtattttagatcagcgacagtcagggatcctttatccaagcacttgggctatttttactgcaatgaaatggaatttgcaggacatcgaaagactgatggtgaccaaaggccttaattctccatctgttaccgatgaattgcaatgcttagtactttcctgggtcatagccatactggttctaacccattgcttgaaggtggaattactcagctgagctctaagacctggcggagctcactggcattttgtggcgaacgtgggggtgcgtgtgtgcatggctggggggagttgtgtctaaccacaggcaagctttgggggtattctgaacgcttttactacttttcttggacatgaaattaaggtcccatgaggacaggcagttttcatttaccttatttggaatacagattgacacatttttccctgatcttttgttgaacccaaaagaacaagcaagcatagtttctaaacaaagagggactttgacaaagcatctttagacggcataattatcaagtagaaacttttaacaaagagttctttagagattgaaaaattccccattccttataactgacagcaaaccctttcttggaagggacccgttggcctggccttgcttttgctgcagcctgtaattatagtcacttgatctcctgattcaactaagaaggaagaaatctgtacatatgaagtgtcagggtctctcacgccccaggtggggctttttctgagaacattcctcccagaatttcttgtcaccagtggcactttgaaaacttagcggtgagccgccacgcagctctgagctgtttctttttcatctctttggaaacttttcccaggaaagttatttctgtgacctgagaaaagagcactgtgacaggctcagaaggctccccactgtccttcgattccagcaattgtcaccgagccgaagaatcgcagggcagcacctcatgactcacatccgagtcatgtcaccgaagctgcatgttgcgtgcatgaaaaggtcctgtgtgcacgttctgctaatgttagttatccacactctgacatcgccgtttgagtttctctgcttctgccctccttgcttatgatctggtcatgaatgtatacctttggagagcaccttttgggtgtagttaatacctagtattctttgggctggggggcggggtgcagtgggatagggaagagaaccaaaaaggaaatgttacttcatttaaaggacatatgaacccaaagtatctgagagcagtctcaatcaatttagaaagtttattttgccaaggttaaggacatgcctatgacacagcctcaggaagtcctgaagacatgtgccccagggtggtcaggagacagcttgcttgtatacattttacagagacgtgaygcatcagtcaatatgtataagatgtgcattggtttggtccagaaaggagggacaagtcgaagtagtaggcggagcttccaggtcataggtagataagagacaaagggttgcattcttttgagtctttgatcatccattcactgaacacacaatttacagtgagaagagtggtggagaaatagtcacttttgccttagtctggctcaatgaatctgcatttttacataaatagggcagaggaagcaatccaggtatgcgtttgtctcaggtgagcagagggaggactgtctgtcccacacctgtgaagatcagctaatcagctatcaatttacattgccaggtgaagttcagcagaattgttttagaataaagatattgagtttcacagggaatttccttgtggccaaattgtgaggaagatacgtagcttttgttttttctttttaaaatctttgtagctatcttatttaggaatataatgggaagcaggtttgcctgaggcagttgccagcagttcccagcttgacttttatctttggcttagtgattttggggtcccaagatttattttcctttcacagacaatattctctaataacacctatccaaattaggggctctggatggtgtttgggcagcagacatggttaaaaagaatggctgattgtacagtatgctaattatatctcaataaagctgtgaaaaaaataatgagttaggccaggtgcggtggctcacgcctgtaatcccaacactttgggaggctgaggcggggcagatcaactgaggtcgggagttcgagaccactctgaccgacttggagaaaccccgtctctactaaaaatacaaaaaattagccaggtgtcgtggtgcatgcctgtaatcccagctacttgggaggctgaggcaggagaatcccctgaacctgggaggcggaggttgcagtgagcctaagtcatgccattgcactccagcctgggcaacaagagcgaaaccccatctcaaaataaataaataaataaataaataaataaataaataaataaataaataaatatgactcactgatgctgattatcaagtaggtactaggaactggtctaaacattttctctaccttgatctccttcagtttgtcttcataaccatctctatcacataaatcctattattatcatccttatttaacaaataaggagaccaattaagagatatgcaacttgcctttgactggtaaagtgatgcaaataggaagagatgaaacagagattcaaaccctggtagtcccaccccagtattcatcttctatatgggattaggcaagattcctgaaaaagcttctaaacccctcatattaaacacaaagactctgttccagtgagtagactatgccattccctgtccccaaattcagcctggctccccctccctggtgcatgtcctgtagatggtggagtgaaaagaggtgcagtttgacaaaagagggcattccatctccttatcttctgatattactgtcagaaacaagttcctggcctctcacttcagctctcttcttttcagccagttatcccctgaacaaaattgcctcaagattacagatgagcagctgtgttttggatgcaggagcattgccatcttgctgacagctgagttttctctggggacatcagctagcccacagcaccccactctttttccacactccttattttcctgtaagctgtggttggtttcctcttgtgaccacaaatgaatcaaaaagagaactgtttcccagttattccttattatstcaaagcagatgttcaaggtgaggctccggatgacttatcaaaactccagaggtgatttgtgtcctgataacagtgaggtctcagactcacatgtatgcaggtggaaggcaggcagtgtcaatatgcaaagcgtgccaggcataagggggtaagcgccatgtctctaccattgtcaccaagcacagcacctgtctagttgtattgccttttaaaagacagactaggccgggcacagtggctcatgcctgtaatcccagtactttgggaggccgaggcaggtggatcacctgaggtcaggagttcgagaccagcctgaccaaaatggtgaaaccccatttctactaagaacagaaaattagccaggcatggtggtgcatgcctataatcccagctacttgggaggctgaggcaggagaatcacttgaacctgggaggcggaggttgcagtgagccgagattgcaccattgcacttcagcctaggcaacgagagtgaaactccatctcaaaaaataaataaataaataaataaaaataaaagactagatacattggccaacaatatatgtttgaggccctttgagtgaaaaagattatccagatttagtaaccttgaagttcctgtgaaatatgtgatcctgtgatatcatgattccttttcagaaggcagaccaacctcctttcccctccaaagatgttttggagaatactttgcagaaaatataagaatatgaaatgtcttcaaactgtgggatggtgagaaggtgtgccttggtatcagctgcacatttctggaaagtcgcatactcatagaacagaattaattttagcaactctgagaaaatggcctgttttttctctccctcttctcccattcatttaatatttttttccatcacttttcatatgcccagcaccttgtgtatgtagaaggtatgaaaaagtgctgggctcggtggctgacgcctgtaatcycagcactttggaaggccaaggtggtggatcacctgaggtcaggagttcgagaccagcctagccaacgtggtgaaaccccacctctactaaaaatacaaaaaattggttgggcatggtggatcacgaggtcaggagttcaagaccagcctgaccaacagggtgaaacctcgtctctactaaaaaaatacaaaaattagctgggcatggtggtggcatgtgcccctagtcccagctgctcaggaggctgaggcgggagaatcacttgaacccgggaggcagaagttgcagtgagccgagatagtgccactgcacttcagtctgagcaacagagtgagacttcgtctcaaaaaaataaaaaaaataaaaaataaaaagaaytacccgggcatggtggtgggtgcctttaatcccagctacttgggaggctgaggcaggagagtggcttgaacctgggagccggaggttgcagtgagccaagatcacgccattgcactccagcctgggcaataagagtgaaactccatctcaaagaaaaaaaaaaaaagagagatatgaaaaagtgtaggttgtatcattttgaaagtatcatgcatctcaatatgttaatactcagtagagtggctcgctcatcctcatttgcctggaactttcccaattttagcattaaaagttctacattcaggaaacccctcagtcccaggcaagccaagatatttgaccaccccagtgctctagaagacaggacgaaatgatcttgtgcaggcatcaacagaattcctttacacatgacagctacaaatgcagaaagatacaggtgcatcgtttgatgactcagatgctgccagcagcactgctactggtatcattactttacaaaatgacgagcagctcttggtaaaattccaaacaaagtggagtacgatcttccctcaatttacatggtagatgctttgctagaaaactcagcacatattaaaatgtgcagaaacactcagagtttaaatgtaaaatgtggtttagattttatacatagctgcttattgacgtctttttcactaaaatgactatctgctgagacatttgaaagtcatgagaggcaagggactattgtgtgtggtgtggaatttccctgtagagtgcagaatgttgatcatcccttgacctcacctctaaatttagccaatggcatcctctaattatagcaacaacaaaaaacacctgcagaggtttccaaaataccccactaggaatcagtcctgctctcattggaaaccactatactagatatttgaaaagaaagaaatactcaaaaagaggtaagcaacagtaagatcctttctctggcatccctttttctttatctcctctccctctgcatgcctgtctctctctttgtctccttcatcagtacaaactgttgacattttctctgtgtataacatcctgcaaagtgcttgggaaggtctgcaggtaactgccatctttgcctccaaagaccttaaagtatgcttgaaaatatgaaaccaaccaggagaatcagctcaaagttaacccatggcactaaatcaggattgcctgctcagctccagctgtaactgaattgattggatggtcttcccattgtctcccctggctctccactgaggctctactctttttttttgagtcagagtctcactgtgtcacccaggctggagtgcagtggtgtgatctcagctcactgcaacctccacctcccgggttcaaacaattctcctgcctcagcctcccgagtagctaggattacaggcacccgccaccacgcccagctaatttttgtatttttagtagagacggggtttcaccatattggccaggctggtctcttggccaggctggtctagaactcctgacctcatgatgcgcccgcctcggcctcccaaagtgctgggattacaggggtgagccaccgcgcctggcctctcccacttatcttttattgatcataagatcagcccagtgctttcagcctctttttgtactttggcacctggggaggagctaaggcctacacctctctgagtggaagagtttcctgggcagccctgtgtttggtcccaaccagttattcagcatggtccatattggcattattttgggtggggcacaagagttggaaataagcaataaataaaatacaaaaaaattcatgatgagagagaagagaccataagaaattagtgaagagccacatcggaaaattgagcagatgctttgcacataaaagcaacagttataataagaggtattattattatagttgtttttgtactttgtggggttgttcggggctttccagaatcaatatcttgttgttagaagaaagactgggctgagtgtggtggctcatgcctgtaatcctggcattttgggaggccaaggtgggtagatcacttgaggtcaggggttcgagaccagcttggccaccgtggtgctaaaaatctctgctaaaaatatatctcaactaaaaatacaagtatgagctgggcatggtagygtgtgcccttaaccccagctacttggaaggctgaggcatgagaattgcttgaacccaggtggcagaggttgccgtgagcagagatcacgccaccttactccagcctaggagtcaaagcgagactctctcaaaaaaaaaaaaaaaaaagaagaagaagaaagactattaagtttcatcagtcctacaacgtttataagtcattttacaaacattatcatatatggtcctcacaacaaccaacttaatatccctatttgacagaagtctaacctgaggctcagggagacttagatttggttaaggtcccaygctgtaaaatagctctctcagattcatgcatggtgtttctatgagactacactgccttttactcagaggaggcatttgaactgaatctaaatgaaaccttagatggtgtgggccagaccagaatggggacctgcattcagagaagcaagtgctccccacgaagaggtcaaggtccgtgtagaggaagtggaactcacaaggtgagggcagcttatggacgagaggaatgaggggcccttccggggaggtgagggagagcatgtgcccacacggggctgagaggcttcagttaagagaccaggcttgtcaggacagcatgcactggtgtgttttgacagagaggagaacgtggagcaaaaggaatagattctaagatctttgagggcaaagactgctcattcctgtttattattcccaatacctgaaatagagtaaatacatcataaatgttcacttgaaagttgtgtggcaggttgaagccaagccaaggagtttagggttgaagccacagcaagagagggcttgtctgcctttttagagttcaataataatgccatgatgtatttaacttttattttggtttcaggggtacatgtgtaggtttgtgatataagtaaattacatgtcatgagggtttggtgtacagattattttgtcacccaaagagtaaacatagtaggccaggcccagtggctcatgcctgtaatcccagcactttgtgaggctgaggcgggtggatcacaaggtcaggagatcaagaccatcctggctaacgtggtgaaaccccatctctactaaaaaatacaaaaaattagccgggcgtggtggcaggagcctgtagtcccagctactcgggaggctgaggcaggagaatggcgtgaacccgggaggtggagcttgcagtgagccaagatcgcaccactgcactccagcctgggtgacagagcgagactccgtgtcagaaaaaaaaaaaaaaaaaaagagtaaacatagcacccaatagatggttttttgttttttgttttttgttttttgtttttaagatggagtctcactctgtcgcccaggctggagtgcagtggtgcgatcttggctgactgcaacctccacctcccaggctcaagcaattcccctgccttagcctctcgagtagctggaattacaggtgcatgcccccatgcctagctaatttcttttgtatttttagtagagagggggtttcaccatgttggccagactggtctcgaactcctgacctcaagtgatccacccacctcggcctcctgaagtgctgggattacaggcaatagatagtttttctatccttattctcttcccaccctccacacccaagtgggcctagttttctgttctcttctttgtgttcatgtaaactcagtgtttggttttcacttattggaggtaaacattttgtgttcctgcgttagtgtgtttacgataatggcatccagctccatccgtattgctgcaaaggacatgaccttgttcttttttatgactgcatagtattctatggtgtgtatgtacaatattttcttttttcagtctactgttgatgggcatctaggttgattccatgcctttgctattgtgaatagtgctgcagtgaacctatgtgtgcatgtgtctttatgatagaactgtttctactcctttgggtatatacccaataatgagattgctgggttgaatggtagttctaatttctttgagaaattgcccagctgctttccacagtggctgaactaatttacattcctaccagcagtgtataagcattcccttttctccagaacctcaccagcatctgttatttttttactttttaataatagcccttttgactaattctgtgatttttaattaatgaaacttgcagctcccgaggtatggtgagtgtggtgttacaggaagattgacctggcaatggtataagttggtgaaaaggtgtaagtcggaggcaaatactgatggagatttgggagtctgctgtggaatataggggggagattccaygagacttttggggaggcagctttgtgtgatgaaaataacaggactttgaagtcagacaaacctggatttgaatcgtggctctaccgtattctagctgtgtgccctaggacaagtagcttaaactgtcaacttcagtttcctaatccatacaaacggggattaatatatgtatctcagagagccgctgggaaaaataaaatagatgtatgcagatcttgtgttcctaggaaatattcaataaatgttttgattttgtgtcctcctttttgccaaaggaattattgatcagaagttgataagtaatgggatttgagactccagaatgtgctgcctaaagatggtgactataatagaaaaattagatgttggggtttgtttatttgtgtttttaaaaggagatgggagcttgctgtgttgcccaggctgaccttgaattcctgaactcaagtgatcctcctgcctcagtcttccaagggactgggactagaggcatcactgcacccagatcaatgggtttttttcatgttaactttgagtgacagcctagttgagatgcctggggtagaattggtgatatggggccaaaactcagctgaggcttgagaggggtgaattgtgcagagacattgatttggagagtcctcaacaaaggaatgaatgctctgatcaaagagtcacaagatcaaaacagagaccaggctgttggtgttccatgcgctcatcaacgctgttgattagcattwccccatcctaggaaacatgacaggttgcttccagatgttaccttcaagatctgcattcctttcagattgctcgtcttctgccacagctagcaagatttgcccgaacattgaggtcacagcctcaaatgagcccctcaaagcctcagaatgacaggagagaagcttggtcaggcactccactggcatctaaggtagactgagctctgccaatttccaaagacagatggggctgaagagccaagttttggtaacatggacaaaaaccaaagcaattccagatgttagagccggagcagccagcgcctctgttgctttccacccctgtagcattaaaattagagagcaacagccaagtaatgaagcctgggtcactccccatctgtctcactaaatgccayttggaaccagtgccttttcatttgacagtaaaatcaatgaatgaaatatcgcagggttgaaagtgatgctgttcagaattcattatgggcgatgctctattccaaaggatggaagactcagccctctgcactttactttccggtaacatcaacacatctacttaatgaaacttgaaccttctgttaatccttcacctatttgcttttaaactgagtcgttttgaggaaagtctaaaggccttctctctggattctgcctcttaatgaattagctatcacaaaaagttggaagatgcagcagtttaaggaaagagggactagttaattaggaaaacagcttgagattggaggacttttgccaataatcactgggtcccttatcagccaacaccatttcctttgaattgttctttcctgttgagaaatgtctcagcactgagcacaccgagctgagggtyacaatttgtacaaattcagatacagctatgaggtgggagagcaaagaagggtggcaaagagaagagggaatgccctcactcttggaattaacacctgcctctggaaaaatggaagacacagttgaaacaatatcattcctttataagtaatgaaaactaggatcaacatgagagaacagactcttttttttcagagagttttgctcttgttacccaggctggagtacaatggcacgatcttggctcactgcaacctccacctcccagattcaagtgattctctcctgcctcagcttcccaagtaggtgggattacaggcgtgctccaccacgctcagctaattttttttgtttttagtagagactgcatttcaacatgtttgtcaggctggtcttgaactcctgaccttgggggatccatcctcctcagcctcccaaagtgctggggttacaggcgtgagccaccatgcctggtgataacaaactcttaaggtgtgtgtgtgtagtgtgtgtgtgtrtgtgtgtgtgtgtgtgtgtgtagagagagagagggggtgaatgaggccagggctcattatctgctgccctttctacaacagaagtgttctttccttgggatagtgggtgtttgatttatgtaggggtattagacaaaaaaagaaatacctgggatgacaagtaacattcacagctcatctaagaaatatcttcaaatttaatgcagccttccttttttttttccttcaacaaatatttattgagcacttactatattcccaccaggtcctagaaataataagtcatagacttcccacaagagcctgggtgttcaagtatgacagagagagagagagagagagaggcaagagaaaaagcaagaaaaaaaaacagtgatgggcattagaaggcaacaaagaaagagagaacaagagtaaggcagggcagggaaagctacttcggagagagggacatgaagtaaggcttctccaaggaggagaaattcaagctggaaacacagaaaggcgctgaccatgacaagagttggggtgagcatttcagcatgtgcgtgggcatgagacagggcagagctggtggtcttggaagggtggaaagtccaacatggccggggtatagggagtgacaggtggtgttatgaaattaggatggaaatgagcggggacatattgggtagggacgtataggctaccacagtaagtttgggtttttatgtctagacttttcgagtagggaactggatgggagaagacgtcatggaagaaaggtgaccacttagcaccaggtaagaaagttggtacagcagtatttgcagatggaggtggctagatccaagatatattttggagttagcatgatagggatgccattggtgagagagaggaggaatttgggcagacgcagattcctgttgtgagccacactaggaggatggagtcactgtcactcagccttttaaggaatgttcttggcacatcagcagtgcactttgtctgtgccagggctggagaagcaaacaagtgtagaatgcagttccttccctcgctggcttcacagtcaaaacaggaagatggacgtgtgaatagacacttaaagaacgccttatggtactggcacccacctggaggttttctgcagaacgccctgcaaagcctattgtttcctcatccacaacccccatgtttgttttgttgcaatcattattgttttgtttttgttggtatatgtgaaatctatggcatatgttctacttgggaaggagcatatataatgtttacattctgtttaaagagtaataaacctaacatccatgcacccaccatccagcttaagacaaatcctcacccaaagacttggagctccatgtggtctttgccccagagctaactattgcaccaaattttggatttatcacttccatgtactttstggttataacagtcacgatcacaagcaatatgtatttcttttgcctcttttagctttatacagtggaagcattctatattaatacttctgtgacttgcttcttttgctcaaattacgttagtgagatgcatcaatgtcgcgccatgtaaactgagttcattcatttcactgatgcatgtgaataagtcacattagattgatctattcttttgtcataggacatttggatgtttgccatttttggctattcctaatacttctgtgagtactatttatgtatctcctagggttttcctgagaggttacatgtaggagtgggttagagaatgtgtgtgtgtatgtgtgtgtgtatgtgtacgtgcatgtatgtgtgcatgtgtatgtgtgtgtgtgtgkatgtgtgtgcatgtgtgtgcagtgtgtgtgtagtgtgtgtgtatgtgtgcgtgggtgtgtgcatgtgtgtgtatacacagtcaactttattagtgactgccagtgattttccaaaatggttattccagtttacacccctactagtgatgaagagttcttattgccacccatcttaaccagttcttattcattattgtttcacattttacgatcttttccaatctagaagaatgatacctgagatattaatttgcattttttcatcattaatgaggttatacattaggtatgtgcattggctggttgaatttctgagaaatatttgtttatatcttttgcccattttttttgttgctcatcttttccgtattgacttgtagccgttctttatctgttctgcaaactaagcctttgccaattttatatgctgcaaatatcagccttcagtttattgcatgtctaatttttatgatgtcttatgatgtgctgaagttctgcactgaagttgaatttatcagtcattttttttacggtcttacatgtttttggattcgacttatgaaaataaaccaaaacctggggtcataaaaatactcttcttattgtattctaagtttttgaaaggtttgcctttcacatttaactccttcattcatatgggattgaatactttttgtatggtagtgatttgttccaagatttttttcattaccttttccatgcttatttgtcacagatcaagttcctatatatgaatgaataagttccattggttgtttatgtattcctaagtcaatactacattgtgtttagattattatgcctttataataatcctgatagctagtagtgctagttttcttacctgctctcctcccttttttataacttaaaaattgaactattaaaaacgtaaataaaacgggtgcagtgtcccacacctgtaatcccagcactttggggggccaaggcgggcagatcacctgaggtcaggagttcgagaccagcctggccaacatggtgaaaccccatctctactaaaaaatacaaaaattagctgagcgtggtagcaggcacctgtaatcctagctactagggaggctgaggcaggagaatcacttgaacctgggaggcggaggttatggtgagccgaggttgcgccacggcactccagcctgggtgacagagtaagactctgtctcaaaaaaatatagtaccagctcaatgaattgtcacaatcttggctgttcttaaccatatatattttgggataagtttgtcaagttctttacctatgtacaaatacacatacacacacattgggattttgattgcaattttatttctatctataaattaatttgatgagaattgttgtatgtgtgataatgaatcttcctatctataaacctgatttgttattattttatttgttctttaatatcatccaataacattttgcaatattccccttaaagtcttgtacatcttgtataatttatcagtagacttcaatttttttatgatgtaaagagtacttctagtaatgtgttttttgtctattttgaatacaaattcatcagctttttttgtatttgtattttcttttatgtcttcttccctctttttattttcagagtttttcttttaaatgatatatagttggatttatttaaattcccaaatgaaaatctttcacctaaaaagtaagggtctatttactagattgcggccaccaagatggcaggtgttatttctgccacttgatattgtgctttctagttgtcatactttttagatttcttcatttctcctttctaaccttctttagaatgactgtagatttttatttctcattctaattttaacccccactagattgaaagttatataccaagaatcttaacatgaatatttaacttcaagtctgaaattaatatcttcactcttctccaacacagtgtgagacgttagaaagtttaatcgcctccttctgagttacatgcttgttattttaaaagtttgcttgttctattttattcttgttcaaatttcattaattagatagccttgttgatttttcagttggtatatatattatttttattttttgagacagagtcttgctctgtcacacaggctggagtacagtggcatgatcttggctcactgaagcctctgcctcctgggctcaagcaattatcctgcctcagcctcctgagtagctgggattatgggcacatgccaccacacccggctaatttttgtatttttaatagagatagggtttcagcatgtttgccaggctagtctcaaactcctgacctcgtgatccacccacctcggcctccctaagtgctgggattacaggcctgagccaccacgcccagcctcagtgggtatatttttaaatgtttatctataaagttgctgtttttttttctcactattcttcacatttcagaccttccttctgggattattttccttcctcctgaagtatatcttttaaaatttcccttcatgtaagtgcctagtactagtagcatctgttttttattatctgaaaaatgtctttattttgccatcccgaagggtgtttttcctggatctacaattcttggttgacacttattttctctcagcacactgaaggtattccactcccttaaggcttacattgtctctgttggtaagtcagctgccagtcattttttacttctgcaacatttatttggttccttttcaaatacacctggtcatttttaacagttttcttgttcttttatcataaaattgtataatctgtatggttatctattcatgaataataaattaccataaaacttagtggcttaaaataattggatttgttatgtctcatagtttctgttagaaacccaggaggagctcagctaggcaaatgtcttctgggatctctcatgcagctgtagtcacacatcaacatggagggataattgacttctaaggtgactcattcaagtagctgtcaagttggttcctgctataggccatgggcatcatttttcctctatgtgggcctctccatagggcatcctgagtgtccctacaacatggagattggcttctcccaaagagagtaaacaataagagacagagagagtgtgtgtgcctgtgtgtgtgcgtgccaggcataggtcataacattttttttttttgtaatttctctttttttttcttttttctttttttttttaaattatactttaagttctagggtacatgtgcacaacatgcaggtttgttacatgtgtatacatgtaccatgttggtgtgctgcacccattaactcrtcatttacattaggtatatctcctaatgctatccttcccccaccccatgacaggccccagtgtgtgatgttccctgccctgtgtccaaaggtcataacatttttattacctagattcacatgtcccacaatatcacttctgtcccattctatttattagaaatgagtcactgaaacaattcaatgggagggaatctctgccttttaaagggaagaaagggaaagaatttagggacatattttatttgtttgtttgtttgtctgttttttagagacagggtctcactctgtggcccaggctggagcatggtgacacaatcatagctcactgtaacctccaactcctgggctgtagcaatccttggagacatattttaaaaccaccacctacttcctattatttcttgaaatatattaaacagattttccttatgttctgtacatgatgattttatcagtcttctggggttgaattcattgttacttctgcagtttttgtttgatgttgtggtaagttcgtgttcttggaaatttatctttgaggccaggttttaaaatacagtcctctagataggatttgtatttgcttctgccaggctacaagatggttggctttcagaccaacaagataggtatgattctggcccccaaactccctgagaatgggcctagaattaagaattctcagtggagatcactgtcttttacccagacccaaggctaagacaggcaaatttcctatagaactggctccttacttctttacccatcaaaggtgtgacttctgggggatcctgtctttacgctttgttctctagggtgtttttatgtaatcctgctcttcatctcattttcctgtgtttgccccattaaaaccaatgcttaattccagtagggataggcaggctccccagttcaggtactgccttcagcttgcttagctctcagggtctgtgctatcttatcagtttccattattgactcaagatctgccttatgttcttgcctactcatctatttctgttacacacagataaatgcatgtatgtgcatatatacatgcattatttttacatagcatttttatgtgtttttatgccagagttttgttttccatgatttatttttctctatggtatcagacaccaaactacccaggaagctctttagaaatacgaatttgctggcccaacccagagttaggaaattagcaaattagaatcttctgagatgggtaccasgtacctatatgattttttaaaacctccccagaggatgctgatgcctgtcactgttaaagataattattataatgaagacatggtccagaagcagtggaagctcagcaagagagctaaatttggccgacacaaccgaggaaggctttatagaggaggaaattgcatttcgcctttttaaaacatttcctctcatcctttgactgctacagttagctggacagtatgtaagccccttagcgccatgccatgcgtttgaagaccccagggggatgtccagaggcagccattgtctcactgtgtgtgtagcaaggtcgtgggacttagccactttgcaggataagattctgtagcacttatcagtgcccatccacttatctgcccattgcctaggctcagagccactatggaccagcttacagagcaggaacttgccagcattgttcttgggtgctattgggggtatgaattgggctgtctgggctggcggtgtaatgtaaatatcagataaattgcctaggctcagagccactatggaccagcttacagagcaagaacttacctacattgtttttgggtgctattgggggtgtgaattgggctgtctgggctggcggtgtaatgtaaatatcagataaattgcctaggcccagagccactatggaccagcttacagagcaggaacttacctgcattgttcttgggtgctattgggggtatgaattgggctgtctgggctggcagtgcaatgtaaatatcagataaatgtagcagggaggattctatagaggcgataactctcagaaggttggataccattatttcacaacccagagctgtgccaaaccctgcaatgtcaaaaaaaaaaaaaaaaaaaaagagagagagcgagcgagctttgtttgactttactgttcactgccctgtaaaagactttcacggtggatcatgctcctcgatccacattgagagcagatgctaaacagtgcctgaggcctgtgcatttggagggaagaaaacccagtttgaatctcagctctacaacttattagcagcatgacaaggatttcactgcctctgagcttcagttttcgttctgttaaatggaaggtaaaaatacctatcttgacattgagaacacatagacacagagaggggaataacacacaccagggtctgttgggggccgaggggtgatgggagggaacttagaggacagagcaataggtgcagcaaaccaccatggcacatatatacaaacctgcatgttctgcacacttttttttattttagaagaaattaaaaaaaaaatacttgtcttctaaggttattggaagacttacgtgaagcaatgtattttaaatgccctatactatacctggtatctagtggacatttctgtttattatttttgctgttgtgattctgaaagaccctaatggataagtagggcaaggattattttcatgttctcgtgtttagcatatgtaatgcctgctcacctctgcattcaagtcaagaccagacttatgtatccatagcttgagccaactcttccctctagatttagttcctaataaaaaagtaaaaatgggctggacacagtggctcacgcatgtaatcccagcactttgggaggcctaggtgggcggatcacccgagatcaggagttcgagaccagcctgaccaacatggagaaaccccatctctactaaaaatacgaaaacattagccgggcatggtggcacatgcctgtaatcccagctactcaggaggctggagaatagcttgaacccgggaagcggaggttgtggtgagccgagatcacgccattgcactccagcctgagcaacaagagcaaaactctgtcttaaaaaaataaaaaaataaaaaataacagtaaaaatagacatttttggccgggcacggtggctcacgcctgtaatcccagcactttgggaggccaaggcgggcggatcatgaggtcaggagatcgagaccatcctggctgacacagtgaaaccccgtctccactaaaaatacaaaaaattagccgagcgtggtggcagcacctgtagtcccagctactgggaggctgaggcaggagaatggcatgaacccgggagatggagcttgcagtgagccgagatcatgccactgcactccagcctgaacgacagagtgagactccatctcaaaaaaaaaaaaaagaaaaaaattagacatttttaaaatttattaaacaaatatgaagtatctggcaccaagttagatggtttacagatatggtctctagtctttataataaacttcaggtaggttttattagcctcatttgacaagagcaaaccaaagctcagagagtaaaagatgctgaaagattatacacttggccagtgggtaagctgggatttgaaactaaggttgtgtcgttttccatatacacacacagcctctccttcaccttatacttctctaccacaattgctgtgctcagggtctttcctcagcctggaaggccttctacctcccactctgcccaataaactcttacttattctttaagacccaacacaaatgctgcctcccttgtaaggctttggctccctcaggtgcaaaaaaaattactcttttgcaatattttcatgggattttacttacattccttttttgtacacttttttgtacacttttacttacattccattttttgtcttatgtctcttaggcatatacatgtcttttgtacttatttgtagtgtgtttgaggtcagcaattatatctttttttaatttaataaggactatcctttatacttcataaatgttgattaaatgtttattgaattaagaaatacaaattaggccgggcttggtggcttacacctataatcccagcactttgggagccctgaggcgggcagatgaatcacttgaggtcaggagttcgagaccagcctggccaacatggtgtaaccccgtctctaataaaaatacaaaaaaaaaaaaaaaaaaaaaaaaaaaaaagagccaggcgtggtggcaggcacctgtaagcccagctacttgggaggctgaggcacaagaatcgcttgaacttgggaggcagaggtttcagtgagccaagatcacgccactgcactccatccaccctgggtgacagagtaagatgccgtctcaataaataaataaataaaaattatgttcagaaaagttgttagacagatacattcttaagtatgtttgtccttacatcttcagtgatgctatacaagtgactaccatctcttagcaggggaaaaagttgacacacatttgccttagtgcctggctttgcccttctctgcgaagtttccacattgcaagtgcacaagtaaaggaccttctgtctacccaagttttataagttgcagaagcttatttgacttgatcatatctcctgttcccagtccaggtctttatctgtggcccctccagcttcttcattacctggcacataattctacatttacagaagggcactggaccgcatgttgagttctattagctcagagttgcagctgcttccatgaacaagttcttaaaatgattcatcatgaggagacttacacctaagttactgggtcactgtcactgaaaaattgcataagtggaatggaattagaatctctcaggagctaaaaggttgcatttacaacaggttctgccatttctatgatgtctttcattcaatgacacttcaatagaaagttaattgaaatggaaaagatcaagcacaaagacaaaaagcaaaaaggactttacaagatgtttagccttattccatgctttgatgaggcatagatgtagaagccacaggcaagccaaaaactttgtttcgaaaactgttaaaacaataatatgtccaaaattggcctgtctccaagaaagattcacagtacccaaaattggggagtattgatacagcaaatacggtaggtcagagtcattagatcctgtggaagattctcggtatagatggggttggtgattgtgtctaagtcttcagtggctcaacagctatgcaataattggcagccacagaatcctggaccatcagaaccaagaacctttgtgggttgttctgtggaaatattaatgatcttattttgcaagagtggaggtccaggtctaagaacaagtgggcctagcctggaactcagatctcttgttgcttgtttccaacgtttacctgtagtaattgctcagccagctacaaagctggccttagcatacggagaaaatgtacagacaaatcattgctgtgtgatgggagaatagctgtggatagggatactttgcagtcacaatattgtctctgagtgagggtccaccaattagagttagatgtcgtgtttcttgcagccccgatacccacaatgcagtttcaaataccagttacttaaagcaaagttagtattcaaactcactcttcacgcacaagaatgcagactccgaggagacttctactatccttcccagttgtttaaaccaatagcaatttttttttttttttttttttttggctgagacagagtttcactcagtcgcctaggctggagtgcagtggcatgatctcagctcactgcaacctccgcctcctgggttcaagcgattctcctgcctcagcctcccgagtagctggaattacgggcacacaccaccatgcccggctaattttttgtatttttagtaaatacagggtttcactatgttggccatgctggtcttgaacttctgacctcaggtgatcctcctgcctcggcctcccaaagtgctgggattacaggcacaatagcaatttttttagcagctcaccatggtctaatctttctaaagtagtctattttgttttcagaaaaacaactctcttcccacactgctaattaatagatgtacataatattagagttctcaatggtaagaacaagaaatgacataaaaggtttgggaacaaccacaagtcactcttggtaagcacccagcccaggtggtggaaacagcagtgtgtggacataccagagtgctgcttcgagtgagccatctgtgtgccctgcacatcagttactataaaaacattcctggcaaaaaggaagcattggcaacaaggcctcaatctattgccatccattccctcccttatggacccaggaaagaaagaaaggtgtcctgggtcaagtcttaaacacactgacagaccttctgtcaaacacacatattaatacattaatagcatttgctaggagagagtccttatctgtggattgcttttagcagtacgtaccttgctatggtttggatctgtgtccccacccaagtctcatatccacttgtaatccccagtgttggaggtagggcctggtaggaggtgattaggtcacaggggtggattcttcataaatggtttagcaccatccgtttcatgctgttctcatgatagagttctctcgagatctggtcatttaaaagtgggtggcacctccccccattctttctgctgctcccaccatgtgagacgtgtctgtttctgttttgccttccgccatgactgtgcattccctgaggcctccccagaagcggaggctgccatgcttcctgtacagcctgcagaaccatgagccaattaaacctcttttcttcttcttctttttttttttttttttttagacagagtcttgctctgtcaccaggctgaagtgcagtggctcaatctcggctcactgcaacctccgcctcccggattcaagcaattcccctgccttagcttcccaagtagctgggagtacaggcacgtaccaccacacccgactaattttttgttttttcagtagagacgggatttcaccatgttggccaggctagtctcaatctcctgacctcgtgatccacccgcctcagcctcccaaagtgctgagattacaggtgtgagccactgtgcccggcctaactcaactacttttcttataatttacctagtctcaggcattttttttatagcaatgtgagaatggactaatacatacctgaactaggattactatgggaaacaaatctgtaattattgggtttatggtacgtgcaccccctggaaaacagcacagaaactctgtaattgttggaatataaaattgagatgtttcatgaccgacatagctctgttcagtgcaagcaatgatgcatacacaactcagagacctcatatgttaaatcagggccagaacacttttccatgtggcaaggaattggaaagtggtattggtggtcctgggcttctctctgccttgcctaataattacttgacactaaggcaatgagctctgatatttgtgattctgatcctttgtgttatctcaattgcttaattcagtgtattgattagacattcaaataaaacagcctctggtagatgttcaaaatgcagtaggaaaaagacaaataactggtttttccatttttcaaagagattttgttagaaatctcttatgagagaacccagatctctagtggaagcaaaaccatcatagaaactggaggttggaacaaagtccgttcctaggtgagtttagcgagaaccaagtaaaaaaaccaggagccaggaaagacagatggacacagacagaatgaagatgggctgcctcagactgccagtcagatgtactccaaatcacggtgcacgcagaggacctggcttttcagtgataagagtgaaccattatctcactgactgtagctgactctctacaattcttggtagctttataaactctcaccaccagtggtggtagttttggtcactccctgggagaycagactgaagtatgtagctgtccaagttaagagtgaagcaacaactttttttttttttttgagatggagtctcgctctgtcacccaggctggagtgcagtggcacgatcttggctcactgcaacctgtgcctcccaggttcaagcgattctcctgcctcagcctcctgagtagctgggattacaggcgtgcaccaccatgcccagctaatttttgtatttttagtagagatggggtttcaccatattggccaggctggtctcgaactcgtgacttcataatccacccgcctcggcctcccaaagtgctgggattacaggcgtgagccaccacgccyggcctgaaacaacaacctttcaatgtcttagctttagcactacaaacctgtctgtagagatgatgaagttggcttgtctctgtctattcagtttccttctgggaaagctggagggcaggccagggtggtatggcttaagcacacagcattctstggttccttgctgcctttcaaacaatcctccgtcacggtaattcctctctaccaggcctttggcaagccatagatagtagattgtgcagggttcatttcttgaagtaaaggaaatgagcatgttgtaagctatagtatccattaattagaattgtaataattttgagtaaggaaaaggatggaaatgcctcagctgttttcaaggggtcgtatttaaacatctagacctctgagctaagggagcgtgttgtttctatgcagtctcctttatgtaccccagatgggcgctcctgccagcacctttgatggcgctgaaatgctgttctgacaaatccaccgtgtggccttcctcaccgattcattctcaagtggccttgagccctaaataaggaacagatgtccccccaggcagacttgccctgccactcgctactaaactagtgacgttttccagattgagcttgtgacaacagcctctttatgtggcccgctcacctgagacaggtgtaccaggcctgccatgggccccttcctggaggagaagccaccacctctaccttctctgccactctttcttcttttgctggcattgctctgagcaggggaaatggcctttctcctcaaatgtcacctcagctgtgcttccccaagcccctccccctttctgctgcataggccacccgtccttcaccctgcacccttgctgtgtccccttatctcctttcctttttgtagcatctcttgtcaccacttagcatttcattacatatttatttgtggtccagctcccgcattggaatgaaagtgccaacaaggcaggaatttgttttgttttgtttttttaaacactcaagagtccagaatagtgcctgacgtatagtcacctctcaataaataactgttggatgaataaatgtgtagatgaataaacaaacagctgaatgaacagatgagcagattcgggttggaatgcgatctctgactccttgtgaagaggaacctgggtgtaattggagaccattagtctcagtgaagtaactcaagagtggaaaaccaaacgttgtatgttgtcactgataagtgggagctaagctatgaggatgcaaaggcataagaatgagagactcccggccgggggcggtggctcacgcctgtaatcccaacactttgggaggccgaggcgggtggatcacaaggtcaggagatcaagaccatcctgcccaacatggtgaaaccccgtctctactaaaaattcaaaaaattagctgggtgtggtggtgcgtgcctgtaatcccagctactcgggaggctgaggcaggaaaatcgcttgaacctgggaggcagaggttgcagtgagccgagatcatgccactgcactccagcctggcgacatagcgagacttggtctcaaaaaaaaaaaaaaagaatgagatactcccatagagtggattttggggactcggtggggaaagggtttgagggggtgagggataaaagactgtacattgggtacagtgtctactgctcgggtgatgggtgcaccaaaatctcggaagtcaccgctaaagaacttattcatgtaaccaagcatcacctgttccccaaaaaactattgaaataaaataaaataaaataaaataagaatttttttggcagctgagcgttcttttcttggtggtcacctacgcgcatgtagacaaatgtgttccctctcttgttctctcccaccgctgcccacccccatctctgaaactttgccagatgaagttttttctaccctgaacttggatgcctccatcggaaaggatatcaaaactattcaaaggcagtgtcttacatgttgggattgttggtgatttaacgccatgccaggagaagaccactagctggccattgtagctgygttgtccttggcttgctaagggagaattctctccgaagagggcagtggcaaaagggagatcagtgggctgcgtctgcactggctttgctgacagagccatactstgctttaccccgtgtttatgtggagtgtgtgctgttcagcatttggaggtgttggatragaaggctcttgtgtgtgtgatggcctaaacaaagccaggatccgtccagacaccccattctagctattaatttcagcaaccttcatttccaggctgatactgcgtggctcataaggacagttttgttaggaaacaagggttctggcctttactcatctgtgtgatcttgggaatatcatttaccctcacagcaagtcagtttcatcagttatacgatgaaaagattggactaaatgagtattaaggtttttttccaggtgtaatatttttaaccatattgagatccatttatttatttatttatttatttatttattwaacagaatcttgctttgttgcccaggcaggagtgcagtatcttggctcactgcagcctctgcctgctgggttccagcgattctcctgcctcagcctcctgggtagctgggactacgggcacccgccaccacacctggctaattttttttttttttttgtatttttagtagagatggggtttcaccatgttggccaggctggtctcaaactcctgacctcacgtgatctgcctgcctcggcctcccaagggatctcctctttatattggagttctcatgttctttttctcatcattcaaatgagaagtttggtccaaaatatcctacaggcccttgcaactctgattcctgtgatgtgatgctgcatcaaattttttaaaagtacaaaagcctcggccaggtgcagtggctcacacctgtaatcccagcactttgggaggtggaggtggatggatcacttgagatcaggagttcgagaccagcctggccaacatggcaaaactccgtctctactaaaaatacaaaaattagccgggcgtggtggcgggtgcctgtagttccagctacttgggaggctgaggcagtagaatcacttgaacccaagaggcggaggttgcagtgagccaagatcacactgctgcactccagcttgggcaacagagcaagacttctcaaaaaaaaaaaagtacaaaagcctcatcctcgatgcaagagtccccttagacatagcagactgtttawaaacatgagggacgcagtcktcttgatgggcakyttcagggcactggcagccaggaatgtgggttggggctcaactttcttttgaaagtgggctggcttggccagcatattgtttccttggcaaaagactggcaattgattgctctcctcgaagcatgtgctttkagacgcatatataccaggcagcctaacccaaagttgatgagaatgattcagaaaccttggtttttcactgaggatgttaaggaagccaattgtgaatctcaccatagacggagcatcttgtcttgtgagtgaaatgcggttgtagctgtaatgaactggcagtacataccatctttggagtcagagtgcttgattgcaaattttagatctagaaaattctgctacattgataatctaaaacccacacctgtggattctccattgcctcccctttatattaatacaataccacaaagttgacttctgctcttaccctgggggagctctgcacagccctgcctagggatactccttttctgcgttcccttcctctttgctcaacagctaaacagtggagagccccaacactctgccttggtcttctctataagcatctcctttaaatgagctcacattttaaaatactattcatgttccaatgatatgcaaatctatagcttggatctcgggcagcttggatctcaggcttaacttacggaaaacagaagtcttgattccactcaaattatggtatatccatacttggaaataccactcagcagtaaaaaggaaggcagtattaatacacataacacttggatggatttcaaaagcatcatgccaagtacaagaagtcaaacaggaaaaactacgtgctataagattataattctatttwtatgaaattctagaataagctcaactgcagtgacagaacgaaaatcagtggttgcctggagcgggtgtgtggggaagtggatggacccaaaaagagcacaagaagacttcaggtccttggaacagttctgtatcttgatggtcgtggtgcactacccatgactgcacccagttactaacatttgctgaactgcacttaaaatgggtgaattcattgagttgtacggtacttcaataaagttggggaggcagggaggctgactccacagttttctggcttaagggagagaatggattgccattgactgacatggggaaggctgagggaagagcaggtgtgaggggaaaaaacaagagtttgatctgggacaccttaaagtctgagatgctgagctgatcattggcccagaggggacaagcaagaccacagggctggacagagagcagcagagctctgaagactgtgtcctggagccccagcatttgtggtgaagattaaataggataaactatgtgagaatattaccgacatataccaagtaatactttcttttcttaatttattgtttaattaacaaataaaattgtatatactaaggtatataagccgatgttttgatatttgtgtacattgtggaatgaccaaatcaagctacttgacatacrcattccctccaagtattactttcacgttaccctcatcataattttctatggaggtgaaattcacatacttccatgtagttaacagttttaaagggtgcaatccagtggcatttagtgttttcacaacgttgtgcaaccacttgatgtctctagtttcaagatgtctttatcaccccaggaaaacaccgcgaacccaccaaataatcattccacacccccctctccctgtcccccattgaccactaatctgctctctgtctccgtgaatttggctattccgaatatatcacgtgaaatgtgatatatactgacttagtcatgcaatatgtgacattttgtgtctggcatctttcccttgacataaggtttccaaggttcatccaggtggcagcatctgttagtactgtgctcctttttatggctgaatgtgttgttattactccattcctttccacacaccagctccagagtgtgcatgagtatacttagctgagcccttcctccttccacccactctccccagcctgtccttcctcctcctccctgtgctgcacctgcctttgtgtcagtggtgcagcccacctgctcccgagggacttaccccacgcccagaagcacttcttcttcatccccaagacatacaccatagtaatttcttgaattcaccttcaccgcctctttggcagagccagattggctcctaacacaagccaaagtgttgcctttgtaacaattctattcagcaagcaggaagagagtgctaggaggctgtgcattgggacgtgctggggttaccagagctgcagagcccactgtgccccttccttccgggctcaagcccttatgtggatcacaggggagacaagcactctcacctcccggctcctggtttggccctcggcccctgcatgtcacctgtacacaggcccctcagaagatgttgctgaccatgatttgtgtctccagcccttacctctcccctcatctccatgcttgtgtatccatcatggaatatctctaaaagaaagaatgaaaagtaaatgcttgatttccacctgctcaaatcattcctgatcctactccacatagtggcaaggatgttctcttcaaaacacaattctgggccaggtgcagtggctcatgccttataatcccagcactttgggaggccaagacgggtggatcacctgaggtcaggagttcaagaccagcctggccaccatggtgaaaccctgtctctactaaaaatacaaaaattagctgattgcagtgtkgcgtgcctgtagttccaactacatgggaggctgaggcaggagaatcacttgaatccgggaggcagagattgcagtgaacmgagatggtgccactgaattccagcctgggtgacagagcaagactctgtctcaaaaacacaaacaaacaaaacccacaattctgaccacatcagcacctagtctcaacactgccgtgtcactcaactccaagggacactgttcacgttgcctctgtgcagatggtgccctggtgtcatacagcaggatggtcctgcccgcctgttcccttcagtggttccccctgcttgtccttcgtggagaaatccccttactctggccttgaccacaaggcccccaraccagccctcctggcttcagcctcgtctccctcgccatctgctcctccatctatttgtctcagccacattgaccttgagtccctgcagaggtgttttttccctcctgatacaaagcaatgatcagattctgtgcagatacccactaagtgtcctgcaattcaattcaattcacttctgaccctaactacccagaattagtgtcaggctgcacgggcttaagagctccatcccacaaaaccaccatcacttcagacgccagccacacatagtggggccccaggctgcaaagtcagaggtttccatagcactcacctcaggttccataatttcttagaaggatacagagcttaggaaagtgttttactttctgttgcaggtttgttataaaggatacagcccaggaacagccatatggaagagatgtgagctatgggggcagggcgtggagcccccataccttttccagacataccatcctcccagacctggatgtgtttctacccagtagctctctgagccctatcatttagggattttaatgttggtttcattacataggcatgttgactaagtcagtaatgattggtgatcaattcagtctccagccactgccgcctccctgcaggttgagggtgaagttcaaagatccaaccctctaattctgccttgttacttctgtcagccagcccctattctgaagctctctaggggcctagtaagagtggcccccttagggccgggtgcagtggctcacgcctgtaatcccagcactttaggaggctgaggcacatgratcacctgaggccaggagttcgagaccagcctggccaatatggtgaaagtccatctctattaaaaatacaaaaagtagccgagcatggtggcaggcgcctatamtcccagctactcaggaggctgagacaggagaattgcttgaatccgggaggtggaggttgcagtgagccgagatcccgccattgtgctccagcctgggtgacaaaagtgaaactcttgtctcaaaaaaaaaaaaaaaaaagtggcccccttagaacaaaaggtgttgcccctgtcacccaggaaattccaaggggcttaagagctctgtctcagtgatcaaggagggacaaagacmaagtatttttctgagataccactttactcatccttgtcaagcttcctgctctgaggtcttaacgctcttcctcctgccttcttcctcccttcccgatttccttcagatgtctattaaatccttatttcatcagcaacctttttggctaacttcccacctttcagcattctggacctctctatctcagccatttctgagtcacagttccacaattgttggtgtgactgtttagtggacctcgtcctgttttatcagctgaattcagtcccccaaaattcatatgtgggagccctgaccccttgtcacctcacaatgtgaccatattttgagatgggaccttgaaggaggtgattaaggtaaagctaagacatgaagataggccctaatcccagaagactggtgcccttgtaagaagaggaggtggcggggcacagcggctcacacctgtaatcccagcactttgggaggccgtggcgggcggatcacctgaggtcaggagttcaagaccagcctgactgacatggcgaaaccrcgtctctaccaaaaatacaaaaatgagccgtgcatggtggtacgcgcctgtaatcccagctacttgggaggttgaggcaggagaatcgcttgaacctgggaggcggaggttgcagtgagtcgagatcgcgccactgcactccagcctaggtgacagaacaagacaacgtctcaccgtctcaaaaaataaaactgtaagctccactgagggaagggaccgcctcagccctgcttgttgctagactctgattctgatatagatgcaatgaatatttgttgaatagatgaataacttatctcatgatgttgacagagacctttgaaatacgcctttcattaaccttataccaaatgatgccaagccagcatacctttatccttttagtaagtcctggcttgaatttcatccacattcttcctcattcaacaagaattactacatctttataatctgcccaaggatcaggcttaagaatagaaagagattttgtgcttaagtttcctgaccacttcgccatgcaaggagggcctctctcatcagtagctgttctgagtgagccgagatcatgccactgcactccagcctggatgacagagcaagactccatctcaaaaaagaagaaaggaatactataaggggaaaaaaattaagcagtaactacttaaaacccagaaatttttggtaatagtgataatacttaatcaaaattggacagttattttacaatttaacaattcattttacagtcaaaacagtgttatgatagaagtaggatgagttttactgttatccactgttaaaaaaataaaaattaaagtttggaaattgagtcatttgacccaggtggcacagttaataattgaaaaagccagaacttaaatgttggccttatcctacacagaagtgcttattctacaaccccgctttgcagcattctggagaaattaacaaattaaacaatttctcctagacactaataatagtaagtcaaaggaatatctgtgagtgaagtatctaaaagatgccaacaaattctgttttttaaaaaagacaaatccaaaatttccatggatggaggttgtagctgggctgaggccagctctgccgcctcgtggaggcctcgtctgagaggtggcggcagccatgcgtcctgggagtcagtgttataaaagcagccttggaagagagcctagcagctctgtgttccttttttagtttttcccatttccaaagaccaaagatcacggaaggaagaagagaaaaatcattatttcagattgaactgaagtcttaaactgtaaattaagttaatgtgggcctgctggggatatcttgggggttggggagggtggacttgttcttggatcttggcagaagaaatcattatctggacctttattggactggatacccttttctgcatcttgggccttccttctctatgctcccgaggtgccctgggtaggatgtcctctcagctcaatgtactaggattaacactgaaagaaattaaactcagagcatcccagtgggcaccagagggttctgcagaggggcctgggctcctgcctgcaaccccaggtggcagtgcagacaggagcaggtgggctgggcatgcacttcgaccaccctttctccccttcctctctgtgccctttagagtctaccccatggtgatgcccgctgtagccattcccttggggagagaaatgctttgcagatgtttctaaccataagtgtaggtgtgaaaacatgggcttttgtaactgagaggtgggaatgcaatcccctactctgagatttcttgaccttgacatgtgactttatctctctaaacctcaatttcccttctgaaaggtagaaataagtacactgcccacctcgtggtgtcattgtatctctttgatgatgcatagaaagcaatcaatggctgggtgcagtggctcacgtctgtaatcccaacactttgggaggccgaggagggcggatcatgaggtcaagagatcgagaccatcctggctaacacggtgaaamcctgtctctactraaaaatacaaaaaattagccggatgtggtgcgggcgcctgtagtcccagctactcgggaggctgaggcaggagaatggcgtgaacccgggaggcggagcttgcagtgagcggagatagtgccactgcactccagcctgggcggcagagcgagactccatctcaaaaaaaaaaaaaaaagctatcagtatcccagtgcctggaccaagtactaactagagggagcagcactgagaaaaactgactctgctcatagggcagctgtccatacacatatggacagcacaagtaaaagaagaacaagtatggggatgttcttgatgagaatgttgagaaaactcatcactgacatagcataaagagagctcccaatcaggttggaaggcagctttgaggtcttcaaacctagtcttctgcgcagtacagaaatcccccttcccacagcatgcctggtaggtgaccaccccctttcagaggtccccaaacctaccctgtatcagaattaatgggggccactgttgaaaaagaaattcccagggctcagcctgcgagtagctgcatccgtgagatttgaggcagagcctggcaaatggtagctggaccgtttgagaagctctttgtaaagataaaattcagaagggccaagagcgtgcctgttttcttccctgctgtgtctgtagcagttagcacagatcctggtgcagagttggggctccataaatacctgctggatgagggctgaatcatgcagcctcttccagaaccattccggtgatcggaagcttctccctagaaagggagctcatttctgttttgattaactgatggctagttatggtcttgcttataataagcaacgtctttcttcctctcatcttcacttattcagcctaactcttctttcaagagtgacacagattctgtttgctctcagaagggattatccctgagccatagttcagtaagggtggagtattttttccaagtgaaaggagggctgagtgatgaataaactgggttagaggtgcttcatcaagaaactgaaacccaagcaatcaaaatgagtggcaatgaattggagtacatagatcgcatctgaaggacatgcaatataaacctgggctccccaaacctgattaagagtcccagtgaagccctatgaaatagataccattttacacatgagaaaaatgaagaactgagagtttactcgatattacctatgagctgggtgtggtggtgcatgccagcactatgggaagctgaggtgggaggatcatctgaggccaagagttcaagaccagcctgggcgacatagcgagacccccatgtctacaaaaaaaaatttaaagttagctggatgtggtggcatacacctgtagtcccgtagctgctcaggaggctggggcaggaggatagcttgagcccaggagttcaaggctgcgctgagccatgattgtgccactgcattccagtctgggtgacatagtgagaccctgtctctttattaaacagagagagagagaaagagagagattacctattaaatatagaagagctagaacttaaaccaggtggagaattatattaaagttcaaagaggctggctgtggtggctcatgtctgtaatcccagcactttgggaggccgaggtgggcggatcacctgaggtcaggagttcgagactagcctggccaacatgatgaaatctcgtctctactaaaaatacaaaaattagctgggcatggcggcaagcacctgtaatcccagctactcgggaggctgagacaggagaatcgcttgaactgggaagtggaggttgcagtgagccaagattgtaccattgcactccagcctcagagacaagagcaaaactccctctcaaaaaaaaaaaaaaaaaaaagttcaaacaaaatagcagcagctgagtttgagacacataggaaaaaaaaacaaaaaaaggaacttcaagccagagttttggttttggctcctggctcttccattgactgcgtgtttctataaacaccgctcgcccttggcagtcttcatgtgcagtagtagatggttccagagaagtcattaagaccatcacagttcatctgactgtctgtgatcctagggtgctttgagctggagctgaactgcaaagtaggagctgtgaaacacrcaggttcagaaattctccttttcagtctattcggggttgtttaaatatcgttctgtgtgcatcttctcaggaaatgttttcttattctacattgactagccaggaacacctggggctgtgtagcagctctttcaggaggtttagtaaacggtaatatgatattatatgttttcctacttacagacatcctgcactcagacacacattgaatggtrctattaaatgcttttctattttaaaatagcttattagaataaatatgaggttgggagagcactattaggttctctgctgacagtcagggcagcctctggttttaacattttaatattcacctagtggtataagcacagccggtttgatcagcagcagtgattggcagacttcctctgtgtgcccaggagcttttctgggggtggaaaaaaggagatagcactgaaagcatcctgcagatcacagctagagccacctgttcctggtgtttacctggagaagttaactagtacgcatctacttccactccattcagatagaatttaccaattccagatgggctaggatggtgggttgtggataatgtatattttttatttattcacccattcattcatccattcatccacacacctgcagtataatgggcccctagagcacttaagctttttaatcaaggaagcagaatcatcaaatttgtgctttcaaaacatttctgtggctaggtaggcagaatggaatggcacagggctaccctgaggaaaaagtgatcaggtacaaatctgctaatccaggagagagagagaggaggagagcatggtagagcaagggaagggatgaatttgagaaacactccatagataaaatctgtgggatttgggcatggcaaggatgtgaggaatgaggagcaggagggttcaagattgagtaaaaggcttctagctgtggtgacaagtttgatcttcatgctaccaaccaagaaaacaggtaggggtcacacctattttgtaggaggagaagattgtggagttagttttggtcagcttgcgttgaaagtcattgtggaacagccaaatcacctaagaagatggtgggctgatacatagattgaagagtagggcactttggaaagaagtctgagttaacatggagattggtgatcatcttccagtcaatagtgtctgaagccaccggagtagatcccatcatctgtggataaaatagagagtaacaaaagggggccaagaaggggagttggggagcaccagcatgttaagggwggcagagagagggaagctccatggaggaggtaggggaaggatgttcagagggagtacatcagcgaagggacagatgtcgccgacgctaaaggcttcagaaaggtggagtggggtgagagacagcagggatggggtgaggggtaatgtagccaaattttgcagagtccagtctatgcacctaaatgtcagcacttgggtaggaaaacctagacattatgaacactggtcatcccaaaagggaggaagagaagtgcctttagttgagcatctcccatgagccagcactttacatctgtcatccttttttttttttttttgagatggagtctcactctgtcacctagactggagtgcagtggcgcagtctcggttcactgcagcctccgcctcccaagttcaagcgattctcatgccttagcctcccaagtagctgggattacaggtgcatgccaccacacccagctaatttttttgtatttttagtagaggcgggggtttcactatgttggccaggctggtcttgaactcctgacttcaagtgatccacccaccttggcctcccaaagtgctgggattacaggtgtgagccaccgcgcccggccttgtatcatcttaatctgatctcaatatccattcttagaggtcagagatagattttatacttaaccttttatgataaggaaactcaaggctcagagaagctataccttggtcaaatcatacacaggtggggctagaatcctgttttgccaagttttaaaatcctttgtcttcctgatttatcatgctgccttctttatacccaatggacgaatgctcagctcagccttttcatgccagatgcactgtgtggaagaattgtagttctctgctccttggttctcacctcccgagcagcaggagccrggccttgagccaaaacctgcagaaggaagaagagaggagagttccctgcgtagagccatccatctgctggctggtgacaccaacaccagggccccagcagaaaagcaagcttgttcgctcttgtctgactgttagtagtgatgtatgaataagcaaagaagacagcttcattttcataagttaacttgtgcctagactaaggaagatggagaacagcgcacttaatcataaccacaggcccagcttggaaaacaatgacaaagcgttttctgtgagtcacagtgttttattacaataactcccaagaagacgagacaggcagtgcagaatgctgagcaagccagcaccctgtagccacctgtgtcatctcccccaaggaatcccctgggattttacctcttcacacgatggcaagctgaagatgtgtttgcaccatcaaggttacagctgtagacttgggcctctggagaccaggatttagatgccacctggatgatgggctgggattgctggaactgtcacagatcacctgtatcatccatgctgtcacctggtagcagaggggacttctctcctagaagggtgttacccgacagaacccttattggaaaagcttttggggaggcctggctgcagtgctggaagggatgtggtaggtgactcggtgggaagggagacatccaacttgtctagcaggtatcacccacttacccccacagaatcaattactccctacttattattcccccatcttgctwatatcgccctgtcactgctaatatcatgctgcttcaaaattgtttatctgtctcctcttctagctgcccccagggcaagaactatgttttttttgtctttcattccttagtattttgtgtggtgtctgacacaactcaaaccctcaatcgatactaagctgaaccaacgtctcagcaaactaagggccatgtcagctaaggacaggaggagatggctgagctggaggtccaggcagatggagcagagtgtaggaccagggagttctgggtgcttccataagagcaaatgcttactgaacgctttactatttcatcgacgcttttagtggtaatgtttgaataagcacaaaacacagcatcattttcacaaattaacttgtgcttagaggaaaaaaaaaattaggtatgttacttactatctctattttacaagtgaatgaagaagcaagcacagagaggctaagtaccttgtccagggtcacatagctagtaagtggaagagccaggatttgagcccaggcgtctggctctggtgttcattttcttcaccactttactgtactcaggaagtatggcattggagactaccaatgaattctactggtttatgaggtgaatgtagacaccatgtgagtttattatgtgccagtcaccctgcaggtgaaatttacccttgactaaagcagtaacggagcttccaaactccaatcagtaattctcaaactttaatgtgcatctgaattacctggggagttggtttatttcaakgcaaattactagaccccgtggccagaattcttatgcagaaatattgtggagtgagggaattaatatattatttccccatatgcaccacccccgcccctgccaatattgaaccaacttagagataaaggagggagagccagatgtcaccttattttactgataaaggtgaaattggaggactcaactttagagtccttcagtatctacaatggctcttcctagcaccaaaacccagagttggaattgctcagctatcccaagaagtactagacaaccacagcctcacagaggaggtctgctctataaaatttaacagcgtgaaagaacagattcgatgcaggctatctgtyggcatgctggctcctggaagaagggacagaggaagaggctaggccacatcaacttggttgcctctgaaactcacctttctcttccccatggatgtggaaggagttatctgtcaccagtcagataactgtcaccagtcagttaactcctttcacacccatggggaagagaaaagatcggctcaaggtgtcaagaaatccctccttctagaaaccggagaagtaggggaaagcatcctcccactaataactaacttctaggttgaatgaagcccaggagcctgtgcttttagcaagaatctcaggggtttctgaaacagatagtcctcagaccacacttagagaggcagagttcgagaatggcctaatggttgtgctggatgacctccaaagaaaacctcatggataagcttgctgtctrtcaggggctttcgggttaggataggcagtgactatcatatgtacagtgcttagagttccagcttctgttctaagaacttaacatgtatgaagtcattccagcatgtgaagtcacagcagctgtaagagttagataccaaggcagagataggttaagcaatttttttcayggctacgcagctagaaggtggcagggctaggaaccggaaccaggcagcctgagttcagtccacactctttatctccaactatattgatgttcatggttccctcttcacacagaagctgggaaggcacagcctgaaagcaaaactcaacaccgttgagaggctaagcaacatcgcttacccttactactgttttgatcattgatatggcagctaatgaatttcttttaaaaagcaaaatgaagtctcagtagctgctgattattctgtttttttctcaccaatggatattaaagttctaactatcatgttgctaattaaggaattttttaagaggattggcgtgcctgaragggttaagtggtactatcaaaagcaatgcagcccaggtacaaactgaatgaagagcaatttggatattattctttgggataacgtgactttaggttaaccatgaaaatcattccttctctggagatgaagaccttgagtttaagccttatgtagagcaccccaagtgggtgctgcctccccatctttgcagttttccatacaggggagcrggtrcctgagttcccagagctgggtggaaggtctgttaatattggtgactacagagagggtgaaatgatttatgaggacactaacacacacccgatcaggaaggttaacccactagatgtcatttatttagcagacattyattaagcacctactgtgtgttcagtactacaccttgtagtatcttgcccttggaataatgcaggaagtggttatttataaatgaggtctgtgggtgcctgaatattgccaacttcatcttttatggagtgtaagtcagctgctggcaaaatacccgtaggagccaggcatggtggctcacgcctgtaatcctagcactttgggaggctgcggtgggaggatcgcctgaggttaggagttcgagatcagcctggtcaacatggcgaaaccctgtctctgctaaaaatacaaaaattagccagacatggtggcaggtgtctgtaatcccagctactcaggaggctgaggcaggagaatcgctttaactcgggaggcgaaggttgcagtgagccgagatggcgccatttgcactccagcctgggcgacagagcaagactccatctcaaaaaacaaaacaaagcaaacaaacaaacaaaaaacagtaggaagtactaaatagtgatgtcttccatctaatatgggaatgaagataaagtaatagttcagacttgggcttattcataaaaggcttcatgctggagatggaccttgaaaggattgtgggtggggattggcagggggggcaagggcaatgcctgccaagggagagctatatgagcaaggtagaaattagaccacaggcaacaaaatatttttgtttggcaggaataaagtgtagctcgtagagtatttgtctgaagaagtaaacaggcaaaataaaatgtatgggatgccaccatataaaatttggcctttcagatatctgaagatgaccttacctgaaatttasatggaccccctaaattcaataaaagatccttcccaggctgggcgcagtggctcacgcttgtaatcccagcactttgggaggccgaggcaggcggatcacaaggtcaggagatcgagaccatcctggccaacacggtgaaaccccrtctctactaaaatacaaaaaattaactgggtgtggtggtgtgtgcctgtagtcccagctactcgggaggctgaggcaggggagttacttgaacccgggaggcggaggttgcagtgagcccagattgcgccactgcactccagcctggcaacagagcgagactacgtctcaaaaacaaaacaaaagacccttgggatacccacctggggccttagtaattatcttaataattaggtatcacccctctcccccaacaatgacacttcccatcctcattgtgaggttattaaatgaggtctctagctgggtcatagcatcaggacaggacacacagctttcccaactaagggcaccctgcctttcagatctaattgttctgcacaaatgtcctaagcttgttgcacatgggattgattgactcttatactccctgaattggtgttatgtttttctgaggaattctacaagttttagatgtcatcatatacaatgacaaagtgggtggtagtgtttttcccatgcctctgatttatgtatttgtgcccggggtgatgatttagataggagcttaataaaattgatcgaatatattaccccaaacccacacaccatcatttcagggagctgtcatcataccaaggagatgctatatcacccagcatagtgttccaaaagaaccactgtgttttcttaagtgcggatgggcttccatttggtcagaaaggtctttatttctcaaattggccaacagtacaagagtgtaaattcaaaaggtattggttagctgtagaagagagtcattgttaggtgtgtgacttttccaagttatttaaactctctaaacctcaatttccctttcttttttttttttttttttttttgttttgttttttgagacggagtcttgctctctcacccagactggagtgcagtggtgcgatctcggctcactgcaagctccgccttccggattcatgccattctcctgcctcagcctcccaagtagctgggactacaggtgcccgccaccacgcctggctaattttttgtatttttagtagagatggggtttcactgtgttagccaggatggtctccatctcctgacctcatgatccgcccatcccggcctcccaaagtgctgggattacaggtgtgagccaccgcacccagccctcaatttccctttctacaaaacgtggattgataattcctgcctaaaatatttgtttttgtaaggataagcaatagtgcatcaagacagtgggaggaatctttgtttcaaacaaatgtagatgtctatcctagctccatctttagctgtccaagtcactggtcctttgtgagcctgtttcctaggctgtgaaatggtattggtaataattgcargagaaggccttctgcatgatggagttgtctaaaggagccaggtggatcagatgtgaaggcccagagacatgtacgccctaagagattgacyacaaggctaacttgcctaagttgctaagatgcagcagagactgaggccaacwtcaacgccagctctggggacagaggagcagttgttatctagacaacactcttgtattgatatgatattgacatgatgcttgttgacacaagataaatatatttgaaaggaagcagtgagggtgagaacaaaaaccctgtaagaaggtggacaaagagtggctcttctctttgggctctygtctcagcaaacaagggtaatccctcctccctgtcgtgagaaaccaatcccagtccattcccagaaaacgagtaaattaatgtacagtgggaaataccagaatgggaatgcttgagaaatagtatgcctgtcaataaatatgtgctccatgagttaggaaagaaatgcatgcatgcatgcatgmatgaatgaatgaatgaatgaatgaatgaatgdtttgggattctagctttatcagattcactaggtgacctgcagcaaatcagttaactgttctgggcctctatttcttctctataaaatggaaataataaaaatgactgcctaatggtgagaattaaatatgttaatgcaagttaagctgttaggtcagaggctggcacttcataaaacctctcagtaagtgaatactgttgttgtgatgatttgccattaccctgtgtcttcartagtcactgatccagatggcttggcttctccttttaagatgtttgtattctctgtacctcacaggtcagcaagtcctgggcttggtggagaaccagagtgactggtaccttggaaacctgtggaaaaatcaccgcccatggccagcccttggaagaggctacaacacaggtaaatcctcagggtggtatgggaagagttgcagaaggtgatatgaggayccagtgctccttccgcaggagaggagatkgcaaaagctcaggaggaggccacctgattgcttgaattcagtggtggatggtttgtgggcagtttgcattccagttccttcttggtgctwtacccacaggtagagtaaccgttgggctgtggcagtctgtggcatctcaccagaaagcccctctcctgacctctaatccagatcctattggatatctttatcagtatgacccataggttccctggctctgttaatacagaccagatatcattcttcagtaacaaccccatttcagtttcttaacacaayggatatgtacttttgccaatcacattccacgtccacttgaggtcttcagggatctgtgttcactgtgggtactcaggattcatctccatgcatacttccatgtatgtggtgggaaagtagcagaagttgtattatctcttaaagtttttgtttagaagtgacgtaatttcatatttcattgactaagcatgttgtgtggccatgcctccctttaaagcgtgtgggcaagtgcagtctaccatgtgcctggcaggagaaaaagcagawatatttgctaatcagcacttttgaggaccacatgtgcctggcaggagaaaatgcagaaatatttggtaatcagcacttttgaggaccacagacctataaccatgtgtctaaaataaaatccattattctacctcgttactagcccaaacttgcatctcctcttcagtttctttctctgttattggtgtccttcattcatccatcaacccttcttgttcaccagctgtcccttgaatgcttactgtgtacgaggccctatgctagctgcagcagacacagtccatgacctcatggggtgtataagcaatgaaactagggcagcctcttcctcctgaggctcaattcccatcagtgtctatctttgacatgcttctggatccttctgcctccctcctccatcytcattgccactgctrtggtatcccattctcaaaggatgcagactcctgatctttgtcagactagaatgtggaactcagggaacagtaggatgggtgagaccaagaagggctggaacttggcatctgagaccagcaaatgaagtgggttgggacaggtgtctggctctggggacagtaccacctaaaagtgataagtgaagcctgccctggaggctgaggccagtctgtagtgggatcagccaaaaagagtcccaaattctgagagctgatggtcagactccagaaaagtcaaatgcaaacacagggtcccagagaacaaaggagaagggacatgagtcaagcttccagaggtaagagttcacagatggggtcagagtgggggtcaaagctagaggaggacaaggaaagaaagtccagcatcaatgtccagaggtggcaggcagccagggagccctgtattgacggccatcctaagagacggggacattccttagctaacatttgcctgagtattagatatgccttgctctatgtaattttttttttcctgtaaygcctaccaggcaaacagaggttgtgattgaagaatgtcaaccaccagcccttcacagactccagattcccaccctggagtctcccatgctgtgttgggcattaatactttagttgctggatgatggggaagtctgaggagttcctgagaggggccaggttggggaaaggcagctgagggcatcagagcagtggttctcttagcaggtcaggaggtatttcactcttttcaataatgggtaaggcmgggcctctacgtatcagctgagtattagccaggcaccatgttaggtgctttatggttgtcagtctcctttgatcctcacactcatcctatgaggcaggtgccatgcctataccagaagaaactagtctataccagaggaaactgaagattggagcatcgaaggctgcaaccctgaaaagtcaaggagcctgtggtgttaactaccaacctgccttgcttgaactttaatggcttcaggattaaacacttttcaacaatggagaattctgggctctgcccttcaagagtctgattgactaggtctgtgcaggagactgggattctgtcctataggaagcctctaggatgtttctggggcagaatgtccaagggcctgctctgattaaacatggcactctgtttcctgtcccagcaagctctcccagacgctgttttctcagtgcattggagactggaccctccatgaacccacagcgggccagggacgggggttccacgtgctttcctctggcaaacgactagtcaccccgtgttgatcttttgtgcctggattttcagacacgttccctccaagctttcatggaggtggagacacctatgtttctgggtggagaaaggaagtctcaggaaaaccctggtgtatacatttcgtttctgtcttccaaaatatrtaatagaaaatgtcacatagaaatatactgcagtgcctcagggatgctgcatcaagatcacggtttcctgcgtaaaacaaaagccgctggtcatcaatccgggtttgcagagagaagaagaatgtagcacactagggaatttattacaaccaaaatggcatgtctcttcctgcccttccctatttgctatagaatgtagcatcaggagacacaggagcacgtaaaccacctccagttcccgcttgatttgtcaaagcagtgagttacttccctcctcgctggtactgaaagggcagagcagaagagggaaagccctgttgaagtgatgtgtccatttaaataagccagtgacactgagtgattattatgaaaggacttaggcaacatcaaaatgcaaaaaaatggctttcacgaaggggatgtgtcgctttaaaaccaaggattgtgccacccagtgaatgagtcatccagacatgtagattctcatggaaactgaggacgaccctggagagaacctgccaccctaaatcccagcacatctgaagcctccaaaaagaatatctccagcagaacctcctgtcttatgccttcagcttgatgttaggaactcaggcagatctgggttagagctgcagtacagtcatttagtcttcttatgcaacttggccaagtcacttcactccttgaacctcagttctctcttttttttttttttttttgtttctttttttttgagacagagtctcgctctttcgcccaggctggagtgcagtggcgcaatctcggctcactgcaagctctgcctcccgggttcacgccattctcctgcctcagcctcccgaatagctgggactacaggcgcccaccaccacgcccggctaattttttttttttttttttttttagtagtgacggggtttcaccacgttagccagaatggtctcgatctcctgacctcatgatccacccgcctcagcctcccaaagtgctgggattacaggcatgagccaccgtgcccagcagttctctctcttttttaagataggacaaggccaggcacggtggctcacgcctgtaatctcagcactttgggaggccgaggtgggtggatcacgaggtcaggagttgaagaccagcctggccaagatggtgaaaccccatctctactaaaaatacaaaaaattagctgggcatggtggtgggtgcctgtaatcccagctactcgggaggctgaggcagagaattgcttaacccaggaggtggaggttgcagtgagccgagatcatgccactgcactccagctgggcgacagactgagactctgtctcaaaaaaaaaaaaaaaagacataacaaacctagtatgtgaggattagcaattaatgttgtaacttgtttaatgagcctagcctgatccagggcacaaagtaagtacttagtaartcttggtctttctcctcttgcatttttctgccacttgctctatcagggaatgagatttaccgactggaaaaaggaggttatgtgattgactggggtttgctaaggtctcccaagccctttggtcagaaagaacgagtaagtattttactttccccaggtgtaatccagctacctagcagtttttcctgtatctctttactatctgaaaaggttagctttttatatcacattaggaaaaaaaatgactatttagttcgcatatcagcttcctcgctgtgttttactttgaaaatccccagaaaagcatatgagatgtttgtgttggaagctctgccttcaagacctggcgttgttgcttttgagttctgtgccttttggaaagcttacccaagctcagggagccttgggcttctcatttatgaactggggacctcagaacccactcggaggctctgttgtggtggcgcagccacgtgtgcctggggtaaaccaaagtactttagcaagttggttgtgatttttatttatccccctaaccatagcccaactgaataactcttttcagctaattcagattcaaccgcagacatcaaacacagcctcttcactacacattcattcattgactcatcccaccaggcatcataccaggcaccatagcgtgcatgggctttgttaattccttgaattatcttataaactagacttttccccctacaagagtcagtcagtttcccccgttctctttgtttgmttttctttcccagtctgcttttccaaagcctacatggccacaaarcattagagaagatctttccaccatctcccattcatctccttccctttttactagagctgttcccaacttaattccagaagctactgagccaccgcagcttcggatggataaccaggcagatcctagcatgaagctcttgcccataactgttcgggtgaaattacaggcgtctttcacagtcttgcacagaaacgggtcagtttccaaccgctctgcccaggcatcatctcctagatgcaagaagctgtcattcacccagcattcagctgtgagcaggacttagaaaacaacaacaaaaatacacctaggattttgacaggctcattaagattcagctctcttcagttcctaagctgacggatgaatatcttaaaaacaaacaacagcaaagaaaaggggaaggagggctaaacatagcaggggattggagaatgaggtgagggaaggcaggtcggtagaaagaagatggcatgtttgcagataggtttatttgcatgggaccccaaaggcgactcaagcacaaggtgcgtcctccccaagttgaagggtgtaacactagccagagaatgtgctttttaaaacaatttaaaaataaaatgtatcgtgtttcattcagcccccaaattagggcagagacaggcagatggagacctggctgtttagggagggaggaagaatttctctcggaatccttctctgcaggacaacaaaattggaatgctcaaggactggctcacctctgaggttagagcaaaccgtggaaggcaatgggcagtacagtcagataccatggaaaattctgtggcagagattcaaaaggagaaaacatttgatagtttgccaaagaactgttaaatagctttagtgggataaatagaaatatgcaatctaggctcaacttacctctgcctctgacatccagcattctgggaccctggctaagtcccttcatttctctgcatcttaattgtctctgatgtcaggaactaagatctcttcgtgttctgaaagaatactgtgattgggtgatttctgtctgtaataattgcatccagagaagctatatttaaatayaatttattcattcattacatgctactgaatacctataatactggcaagggtagggtagaaaactgttttgttttgttttttaaatgggtgataccaagaaccttccttcaaaaagtttatcgtctaatagagaagcgtttgcatatctgcaaataaagttaatatgacttgagcctcttccatgattgagatccagaattgatcatcagccctgcagtaataacccctagactagcgttttctagactaattccagaggtcactgcaagggatgtgaatatgtgtttagaaattgtgaacagaggccaggtgcggtggctcacacctgtaatcccagcactttaggaggccgaagcgggtggatcacaaggtcaggaaatcgagaccatcctggctaacatggtgaaaccctgtctctactaaaaatacaaaataaataaataaattagccggtcatggtggcacgtgcctgtagtcccagctactcaggaggctgaggcaagagaatcgcttgaacctagaaggcggaggttgcagtgagccgagatcgtgcctgcatactgtgtctgccctttggagattcatatgtgcatgttagagatcttataaagtctggaagtaaagaaagctattacacccagaagcatttcccagttttacttgatcctagagctacggaaataaattagggacaaactgcctgtagatggagtctgtagaataatcccactgaaagatgtgtgctattctaagaacagttcttctgacatcgtgctcaatagaaatgtctactccctactttcttttgtactgtaggttctcattcatctttctgctgcaaggatgtagacactgtcttaggtgctataacagatgtcccatagactgggtggcttaactacaaacatttctcacagttctggagcctgggaagtctaagatcaaggtacccagccattctagtgtgtggtgaggacttactttcttgtttgcacatggacaccttctcattgtatcctgacatggcagagagcagggaaagaaaatattctgtctgtatatcctctttttttgtttttgtttttttgagacagagtcttgctctgtcacccaggctgaagtgcaatggcaatatctcggctcactgcaacctccacctcccgggttcaagcgattctcctgcctcagcctcctgagtagctgggattacaggcacacgccaccacacctggctaatttttgtatttttagtggaggtgaggtttcaccacgttgatcaggctggtcttgaactcctaacctcatgatccacccgtttccrcctcccaaagtgctgggattacaggcgtgagctgccgcgcccagccttgtgtctcttcttacaaggkcattaatcacattaatgaagtccctaccttcatgaccctaattacttcccaaaggccccaccttctaatactgtctcattaggaattaggattttaaagtattttattttattttttgagatagggtcttgctctgtcagtcaggctggagtacagtggcgcagacacagctcgctgcagcctcgacctcctaggctcaagcagaccttgcaggctcaagcgatcctctcacctcagcctccagagtagcttggactacagctgtgcacccccaccctaggctcattttcttattttttatatagayagggtctcactttgttgctcaggctggtctcgaatcctgagctcaagcaatcctcccacctctgcttcccaaagtgctaggattacaggtrtgagccactatgcctggacgggtttaggactttaatgtgtgaatttgggggagatatgacattcagtccattgcaggtaccatatcattgcacctgcttaatcactctgctgtgtgtcattgcataactgaagcgagcatccttccaaaaccttctgtccataggtaggaattctgtgagagatggcttctacaccttytccaatcctgattggttgaccacctttagatagctccactttttctctttggaagtgacactctgacctgaatgatatgcagtggccattatcmaacaattgaaggttcacacctccacctgtaaacttccgctcactgttctgaatcacttaaaattcctgtttaaaatgtcaacctcagggccctgcccccagagaaagtgaatctcaatgtctagagatgaggctgggtgactgttcttttaaacatgctccctacttgattccgatggttacttaagtttgagaaccagtacctaggcctctgatgatgtacttttactgccacattgcacttctagctcaaattgaacttgagttcaactgagaagctccatgaatgacttttcagccaaatgctcccctttctgtacttctgtagtagccttattgagtctaaagtacagattttatattggtctagtgagttttatcttctttggaccattcttttcatcattttattagatttcatattagggtatccacaaaaatactaaaaatgccttctgttccttcacccagtgtccttgccccatatttgtaacaaatgttttgaatgcctcttttataatcctggaatgaaattcaaggattacatctatattatattgcctacaagtgtaattttttttttttttttttgagacagaatctcacagcagagcccaggctggagggcagtggtgcaatctctgctcactgcaaccttcgtctccggggttcaagccattcccgcgcctcagcctcctgagtagctgggattacaggcgcacaccaccatgcccagctaatttatgtattttttttaatagagacggggtttcactgtgttggccaggctggtctcatactcctgacctcaagtgatcygcccacctcagcctcccaaagtgctgggattacaggcgtgagccaccgtgcccagccataattataatttttttaaagaaaattaatatagtgccctggctttaatataaagagtaaataaaataaaattattataaaataatatttacttcaacgtgtaatggtcaggtttggctatagtaaatgacctaataaagtggtcagatgcttctgtgcctgtatttgggatagaactgtcttcactgtgacgcctacgagtgctgaatggtactgatacattaccagcactcggcatttcatgagtggggtttgccaaatttgtggtacatttttccaaagtagtgaacaactcttggtaaagtatcagataacaggaagtaccatcttcgcttgacttgttctccaagttcagtgactattcaaaccatgcaaaaaaaaaaaaatggttttaaaaaatatcccgtaagtagtgttagttccaggctcaaatattgatagggtttggatctgtttccctgcccaaatctcatgttgaattgtaatccccagtgtttaggtggggcctggtgggaagtgattggatcatgggggtggatttctcatgaatggtttagcaccatcaccttggtgccgttctcatgatagtgagtgagttctcatgagatctggttgtttaaaagtgtgtatggccgggcgcagaggatcatgaggtcaggagttcgagaccagcctggccaacatggtgaaaccccatctctactaaagatacaaaaaattagccaggcgtggtggcatgcacctgtgatcccaaccactcggaaggtggaggcagtacaatctcttaaaccaaggagttggaggttgcagtgagcggagatcatgccattgtactccagcctgggtaacagagcaagattccatctcaaaaaaaaaaaaaaaaagtgtgtagcacttccaagctcgttctctgtctcctgctcctgctctggccatgtgaggtacctgctccccctttgccttctgccatgattggaagcttcctgaggcctccccagaagctgagcagatgccagcaccatacttcttgtaaagcctgcagaaccgtgagccaatgaaatgacttttctttataaattacccagtcttgggtatttccctgtagcaacacgagaacagactaacacagatacttaacaattatgtgtaattataaacatgaacggcctgtggtacccacatgttatgtgggtgcatttttcattgtgctggacactcctgggaaggagcactgcctgctttgaaagtcgaaggttggaggtgttgccagtgttcaacaggctggctggatgcaaagctgtgctgtgtttaaaatccttcctggggttggcagcaatgagtaagataatgctccttgctcacagagagtagtcggccagctgaaagcctgcttggcagtactgccatgggctacttctctccacttaacctttatccaaattcagtgacccaaccaaagcttattcactttgtatcctgatccagaatcttctttggcctcaggtctgcctcctggattcacagagaataaacctactccctcttccacctgcttacccccagaaatctaactgaaagaaagcagacaatgccttctcatcttgccttctgtagtcctggcaccctggtttcctcaggaattcctatatgtcacttagtctctgagcaccagttcactcatatgtgagttgaggatggttatagtaagtaccatagaaaggattgttctgaaaagtaaatgagataatagagtacatttaatgtgatgagacaaggtttagcacatagtaaatgctcagtaaatgtaggcatagttaccttgttttttaagaggcagacggagggcctgcastatgtctggcctcttgccttattggtcaacctgggatcctatagctcatattttatttttgctattaagagactgtattgcttgtattctggagttgaacagtctttggtccaagtcccacctccacctgttactagctcccttattctggggaatgaacaactttttcatttcaggataaaaagaattcatatttcacacagatgccttcaggagaaaaggagttaatgttttcaaagtgcatgggacagtgtctgggtcaataaatgttagatattagtattttcccactcctttattgattgattgattgattgattgattgattttattttattttttattttttgaaacagaggctcactctgtcgcccaaggctggagtgcagtggcgtgatctctgctcactgcaacctccacctcctgggttcaagcaactttcctacctcagcctcccaagtacctgggactacaggcatgcatcaccacacctggctaattttttgtatttttggtagagatggggtttcaccatgttggccgggctggtctcgaactcctgacctcaggtgattcacccccctcggcctcccaaactgctgagattacaggcatgagccaccgcgcccagccttccttttcctttaatactcgaagtacgtaaatggggaaagaggattacgtctgtgtcttttgacagtaactccgtcttttgcccaggtaaggtatttggagctgagcattctcccagggctgaccatccacgtgttcattcatttgttggacagaaattaaacatgcatctagcacatgcaatgtgccaagcttctctgtaggccctggggtgccacagtgaacaagacaaatgggaaccctgtttacagggaggttactggttattgtgggggagaaactgtcttccttcttgtgcttttttgatgtcgtttcctggaagtgttccccacactcgctccactccagccactctggcttccttgctgctctttgaacacacctatttaaatgtgagcctctctgcctccaaactacagcctccatgctattccgttttccaccttattctcctccagcacttttaagtaccatctgaccaactacagtttggttcattttcttttaatttccctgtgtctttccatgaggatataagttcctcaaaggtagtaatttttttctgtcaatttcactgctgtctatggccataccaccctgaatgcacccaatctcatctgaatttcactgctttatcccccatacctggaatcatgcctggcctgtattrggcactaagtatttgttgttgaataaaataaataattttggaagataagtgtttcgaagacagtgatatagagcagcatttctcatggttgctcgtgggaaattttacaacccatgggacaccggcaatgtctggagacatttttcttgtcacagccaggaggttctacgggcacttagtgggtagaggccagggatgccactagtacaccagacagtccccccataacaaagattcatctgggtcaggtgcagtggctcatgcctataatctcagcactttgggaggccaaagtgagtggatcacttgaggtcaggagttcgagaccagcctggccaacatggtgaaaccccacctctactataaacacaaaaattagctgggtgtgatggtggtaggcgcctgtaatcccagctatttgggaggctgaggcacgagaatcgctcggacccaggaggcagaggctgcagtgagctgagatcgtgccactacacttcagcctgggcaatagagcgagactccatctcaaaacaaacaaacaaaaaacaacaacaacaacaacaaaaaacaaagattcatctggccacaaataccactagtggaaccctmacagaaaagcaagttttgagggaattggattcttctagaaaggaccgtttctttgggtagagtctctgagaagacgacatttgagctaagacctgaaggatggaaaggcggcagccatgctgagagctggaatgagcatcccagatagagaggacggcacgtgcraaggccaccaagcaggcgtgtacttgggtgatcgtgtttccctctcatgatcatggccctcatcattcctggcactgcaccctctgctcttgtcacctttatctagtaatgcatgagtggttgatatggtcaggccctgtgtctccacccagatctcatcttgaattgtaatccccatgtgtcaaaggaggaacctgatgggaggcaattgcattatgggggtggttcccctatgctgtacttgtgatagtgagttctcctgagatctgaggtttttyaaggtggcgatttttcctgtgcttgcaactggacttctctcttgcctgccaccatgtaagacgtgcctgcttccctttccaccatgattgtaagtttcctgaggcctccccagccatgcggaactgcgagtcaattaaacctcttttcttcataaattacccagtctcgggaatgtctttatagcagggtgaggatggactaatacaatgggattcttcaggtgttcagaccccaagtgccctcgctttcttccctccatgccctctggactctctgactcgtactaacacactttggaaccatgatgtggtcctgttgacctgcctgtgccccaaggttcctgaagatcaccactagcacagagtgaataatggcaaaattcagcctcataggatgggagccggcctgggctggctttgtccagttgtccgtatccacagcccctcctcttccctgctcactccagccgcctccctccagccactctggccccctggctgttgcccaggcacattctcacccctgcaatctgagctctttgcctggaccgctcttctgctagcagctctctggcttatcccattacttcctcagtccttggatcaggtgtcatctcctcagagtgggcttccctagccatcctattcaaagcggcagtctccatccctttactctgatttatatttcttctttgcactttccatccatgttataaaatatgtttttgattatttgactgctgtccatcacagtaggcagaatcccccacccccatcctagtatccaggctctaagccctggaacctgtggatatgttatgtcccatggcaaaagagactttgcagctataattatgggcttcaacatagggagtttatcttggattatctggtgggcccrttctaatcacatgagcctgtaaaagcagagaatttctggccggctgcagtggctcacgactgtaatcccagcactttgggaggccgaggcgggtggatcacaaggtcaggagattgagaccatcctggctaacacggtgaaacctcgtctctactaaaaatacaaacaattagccaggcatggtggcacatgcctgtagtcccagctacttgagaggctgaggcaggagaattgcttgaacccgggaggtggaggttgcagtgagctgagattgtgccagtgcactccagcctgggcgacagagcgagactctgtctcaaaaaaaagagcagagaatttcctccacctagatgtagaagagatagagtcaaaggggaagtcacagaaacttgaagtaggagaaggactcaacctgccattgctggtttgaaatggaggaaacaataggacaaggagttgcagatggtcgttagatgctgagagtggctcccatttgattgagaaagggcgtggggacctccgtcctacatagaactgaattctgccaacaacctggatgagcttagaagtggtttctccccgagagccccgggcaagagccctggatggctgcaccttgactttggtcttgcaagactctaatcagaagacccacctgagcccccaagatttctcacctacttaactgtgaaataataagggtgtggattttaagtggccaaagtattttgttatggctgcaatagaaagctaatatccctgtccttcccacaagaatgaaagttccatgagagtaagatcttgttttctttgttcctatgtccctatctggtgtgtgaaaagctctcaataaatatttgttgactgagtaaatgaattctacactcccacctgcatttctccccagagggcagggaacacactggtgattagaaatggagaaggggcttgaaaagccactggtgggaaacattccatattcctaggtcctgccggctgcccatttagtaggcagttgtccagcagatactaggtgcctggaatcatgattggcattaggagtagaaattaaaaagaaaggctgggcacggtggctcacgcctgtaatcccagcattttgggaggccgaggcaggcggatcacgaggtcaagagatagagagcatcctggccaacatggtgaaaccccatctctagtaaaaatacaaaaattagctgggcgtggtgacacacgcctgtagtcccagctactcrggaggctgaagcaggagaatcgcttgaacccgggaggcggaggttgcagtgagctgagatcacaccactgcactccagcctggtgacacagcgagactctgtctcaaaaaaaaaaaaaaaaaaaagtccgggcgtggtgcctcacacctgtaatcccagcactttgggaggccaaggccttggtagcagatcacaaggtcaggagttcaagaccagcctgaccaacatagtgaaaccccatctctactaaaaatacaaaaaattagccgggctggtggcgggtgcctgtaatcccagctactctagaagctgaggtaagaaaatcgcctgaacccaggagttggaggttgcagtgagccgagatcgcacctttgtactccargctgggcgacaatgcgagactccgtctcaaaaaaaaagaaagtaaaaaagaaaatgggtgtctacttgcaccaccattgcctcccccgccccccaaaaaaaacacacaaaacactagakgacccacatagagccaaaaatcagaagattaaggacagtgaaatgcaatgtggcctgcactatgatggaggagtctgtacacaattccgagagctagagtggaggcctgcacgggtgggtggagaaaagcttcaaagtgggtagaactggaagtgggggatggtggcatggactttgcagagcttgctgttcaacagagcagcaagcccccagcccaggttggaaggtgtgaaaatacttgggatggccagagcagcacacacggtggtttttagtttcactgaaggtgcagcttgtagggtatgtgcccaatgtaggaggagcagggaggagctcaagctctgtctcacccttgactagctgaatggtcttgggcaaatccctttgtcacattttgggtttttatggtctgactttcctcacctagaagatgggagcatcagtgtagactcacgagattggcagaaaaaatggcatgaatgggaaatagctggcacaaagtaaatgctcagcaagtgatagctaagattcgtggtgcagccacagggagtatgggacaagaggctcctgtcatgtcgaggctgggaatcagggaggtctaaggtctgaacggtaaccaggcagttcagccttatccagcaagctggaaggttcttaaacaatacagtttcccgcctggccctcaggagaaaccgccctcacccaccatcctcttccctcttgattgtctccatttatgtcttgaccctgagccaagtgttcatctctcagggctgtggctgcagcctgttgaaacatatgcagaagctcccatccacaggcccagggcactaaagtcaycgcagtgccttcagccttgctacattctctgcagtaccctagcaaggcagccaagcgagagccccctcctatgagacttggtgggggctctaattaaactgagcagctagagagttttcccagctgcatcctgaaaagatggcaagatttcccatcgcttgccttcctgagcaaaagccactgttctagaagagttgctctaccattgcttcctcccttcctggagcaccagccctcacaggagagaatatgtatgcaatgtaaggcttccaggatctggcctgaagtgcaagaaatctgtttccccagcttctctcactctgagactttttctcctgagctatttttcttataaatgattctatttccaggttagctctggcaacaccactccatggttttcctctctctttgctaattacatcacagagctactgcatgctgattagaaggaaaataaagcaaaaacaaaacaacgcctccacctgagctgggcctcccctgcagttgtctgtgaactggagcatctgcctttgtgcagctgggctgcagggtgctgggtgctcctcctgacttgccctttattgctcatgcatcctgacctgaagatactcaagccacctctccacaccccaggatcctcttgtttgaatcgaaaaaaataacactgtcttagtccattctggctgctataacaaaataacattaaccaggtggcttataaacaacataaatgtatttctcacagttctggaggctgggaagtccaagatcaaggtagatttggtgtctgctgaggagtcactttctgattcatagatgacaccttctaactgtgccttcacatggtgaaagggatgagctagctctctggggtctcttttataagggcacaaatcccattcttgaggactgcacactcatgacctagtcacctcacaaagactccaactccccaataccatcctcttggagattaggatttcaacatatggattttgaggggacacagacacttagaccagagcacatgcctggaaacggaagcaatatccctcatgatcttgttgataagataaaaggctacagatgccatagagctatgacattatcagcagctgcattttcttagcatctgaacatgagttgccaatcctagtcaacccctttgttagctacgtcctacccacttgctctcagcttatctttagccatttctcattgtatctgcagccctcaaccttttctccccaaggcctatggcacacacccttttattgttgttgttattgttaactatagcagatttccagttatattttctgttatatttcatataacagaaacttttacctattaagaaataattcatttctcccttcccctagtccctggcaatcatgattctattctttgcctctattagtttgaccattttaaatatctcatatgagcagaatcatgcagtattttgtacttctgtgaatggcttatttcacttggcgtaatggaaccctttaaacactgtttttgggaatgtattatagaatgatgcggccactatggaaaacagtatggcggttcctccaaaaattaaaaatagaattaccatatgatccagcaatcccactcctgggtatatatccaaaagaattgagatcagagtctcaaagcagtatctgtacccccatgtttattccaacattattcacaataggcaagatattgtaacaccccacatgtccattaatagaagaatgggtaaagaaaatgtggtgtattcatgcaatggaatattattcagccttaaaaagaaggaaatcttgccctctgtgacaacatggatggcatgcacccttcatgaatgggggctcactatgccttgtgttcaagagggcagtgggcagttttaaaaagcccccagtaggccgggtgcggtgggtcacacctgtaatcccagcactttgggaggccgaggcgggcagatcacaaggtcaggagttcaagaccagcctggccagcatggtgaaaccccatctctactaaaaatacaaaaaaattagccgggcatggtggcacacacctgtagtcccgggtactcaggaggctgaggcaggagaattgcttgaattgggcaggcagaggttgcagtgagccaagatctcgccactgcactccagtctgggcgacagagcaagactccttctaaaaataataataataataaaataaaataaaaagcccccartaatgatgcctatgtcagagtgtttcgggggagaggtagggatatcatatggcatatatataaaatatatgtaggaaaaatttgtattctggcatatagcaggcatttaataaactgtggctctttttgcagaatgtgccacacaataggtaggagtagaagttaaaaattattataccactctttcagaaagagtggttcagttgctttaaaactccactatagacattgccagttactagtgaatctgtgagattctggttctagattactgccaaaggataggattttttttttattttagactattttttaaaagaattttgacaactcatattcacatttgttataaaggacaaaaatagtctagaaatgcagtgatgtgctagggtcctagctcacatctgctagtgaaagcctattgttaaatttttaggaaatatgggatccagttgttaaacatagccactattaaaaatcaaggccgggcacggtggctcacgcctgtaatcccagcactttgggaggccaaggcgggtagatcacctgaggccaagatatcgagaccagcctggccaacatggtgaaacgctgtctctactaaaaatgcaaaaattaccccagcatggggtcacatgcctgtagtcgcagctactcgggaggctgaggcaggagaattgcttgaaccagcaaggtagaggttgcagtgagctgagattgcatcactgcactccagcctgggcgacacagcaagactccatctcaaaaataaataaatacataaaataaaataaaaatcagattatgtaaacttacaatgaaatatgtcatttgaaaaacaaaggtaacaaatactcaaaactcttaaaacttgttaattcctaatcactttactctctgtgcttctaaggttgtttgcgtctgccatgtctgtatggcgggaatgccatgcagtggggtcgtgctgcacatcccttcataaccgttcagtagcattgcattggtagcttgaaatctgccatggtgggactattgcaacctggaaatgggaaaacactaccatcaggggatttctttctttctgaagagtcagttgttgaacatttaccagcattgctgaaatataataataataaatatatatatatatatgactttgagatggagtctcactcttgtcacccaggatagagtgcaatggtgcgatcttggctcactgcaacctccgcctcccgggttcaagcaattctcttgcctcagcctctcgagtagctgggactacaagcgcgtgccaccacgcctggctaatttttgtacttttagtagagacgggattttgccatgttggccaggctggtctcgaactcctgacctcaagtgatctgcccgcctcagcctcccaaagtgctgggattacaggcgtgagccaccgtgcccggccaataatatatatttttcacattccctgaaagtaagtactgttgacagtttgcagtcttgacttctgctttccacatatgtaattatctatttctctgtatatatgcatattctttttgaatagacttgtttacttaaaaataaaatattgggtgtcttctacattaatacaatggtgtattttctttcttgttaagaactgcatagttttgccatttgatggaggtgctataattcgtttattccattttttatgagttggtattttagctgtacctaggttttcccctcaattataaacaataccatacatagatattctcattacccatgtttgtttgtttgtttgcttrtgcaagtattggtacacaatagctcctaagctattctggtactgctatattaaatgttatggatattttaaattctgatagatcaaaatttaaatttgccaaatgtgtcagtttacaatcgagataaaattttaaattaaacagatgtgtgcatgtttatgtatgcatgtgatttgcttgtttgttttctgtgttaggcacacagtctgtgtatttgcaaagaatcagtattttgccaaggagctacttcataggaacccaacttgagctttttcaatttaggcagatgatctctgactaaaaggtccaggtgtttgaagccatggatcgttgaccagtggccaagtgaaacagagacatttccttgctgtggctaactctgcctggctgcagcattccaacacctggataagtgagttgacctggcttagtatttacacgggggtggccgttcctgaaaatgtgtctgccctactctgctgacccatacaaggtcaggggttttctctgtcactcactcaggtctttagcattgcaagagctaacaggagttacgacccaagcatccagacacctgtatggttcagtgtgcagtagaagggaaagaaggaaggatatgatcctaaatcttcctgacttaaggaaaataatctggccatcattcagaacgtggtttccttgaagacacatttgtgatgggaagaggcacttgatttctctggggcctctcaggttcacagtactaattgcttagatttgattcatgctttcacgtgcaccagctcatataattcccattctacagaggaagctgatggaggctcagcaaggttcgttgattttgcaagttagcagagccagtaaatgtcagagcccagtgcttaagcctaccttgcaatctctttctgggccttcagtgcttgagagtggttggtagagcagtatatgagtccattctcacactgctataaaaaaaaaatacctgagactgggtaatttataaaggaaagaggattaactgactcacagttccacatggctggggaggcgtcaggaaacttataatcatggtgggagatgaaggggaagcaaggaycttcttcacatggcagcaggagagagaagactgagcatcaaagggggaagagccccttataaaaccatcagatctcgtgagaactcactcactgtcacgagaacagcatggaggaaaccgccccccgcccccatgattcagtcacctcccatcatatctctccctaggcatgtggggattatggggattacaattcaagatgcgatttggctggggacacagccaaaccatatcaagcagttacttagctctggggatttttctagctccctccccagtctataggttagagagctatggaccgtcataacaacgtcgtgctgtctactaaatttacagtagtacttgccatcatggctgcatgttggaatcacctgggagatttgaaataatcctggcatcccagggcttatctcagaccacttaaattagaacctctagggtgagactcttccttcagtagttcgtaaaaccaagcaggtgatccctatatactggacaggcatgtcctcctttccttccaaagcctgcattataaagacaccatttgtaatgtagccactctgtacctgctttccctcttcattacctataccctatttttctagccatcactgaactcctagactccatagctgcttgaatttgtggacattcaaccaagatttcttatctttttttttttttttttttgagatggagtctcactctgtcgcccaggctggagtgcagtggcatgatcttggctcactgcaacctctgcctcccaggttcaagtgattctcctgcctcagcctcccaagtagctgggactaaaggcgtgtgccaccacacctagctaattttttgtatttttagtagagatggggtttcattgtgttagccaggatagtctcaatctcctgaccttgtgatccacccacctcagcctccccaagtggatttcgttttattattattattaactgtgcataatgtcacaccccatgctggactctggggatgcttcagtgggtaaaagaatcctagcctcagactgctgactgtcaagtaacagctacagacacaagccatttggatgcagaagtgccctgatggagaaagcccttagacaactgggaaaaggggacaggcagtgatgtaccatcagtggcttatttacatccctattgttgcctggatcctgacctgctatactatgctttcccctggggctgccagtgacatcacatagagaaagagaccagcctcctcctcctccttccgtctcagggtaagctgttccctgtcatccaccattatgcttcaatagcccctccttgtccccctgagcccttgcctgccgcatctcctttattgcatatttgacatttcaccacagcagatcagatgtatttgaatcagaatggcacacagggcccctgaattggttggcagagccctatgggactgctccaagtgaagggaatctccatgaagacaattatccaagagaaatagcctatctcagcaggcatcgttctgctttgcttattgagccaacatttatgaagcatagacttcataccgagctcaatgcaaacagactcacctctagcaaggctcaagggaggcaacaaaagaaatagaaaacacggcccttgtcaacaaacctaggattaagttggagtggccgggcgaatatactgaggaaacattggttttcttttttaacccttttcgaagtctatttaatrtctgcctactgaatatttaattattaacaacaggagttgaccccccctggccatttttgtatgtcccacgctgggtttttccattttcagatagttaaggcaaaaagaaaaaaaaaaaaaaagacaagtctattttgtggcacatgaaaatcatatgaaattctaattgcagtgtccattaataaaagttttgtgggctcacagccacagcattcatttttattttgtctatggctgtatgaaagttgtcaggatcaagatggaatcactaatattagaaaaccctgataaatrggggaaggccacgaagacatgattctcacacttatatgcctsataatgaaacagactctacaaaaaacacagccttgcacaaacacctcacgaccttacacaaaaacatgtgtgcaaggacatctgcctctccaacctcggaccagtgtcatccttatcattgatctttgtagccaaagataattactcaaaacaattatgtactcctccttattttttcctttaaaaatgtttatctttggctgggctttgtggctcaagcctgtaatcccagcactttgggggccgaggcgggtagatcacctgaggtcaggagatcgagaccatcctggccaacatggcaaaaccccgtctttgttaaaaatacaaaaaaaaattagctgggcgtggtgttgcacgcctgtaatcccagctacttaggaggctgaggcaggagaacctcttgaacccaggaggcagaggttgcagtgagccgagatcgygccactgcactccagcctgggcgacagaaaaagactccgtctcaaaaaaaaaaaaaaaaagtttatcttccttaccaccctgaatgcatgcagactttactatgacatgtgtattcccattacaatatttaattcccaaataaacgtattttcttttacagagtgtctctctgcttattatttagattgacagctgctttgaggctgcaaagacagaaattaagtagttgcaacagagtccttttcgcttccaaagccaaagatacatacttattggccctttcagaaaaaatttgctgaccgaggtccacagcatagcagaaagcatggtctcgggagcagacttgggttaggatcttgcctgcaccagttagctttccacatctagtgaataggaataataacatgttcttaataggctgagattgaataaagccactgtaaaggaaacataaaccccagttatttagaactagtattgatgcctagtaaatattggttaccttcacccaccttaattatatacaaatataatttcctatataggcacaaaaagaaagatagaattacctgaggctaatcctactctcaactggaaagatatgcacaagaaatagagggaaagggaatgagactaatacattcattggatactttataatagcagagtcttcttactcttgttcaatcctttattccccagcagttagagctgtcctgctgggcacagtggtgcacacctatagttcccgctacttgggaggctgagtcaagagaatctctggagcccaagagttcaaaactgtagtgtgcgatgatcgtgcttgtgaatagccactgcactccagcctgctcaacatagtaagacccagtctctaaaaaagtaataatagagtggtccctggcatatggtataggcatagagttcagtatatattatatgcattttcagccaggcgtggtggctcatgcctgtaatcccagtactttgggaggctgaggtgagtggatcacctgaggtcaagagttcaaaaccagcctggccaacatggtgaaaccccgtctctgctaaaaatataaaaatttgctgggcgtggtggcgggtgcctgtaatcccagctccttgggaggctgaagcaggagaatcgcctgaacctgggaggtggaggttgcagtgagccaagatcgtgccattgcactccagcctgggtgacaaaggcgaaactccttctcaaaaaataaataaataaatgcattttcacattcagccctcttaataattgatatagttgtcaaacattttacttatggagtcatcatcaggatgaggccccaaattccactcctccacacaccaccacacagccctgggcatgccaacttctctgtgccagtgttcacacctgaaaatgcggataatgggaaaacgtgtggcagagggtcgtctcgaagactgaatgagatctaaagtgtgctagatacctctgcaacccaaaagagggaagggcagacaaacagtgagggtgtgtgcgttcaagtcaaaacatggatgtttcatcacacaggcttctttgaactctgtctcggtgtggtagtaagcaggaaatcctgcaagctctcaagacggagaggataggagaaaaatcccaagatgcaaatcgggcagaggtcattgtttaaggagcagctttgtgggtcggatctcaagggatgggactgcgcagaatgttggacagaatggggaagggaagacctgcaggtggagggggcacgccaggctgtggaatgggtgtggccaggcaagtctgggtatacacggcgggaagagccgtggtcatagaggaagccttactactggacttcagagaagaatggagtcaccactcacttgctttaggtctggagacctaatgagaatgtatcatcagattcccatacctgtttctaccaaccacatattcagcctggtttcaaagtttatttctggtttccaagttctttggattgamtctatactactgattggataagactgaggaaatgtatgtgttaatggaaatggcaatgcattcctattgcagttgttaatctttccgaagattccagactctgatttttaatggtcttcatttattctaatgagttaacgtaaccacagattagtaaacagggactatcgatcttcacagagcgtaaggaaggaatttacacgtagtaagggcccattgttgtactaaaatcaccactgacttttcgttcagcattgactctgcaccaggccctgtgctaagtgcttcctgtgctttctctcatttaatgcccactacatcgtttgtaaggatcgttacaccatttattcaaaatctcactatttgtcggcagcaaagtcaagactggaacatggagcattccgtattgaaagcagaaggctcctgcccctgtagtgccttaagtatgtggtctgttgaaatcttcactccccacctagaaaaaaaggaaaagaaggaagaaagaaattacacatagtaatgttgattactccctaaagtaattaaccaggattgtgtaatgaatgacaacagagacagacctctctgatgaggtgacagtttagccgagatctgaagcgtgtcctgaagccagccacacrcttggccagagaacaagaatgtagcagccctgatgtgggctccagcttggcctgttctggaactgacaggtgggaggctggaaggaggaacttgagttgagactggggagctaggctagagcttcctgggccatgatacaatgacacagaatttgcattttgttctgtaacacactggcaaagacggcacttggctgagaatatccatgagcttttgaacagtagcaatcatgcartgtccttgtagggatctactgaatgcaggacgatctttctccctagaaagaaagaaagaaacaaagacaaaaataaaggacacagagcttaggacggtcccatgaccttaaaagccaacaagaggacagcaaactcctttatgctcctcttccccactacccaatgcagaagtgcagagtccttcgaactgggagcctcttttgtggccgtgatgactaagaatcaccctggataattgctcaggtatagctttcaccacactttccttcccccccactgaacagaagcaaaattccttgctagggagaaagttcaccctgtactcagtagatactgcaaagtttggctccaacccccttcccccttacttgggggttattgaatactgcaaaagtgatcaaggaaagtacatttatcactcttgcctcaaagcttgagccaggataattttgcacattctgtttaaacgattgacacgagaaagctggatttagttctcccttcttacttcccagcactaaatgcacacctcgctaatccaatttctaggaaatcctcccttgtgagcaggacagcctgtgggtttgcccagatcaggctggcagagggtagataggctcgtttgtgggagcacgttcagaccccaaggattactgtggccttatggctgccagagccactttctattaggtagggggcctttatgtgcccccagaaataatgttaatagtcctagctaacatttattgagcactggttataaatgtggcattgcaaatggattatgatcttatttaattttcaaaacagcctaggaggcaggcactccttgctgtttttccaatttatcagctggcttaagggcctttgcacttgtggctaattctgcctaagttcctcctccttatcagcatggcatgctacctcgcctcctgcagatcctgtcttaaatatcatcttcttggaaaagtcttcgctgaccactggttgaaaatttcaccacatctcccagctgagctttcyttatctcccctccctgctttgttcttatcatacaatagactatatgtttaacctacttacttgtttatccctcttctgttagcacataggcttcccgaggactatgatttctattttcagatgggttctggtacataggagacttgcagaagatactggtctaaggaaaaacataatatcatcataactattttgcaaactaggaaagagaagtttatagaaatgagctagtatgggccgggcgcggtggctcacgcctgtaatcccaacgctttgggaggtgggtggatcgcctgagatcaggagttcgagacaagcctggccaacatgacaaaaccccgtctctactaaaaatacaaaaattagccaggcgtggtgrcaggcacttgtaatcccagctactcgggaggctgaggcaggagaatcgcttgaacccaagaggcagaggttgcagtgagccgagatcgcgccactacactccagcctgggtgacaaggacgaaactccgtctcaaaaaaaaaagaaaagaaatgagccggtatggtccaggtaagaccgaaaacaagtagcagactagaattaacctaggcctcagaccttctaagtgtttacaacactgcagaaccagcacgtggccaaatacaaagccatccgtggaactgtggttgtgctgggaaataaggagacactactccctattactcccattaaaatgttcttttgaaatcaacttagtccttcaggatgacagttattgatgttaacrcaagtggaattttttagcccctcttctgcactaggactctgcttgttgagatccagaggaaataagttatggtctcatctctctgcaagctcactccagttcattgccaatgcaggagcttatacttgtattgagtagacctactgtatggcacataccgtgcaggaagctgtgggtatggagtcagtaacacacaccactgccctctgggagctcagagtttggtgccacaaagcacctacaataactgcagctctgaaaggcacagatgtagattgtactatgtagtattttgttgttgttgttgtttgttttgttttttacagccatagccctgtaagtcatattccacatcaccccataggcatcagtattagaaaacgcatggattttggaacaagtgaaactggatttgaatctgggttgtcacttgctaattgcttactcgatctttctgtgatgttataaggaatagagttaataggcatgcctagtgcctgggtcctagtaagctgctgccatcaccgttagctctcagtatcatcattattattgttctgcctctgggtcacagtgagtggtgaattcagtgcctacaggtcaataggaagaaactagtttggttaaaaatataccccaggtaataacaatagtcccttatttaattaagactaacgtgtattagtcactgtgctatgctgagtatttcgttatcttatttgattctcccaacagtcctataagttatgatgaatatccattttgcagaagagtaccataaagcacagagcagttattaagtaacctgcccaaggtcatgcgtgctgtgtgggtagatgctaggaccctgacccttgatttttttgctcagctgccccaggtcatcaaagtgtgcactggggaggtgactgtattcttgctgtcattccmaaattagtcagagaagcagcaaaaagtaccaaatctagcatcaagaggcttttattcaagcctgtattctgccactgcataagcttcctgacctcaggctgctgacctcactccgaagtcttggtttcctcatctataaaatgaagacgttgacttagtgatgcccagcccctgggcctctggttctgggatatggctcttwcattcatcacacagcagayctaccaaagccaatgtcatcagagttagaaagacctcagctgaaaccccagctctgccactcaccagctgtatgacctctccgagyctcagtttccttgtttgtaaaaacaagcataaacataccaatttcatggggctgttacaaggactcactgaaataacataacaatcaggatcccatcaagaagacatctrcccttggaagtcagcatatttgaatgaagggactgcatatgggggtgaatgggcaggattgaaggcatcagcaagggatgctggggcacccagggactagccaaagctgagagctggtaccagttctgggctgagagatgtgtgttagtttgctagggctgccgtaacaaaataccacagactgggtggcttaaacaacatagatttatttttttctcacagttctagaagctagaagtctgggaccaaggtattgacaaggttggttttatcgcacccttctctccttggcttctatatagatgcttcctctccctacgtctrtaatctcacttctgcgcatgtctgcctcctaattgcttcttcacatgagggcaccagtcctattggattagcctgagacagcactgcagagcctcttcatggagggtgaagccccacaggctatataccagctactaaaaaaatggctaccactctctaaacagaaatctgatctgctgactggctggttggcatggagattttctttttctttttattttttttatgactaatgggctggcctctcctcatcaatctggctagatgcttcacagcacacgaggatgtctcatttgcctcccaagaaggacgagacagcrtggatggccaagcatttctgaccagttgattggacattggtcacccgtctgacctcattttaacttaactacctttttaaagaccctgtttccaaattcagtcccattctgaggttgctggggattagagcttcaacagatgaatttggaggaggacacaatcaactcataacaagatacaaagggaagcaataatggtgccagaagccactgaaggcttgaaccatggagatggctgccaagcagagactgaagtggaggacacagccattgctgggaacgttgcccacccacatgcgagagtgtgcgagggagaaacacactctctttcctcccaccctccaagctgttgccaaagcttccgatcaggaaccagccaccaggggatgccaggtgatcccagggcacagagaagggcagagtatggacctgggagtggaaaaactgagaatatgtgtctggcacagaaggggcactcacgaagtgttcatccttctcacctcataaatgaggaattaaagtagagaagacacctgtgacctctgcacacctccctgaatgtgttttcagcgtctgctttttttctgagcatgcgaatgagtgaataatgaaggcatactcagttgtgcccttccatgcagactcactttgtttaagctggaagttgcagaaagcttcctgccctttcggctgtttaggagctccacattccagcaggtgccagcacatgttcaactggtcagagctgctcggccatccacgccatctctcccttctggggagggaaatgagacatcatcgtgtgccgtgaagcatctagccagactgatagagagaggcagattcattatttgttaaaaatttaaaatatccataccatccaacaaactggccagcagatctgacttctgttcagagttgcagccatttttcggtagctggtatatagcccatggggtgtcagaccctcccatccctcccccagatggctctgcagtgctgttctatgctactgcatctaccccagctcttcaattattgcattgtgctccattttattcagtggcaattttaagaccaatatcctggtactactcagtatattgttcctgctatacagctgcagaaaatacttcctccttcctgaaataggctggagagtttttaataactactgtaactgcagtggcctggacacagccagaatatcttcattcagtaaatgttatctcctgcgttctgatggactgcctgtgaaagcctgtcttgtctcagagcaggacctctaagggacttgacatcttcatggatttctgagcgagagaagagacaactacagacaagtgagcgtgatttctgccttgggtttttcttatcatttactgtctaaaatgtgcaaaattacttgccttctgtgatttagtgattagctgaaaatctgtccaaatctggaaaatgacagtgatattactttactggaactgctgtaacaaagcaccacaaacagtggcttaaaaaagcagaagttggccgggcgtggtggctcacgcctctaatcccagcactttgggaggccgaggcgggcagatcacgaggtcaggagatcgagaccatcctggctaacatgatgaaaccccatctctactaaaaatacaaaaaattagccgggcatggtggcaggcgcctgtagtcccagctactcaggaggctgaggcaggagaatggtgtgaacccgggaggtggagcttgcagtgagccgagatcgcaccattgcactccagcctgggcaaaaaaaaagcagaagtttctggttctagatccttgaagaatcgccacgctgtcttccacagtggttgacccagcaatcccattactgggtatatacccaaaggattacaaatcattctactataaagacacatgcacacgtatgtttattgcagcactatttacaatagcaaagacttggaatcaacccaaatgcccwtcaatgacagactggataaagaaaatgtggcacatatataccatggaatactatgcagccataaaaaagaatgagttcatgtcctttgcagggacatggatgaagctggaagccaatattatcagcaactaacacaggaagagaaaaccaagtaccacctgttctcactcgtaagtgagagttgaacaatgagaacacatggacacagggagcagaacatcacacatgggggcctcttggtcggggcggggggaagcggagggagagaattaggacaaatacctaatgcttgaagggcttaaaacctagatgatgggttgataggtgcagcaaaccaccatgccacgtgtatatctatgtaacaaacctgcatgttgtatcccagaacttaaaataaattttttttaaaaaagcagaagtttactcttccacagtcctggaggctagaagtccatgtgaaggtgttagccaaaccacgctctttccgaagcctctaggggaaaattcttctgattcttccttgcctcttccagctctggtagcaccaggcattccttagggtatatcttcaacccctgcctctgtcggccctcttccctttgtgtctgtctctatctcttcttcttataaggacactagccattggattggagtctactctaatccactatgacctcatgttgacttgattacaactgcaaagacattttccaaaaaatgggtcacatgcataggtattgggggtcaggacttggacataccttttggaaaggacataattcaacccataagaacacttttcctcaactttttatttgcaaagcactctgtggttaaaaggaactatctgtggaatctcctcagatctgcagggttgaccaggaattatcactctagttcggcaagtgagtctaaacagactaaggaaagctgagatgagcttaaacagattgactatagagaagcagagagttggaggagtcagaaatagctcaggaggaaaggttgggggagtgtcagggacttagatccttgacctttttttttaacttcgtattagttgttttgctttgaccagccacatagcctttctgagcctcagtttcctgaagccattggggatagagatggggcatggatttgataaccttctttgaggtttttttttttctagcttaatatagattccagaaaagactagcaaagtaggcagcaggcatcacccacccatgaatgcccatccagctttgagaagggggtctctgttggtgcatagctggacacacaaagccagaaattcgctcatttccagtcagcttcaggacccacattcctttactttaaaagtgggaagaaaaatatatgaagaactcgtccaaaccagtaagaaaaagggcagacaacccaatagaaaaatgagcaaaagaacaggcagttcccaaaagaggacaaaatgggcaattaacatataaaaagactatgaccctcattagtcattaaaaaatgcaaattaaaatccatattgttataccactatacaaagtgtagacctaaccgaatgcctaaaatgcaaaaattgagacaatgccagtttttagtgggactgcggagcaattggaatacttcagaaccactttgcaatatctacttaacctgagcacatgcacactcaatgacctggaaattccacttggaggtatgtactcaacagaaatgcatacacatgccgtcaaaagacatgttcaagaatgtttattacagcccaaatgtccatcagtgacataatgggtagagtaagatattcatgtcatagattattacacagcattaagatgaacaaatgacaatggcatgcatgggatggatggatttcacaaatgtaatattcatacaaagggcacatactgtatgattcaaagcatataaagctcagaaatggataaaactatgctattgtgtaagaaggcgagatgagggcaggcaccatggctcatgcctgtaatcccagcactttgggaggccaaggcggtaggatcagctgaggtcgggagttcgagaccagcctgaccaacatggagaaaccccgtctctactaaaaatacaaaattagccgggcatagtggcacatgcctgttatcccagctactcgggaggctgaggtaggagaattgcttggacccaggaggcagaggttgcggtgaaaagagatcgagccattgtactccagcctgggcaacaagagcgaaactccatctcaaaaaaaaagaaagaaaaaaggcaagatgatggcaagatattgggtaggtttttgactgtaagggrgattctggtttagtgatattctgtttcttggtctgggttctagttattcaattcatgaaaattcatcaagctgtacagttatgatctatgcacttttctgaatgtacattccactctaataaaaagtttgcttataaaagcaaaaaacaaaagtactctgcaagtttttgttgaaagtatttgccagccaccaaaccgtttgtgtccttagttctatcacaaccttggycaaatgatttctgtccagtgagataaagaggaagagtgaagtgttgttgtctaaaagaaccacttcccacaacatgaaatccaaccacacccacctttgggagcccaccctgtctgcctagaacatacctctatttgcccataacacctccaagctctctcgggcagggacgactgtgttctttgtctctgtgttgctaaaatatatatttattgaatgaatgagtgagtgaatgaccacaccccattccattcacacttgagaaaaacccagccaagttagggaaggtttgagatggaaggatttccactttctctcccacccctccctccttccctatctctctctctctctctctctctctctctctctctgtcactctctctgtctctcactctgtctttctctctcaaaaagctttcaggaagaaataatttaaaaagcaaaagctggattacagaaccttttcatttatatgatcaaaagtgagtcccaggtaaaatcagcaggggattttaaattaagtggtttttaataaacttactttctgttggattatgaataagaagagaactctagtgcttcaaagcagaagggaggaaggttgcgattctgagggtgatttttatcagcatttctgagatgagagtctgcrcgctccccagagcctcctgctgagcagctgcgctgtgtccataggatttcactggttcaaaccagcaaagcctcaaaaaccactgaaggactaaggagcaaatcttcattttcacgtagtggatcctgcattagaggtggagagctgaggaagtgcagaccaaagccagtgaggactcaaactgaagggacaagcaatatcctattagagtcctgggggaaaaggggcaaatcgttctgacagtgttggaagccgtaaccacctttgagattcactgtgcacactgatatatcaaaacctatttaactttatttaaccctaatcaatcatctcctacacttatttaacttatttagccctgcttccacaacatttactagcatcctacagaatgctacatcatacactgtgagaagtactgagtttaggaataaaaggtttcatctgaaacttcctctgaacctcattcaaaggagtcatccaggcactttggtccctactttctcctcctgagccaaggaggtatgtggtctgaattgaccaacccaattctagctacattcttgtagctagcctaaagaatgaaaatagggcagggagggaatagtggcagaaccttctcttaaacagttttcataatgcaagcttaaggcattcccctttgctaaaaaagttttaaagagttcttgcctgcaagtagtcctctacatgctatgaagttacttggatggtttcagatgcagaaagaagggaatgttcctaccatgcaggagggaaagttgacataagttagckctgacacagtgtcctgagttgaatatttattggctccatccggttacccactatcactaatcttggatcaggccctaccctaggcctacagcttccttttcatacaggactgtcctcagggaagccctagttttcctggctttttttttttttttttttttgaggcagagtcgctgcgtcacccaggctggagtgcagcggcgcgatctcggctcactgcaagctccgcctccggggttcacrccattctcctgcctcagcctcccaaatagctgggactacaggggcccgccaccacgcccggctaatttttttgtatttttagtagagacggggtttcaccgtgtgttagccaggatggtctcaatctcctgacctcgtgatctgccagccttggcctcccaaagtgctgggattacaggtgtgagccaccatgcccagccctttcccggccttttataatgattgggatcttcccaggttttcacagaggcagtctgcttatggcctgtggtcttctcaaagtccttcaaacatttacttactgctcctccaggagctactcttttgttttggctttagacccctgattcagcaaagcctcaccgtatttagttatgagcatgtagatacacacacacatacacacacacacacacacacacacacacacacacacacacacgctcccaggaggttgagaccacatggtatggttgagaccacaaatcaaagagtgaaattaattttaccacacgttagttatatggaagctttagtttcttcatctgtaaaatggaggtaattctgtctaccttagtttcttcatctgtaaaatagagataattccatctactttgcaagtttgtcataagaatcagaggtcatctggctgggtgcagtgggtcacacctgtaatcccaggacttcgggaggccgaggcatgcggattacgaggtcaggagttcgagaccagcctggccaacatggtgaaaccccgtctctactaaaaatacaaaaaattagctgggtgtggtggcacacgcctgtagtgccagctactcaggaggctgaggcagaagaatcacttgaacctgggaggcagaggttgcagtgagccgagattgtgccactgcactacagcctgggtgacagagcgagactctgtctcaaaaaaaaaaaaaaaaaagaatcagaggtcatctaagttaagttccttctctctagtatacwgcagttgcttgataaatagtaggtattatcatcattgtcaccctgtttagcttctctttttttttttttttttggcagttgcactggcaaaaaataatgtctagctcataaaatagcattattctcactttcctctctgcacagatacctacttttctttccctgccatcttgattactgagctgttgctaaaaagaaaacatggccctctgatccacagatgaaaagccctgctacttgaccagatgttcatgagagaatcctttgatttttaatttatttattcatttatttatttagcgttggtctctgtgctcccagcacaacagctgtaggtaaagtgctgcgggtcacatgcatcccagccagctcccttgacagtccttgtcaaatttaaggcatgttgcctctgtgcagagcactcaggggcaaggggcttgctccaagctcccagaccccgacgacaaggatgggaatgggtggatcaggcagcagcgaatgccaggcaaaggccaaagtcaagctttttggcaccaccttccacctgacagcagaaaagcagggtcaaaagtctgatttggggcacgcattccaaagccaaatccgtgttgtttcagcttaaaaggctccagtttcaaatggaaccattttcataacttgaagcagtagtcacttaaaaatcctctttctactttgcacacatgcacataatttatattaaatccagtgggaattaggcaagttcagtgagggataattagacaccttaatgaggaaatgtatagtttctgtaactgtcatttattaagcttttatgtactacttcatattttgaaagcactgcacagccattaattaggatatttccgcagccccataggagcaaggtcaataaacagagttctgtttctcttggaaatgttgtttctcaagtcttttatgacctgagtgcaaactcctaacctttgaagaaactggcagattgtcttataagctcatatcaatatgatgattatatttaacatcctaaacagactcattagctgcttaagaatataatttaagctcataattttccatacagtggattttctttcctttattattatttgttttcttcctgtggatgtatctcttagctgccacttggaataacctcaagagatctcctaagcatgcaggctgtgacactataagccacctattttcagaacactgagaaggctatgggcctggaaatgtttgcaaatattgcaaatatttcaagttgtccagtacatttcacactcacgggaattttgaagattatttgaataatcagtggattacaaagaaaaatgatttactaggtttggacattaattatccattaataattcccactacagcactggtggatactcttccactgtaccagatgccatttaaatctttaaagtggcatccactttaaagatgccatttttcttgcttttgttgttgttgttgttgtttttaagacagagtctcgctgtgttgcccaggcgggagtacagtggggccatcttggctcaccacaacatccgcctcccaggttcaagcaattcttctgcctcagcctcctaagtaactgtgattacagscacccaccaccacatctggctaatttttgtatttttagtagagacagggttttgccgtattgaccaggctggtctcgaactcctgacctcaggtgatccaccctcctctgcctctcaaagtgctgggatcacaggcgtgagccaccgcacctggcccccattttcttttttgttcctcacaatcaccttggagttaatgtgggattgtcactatattacaaataaggatctgaggcttagaaacacagtgacttttttcaagaatcatattgatattaagcagtgatatcaggactcagagccaagagtgtgttttccaagtccactgcagttttttctttttccttccccttctgggatagctacaaaaaaaaaaaaaaagaagaagcgtgtgttcccagaattcattctgctgtgtcactctgaggatgtgaggatattggttataggaataacctgtggtaggctgggcacggtggctcacacctgtaattgcaacacttggggaggccgaggcaggtggatcatgaggtcaggagttcgagagcagcctggccaacatagtgtaaccctgtctctactaaaaatacaaaaaattagctgggtgtggtggtgggcacctataatcccagctactcgggaggctgaggcaggagaatcgctagaacccgggaggcagaggttgcagtgagccgagatcacgccattgcactcctgcctgagcgacagtgcaagactccgtctcaaaaaaaaaaaaaaaaaaaaaaggaaaaaggaaataacctgtggataattatagatttatgagcaaagacaaatgttttcacccatgctagacaactttatgcagcctttctaaaattttcttttttgggagaagagggggacatgggtcattaccttttgaggtctgcagttcagatgtggtggacagtatttgctacctgctagatattcagcaacccattcctttgaaatcactgtcctagagagagaagcctgtctggtttgacctttgttcttcctgtctctcacttatataaccttttttatccttaagtttcagtgtagacatcattcatttcaagatgcccttcccctaatgcttcccctgagacacagtcagtttacctgtaccccagctcccatagttcttccccacctcccatttatcacagtgctttgcatttttgtgattacctgtttcccttccctatcaggccttgctccctgagaacaaggactgtgttttaaaaacttccaagtccccagttaactaatgaatagaaccaaagcaggtgctcaaataaaaaaattttgaaatgaatcatagacgaaatgacttctgaatgcaggacctatgaggatgtgaggatattggttataggaataacctgtggtaggctgggcacggtggctcacacctgtaattgcaacacttggggaggccgaggcgggtggatcatgaggtcaggagttcgagagcagcctggccaacatagtgtaaccctgtctctactaaaaatacaaaaaattagctgggtgtggtggtttacacctgtgttcccagcactttgggaggccaaggtgggcggatcacttgagttcaggaattcgagaccagcctggctaacatggtgaaaccccttctctcttaaaaatacaaaaaacattagccaggcctggtggcgcacacctgtggtcctacttactcaggaggctgaggcacaagaatggcttaaacctgggaggcggagggtgcagtgagctgagatcgtgccactcactgcactccagcctgggcagcagagtaagactctgtctcaaaaaaaaaaaaaaaaaacacacaacaaaagcagacagagtcccctctggtttggcatgccaagagcagcttgcctatggcccagctgtggtgtctgggagccctgattcccagaagcccacatgagcctgtgtcagccgagcacacgtgtgacattcatgtttaagaggaagcatggtctttaaaaatgtctaggtacaaagaagagccacccatgggttctgctggcacaggaagcacagggtctttattagttctaatgttctaagataaacagggcagtaagaagcagttgccagcactgtgacatcggaaacatcacctccatcctcagcacctcggttcccacatsgatgcaaacttagcagtaaggtctaaccagcccccctttctaagaatgttgtgagattagaggaggctcaggaagctgagagtgaaattcataagctttgtgacatgtttgctcatgaatgtttttgtctgctttggattctgattcttggttgaatcggggtacagagagtggtatatttagtaaacgttctggaattccaaagagaaaagcagcctgagaatcagctcatcaaattcacagaggcagaggttgcggttgttttatggcagagtgccagttttcctggatgaagtggtctgatgaaagaaaagaaaattaaattatggcgagaaccagatggtctggccacaaccaaggggttatagcttgttctgaagaccaccctgaaatactggaggcctttgatcttgtgaaatggcaggataaatgacagcaacattttagcttggttttttttgtttggttggttggttggttggttggttggttggttggttggttggtttttgagactgagtctcattctgtcaccctggctggagtacagtgatgcagtcgcggctcactgcaacctgtgcttcccaggttcaagtgattctcctgcctcagcctcccaagtaactgggactataggcacacaccaccatgcccggctcattttggtatttttagtagagacagggtttctccatgttggccaggctggtctcaaactcctgacctcaggtgatccgccagcctcagcctcccaaagtgctgggattacaggcatgagccaccgcacccagctagtttggcttttctaaaacagattctgttgtagtcactctcttgctctacatccttgtctggctttcagttgtcctcagtaggacttcccaaccactgtgtcacacatgggtgacaagtgccaacaaaatcatctcctgggccttggggatactttggtagggcctggggcctctgaaacccttggatcagcctttccagccataagcagcttaactcccagtgggttttaagaatagcattttctctgtaggaaacggcataaacatggttggaacgcacctgtgttgcatagatacgaggctcttcctgatttattgcctgtgcgtgtgttcaggcgtctgtcctggcatttgcctaagcctgctattgaaactgtctggccatgatacactctagttcttgcgtagcccagtcttgtcatgcatctcctgcctctgtgcctttgtccatggtgtttcctcagacagcttccccaactgcctgaccaagtcctagcccaggccacccaggcctccctcctgtgagctctcttcataagcactgcatgatctcagtgtttgcagtcatcacattgaatcctaatgatgtacgtgtcttatgtgtgtttccacaaaagggcctggcaaagaatgaatgttacacctccagtaaatatatgctgagttaatatgttgaataaagcccatgagattggccaggcgtggtggctcacacctgtaaaatcccagcattttgggaggctgaggtgggtggatcacctgaggtcaggagtttgagaccagcctggccaacatggcgaaaccccatctctattaaaaatacaaaaaatcagccaggcgtggtggtgtgtgcctgtagttccagttacttgggatgctgaggcaggagaattgcttgaacctgggaggcagaggttacagtgagccgagatcgtgccattgcactccagcctgggcagcagagcaagactctgtctaaaaaaataaaaaaatttaaaaagcccatgagattggtgaaagtagtgaagcaaaataagtacaagtctatttctgtgaattcacacatagtagctactcagtaaataactgttgaatgaatgaataaaagaaatgtaaaaggtgttttaaatttagaatctgtggactcagtaatggctgactgtaagagaaatggaagatggagtagttgaagatgtttcaagacaaggagcgccttcaacacggcaatcccggtccaactttggaagctgcaccctagctaagctctcgagacatgaatcaagattaggatatttattgcagcattgttcataatggcaaaaacatagtaaacaaccaaaatgtccttcaggagaggaatggataaataaattrtggtataggtataaaatggatgatgtgattacagtgactaaactagataggaaatactaacatagttaaatcttaaagacataacagtgggtgaaaaggcaagttagaataggaaatacgcaatccaaaacacactaaaaataccatgtgttattatgtgcatagaggataaaaatataaaaacaagcctaggaataaaacacagacccctgggaatactggctgcctttgaggaagagaggaggtagaatgagatgaactttagatttatctgtaatgctttaattttttaacagtaaatgtggcaaggtattataacaaccattatatctaggtggtgggtattcattatattagtttgtgtgcttttctattgttttgaaatagttcataattttaaaaattaaagtcacgcaaaagaaaagactggctaacagggaggatgatcctgcatctctgcatttagtcatctgttttagacattccgacttttcaggcaacctggcaaatcacatctgccaagtctcacaccatttaaaagcatcagttctcagcttggtcaccagagactcataggtttatcctggacctctctagaggcttcaaaaatgtgcattaatatatttcatcattgtttctagtttcccaccatccccccccccattttttaatacattggagcatctatccaacctaattataattcatttttgtaataagattaatgaaattctttctttcttttttttttttttttttttgagacagagtctcactctgttacccccactggaggacagtggtgcaatctcagctcaccgcatcctccgtctcctgggttcaagctattcttgtgcctcagcctcaggagtagctgggactacaggcgtgcaccaccacacccggctagtttttttgtatttttagtagaggtggggtttcgccatgttggcggggctggtcttggactcctgacttcagatgatctgtgcaccttggcctcccaaagtgctgagattacaggcatgagccaccacacctgcccgccctttttttgttttttgttttttgttttttgttttttgagatggagtcttgctcagttacctaggctggagtacagtggcacaatctcggctcactgcaacctccgcctcctggattcaagcacttctcctgcctcagcctcctgagtagctgggattacaagcacacaccacaatgcctagctaatttttttgtatttttagtagagacggggtttcaccatgttggccaggctggtcttgaactcctgacctcaagtgatccacccaccttggcctcccaaagtgctggggtcacaggtgtgagccaccatgcccggcttcattcatatttttgactggaatatattttcttaaatcagtcaccagtgacttacatcactatattctcttggtttgtaactttgtaaatgtttcttttctttctwccccccccaacattgtttatctgagtaaaacaatcagataatacatttatggcgaacaatttccactgtgtaccttcctccccaactccatattcagtgatatgayattgctagcttgaaattagccatgatgggagtgtttacaccttggcaattggcaaatgctacaaatccggccgtttttttcccccagagagctgatggttaaacattaccagcctaccacaagagtgcgcaacagttttctgagctgtgcagggcaagtagcatttttctcatttaacrctcatagaaactgagagtcaacaaaagacagatcttgacctgagtcccatggctccaaagtgacattgctggggctctagtctatgtggttgagtggaagaagcactggccttggaatcacgcagatctgagtttgaatctgacatagctacttttgaacagtgaattgacaagtgtccgatttagcccctcagtttcctcacctataaaataaggataacaaaatctatcttgtagagatctcagggagcattaggggaaatgatacgtgatgtgcaaaaaccctaacaaagcacaaaggacctatgcagcagatctaatttgtccttcagacttacaagttcagatctctgtgtattaacccaatcttcccatagccatatagatactattttttttccaactcyacctggccaaacacctttcactaaatggtgaatatatcttttctccaaatatgtgccactggaataagtaaagaggcttagagttgacatttgtatgtgatttggggaaatcagtttctttcctagagtcttggaaatgcaggtgctaggtttcaactaagatcatttttcaactgccttgagtcttccccactgaccattctgctgagctaagcatcctgaagaggattgatttgggggcctctgggtgctacagttccacccaccaaattgactgcagtggcctgcagggaaattctctcggctttttgtgttccgtgctcagggctttttctgcttgctctaactgacctgatggtagatagttgcttctcagccattcagctaagcctaagtgtatttttcttttttagattttaactgatgtatttattttttgcctgaataatatgtttagttgttttagctttttttttttttttttttttttttttgagacggtgtcctgcgctgtcgtccaggctggagtgccgtggcacgatctcagctcactgcaacctccacctcccaggttcgagtgattctcctgcctcagcctcccaagtaactgggatcacaggcatgcaccaccacacccagctaattttgcatttttagtagagatggggtttcaccatgttggccaggctaatctgacctcaggtgatccacccacctcccctcccaaagtgctgggtttacaggcatgaaccaccaccacacccggctgttgttttagcgttttaaaaaacacaaaaggatatagacaaggggagtttccctccctaaacaaccctccattcacccaggtcccttccgcagaaagtaaccaagaaaagataccaaggaagaggaaccacctcttattattagtttcttatgagctcacaggcttctggagctcaccttaaagacccagcgtggatgggccaaaaagaccctcttgaaatcaggaagactgagacaggcccatatggcttgtcagtaatcatcaagcaaattggcaaagccatacccagaataaagtcacagaggagctgcttttgtgtgtacggataaatggtatacatcgtacaaattccacctatcagctcaacctaggtaggtggtcatatctctggggaaaaacacaggagagaacctaatgtctataaggaatgtgctctgtatccagtgcagagctagaatcttttttttcattattgtggtgagatatacataacataaatttaccgtgttaaccatgtttaaacgtacagttgagcggcatgaagtccattcacattgttgtgcggccaccaccactgtccatctccatacaatgctaggctctccctgccctcatcacttactccttccaacagtcctttgaggcctgtatgaccagtctccatacaacaaggaggtctcagagagatggtttcatgtctcctatcgagtaactggcaggtcctaggcttgaacccaggtgtattcgtctccaaaacaggtgccccatactgtggagcctcattggaagaatttttagagggaagactcatctgcagcagtgcataggcctcttgtctgcataagacaatcatccccgagagactgtggctgtgatgtgagtaggtgtgcctagctctccatcttttttattttttaattttctcttttatcctgtgctgttgcccaggggtgatcctgttacttctggataagctgcggaagatgaaatgggagcagatgtggaggctgaccgcagagagggagctcatgggcatgctctctacatccttagctgaccaggtgagtggccaggttcgaaggtgcagctattcctgagtgtgcttggtgctgtttctcaaagaaacttaaaattaaatcgatctgaatggttttctacrtattgtgtgactctgtgtgctctgatacagctgccttattcttgccagtctaagacaacagctcaactccttagtgcyttccctttgttcattcatttgttcattcggcagactttcactgagtactgtgtataccaggagccaagttcagaaaaaggatgacagagatagacgaaggatgcagcacttgccctcatagagcttagcgtctactgacgcagactcataagtagatgtcggtgccctcttcatcaccaggtggagtgcacagggcctgctctctgggaccccagaatgccacagcatatttcccaggcaaggtttcactggcctccctggcaaatagagtctaacctttaatctgagccttttgcttagatgctgtcctagtgtccctttactcaagggaaatgcacttaaatagaaagaataaactgcaagaaaaccaccttgctatgcaggcagcctcagaaactccttgaactctaccaaactgttagcaaatattcatttttattattttattttatttttgaggtggagtctcgctctgtcacccaggctggaatgcagtggtacagtctcggctcacggcaacctccgcctcctgggttcaagcaattctcctgcctcagcctcccaagtygctaggattacaggcgtgcagcaccacaccaggctaatttttgtatttttagtagagatggggtttctccacgttggccaggctggttttgaactcctgacctcagatgatccgcctgcctcagcctcccaaagtgctgggattacaggcatgagtctctgcacccagccaacaaatagtcattttttaaaaacctattcctcattttgacgtcctaggaaaggcagagggctccagtctgactttgagtctaccaggatcactcatttaaattttcatcttcctgtggcactggtagctgtcttcaggcacgaagatgatttctctgagttttctgcatttcaccctttccttttcatccaaagagccagctcactctgcatgtttttgttcaaagtgcaatttcctggttcgtcgaatgcctgcaaagtttcataatacggaggaaacaagaaaccctgcatgattactttactattttttaaagtattattattcagtatttcccaagcagccagaaactgatttcctttttcaaacatgagatagagtataatgaatgagtttaagaaaaaaaataatacccaggtagctgttttaaacctgaggggaaaatcgtccaccagcctcatatttcaagtcgggtcacagtgacttgagcatgtcccccaaagctagcaattgtatgcccatgtccagtaaggatagtttattcagccatcttctgccacgaaggcccataattcacctcccggcgccacctgtcagcagctagttaataagtatggcctggtgcaacagcttggagaagagcccaaaaaaggtaaaacctccctagacaagtcagggttggattttgaaacggggagtgcgtatcctgggcaccatgggctgcagaaatccaaggagcatccatcactgagtccaccgcaggccccaggaagcactgctgaaagggaggatctgtaatttgtctcagtccctgaatgagtggggctacttgtcatcatgcagtttcctctccaggaggctcaggatgggtaacacagggctcctgcctaggaggccagaggggaaggagacttcgtttttcatatgccagtgagggtagggaagacaccccatgtctgcacatgtgagctcactggatagggccttatgagaccagcaggactctggagcttccagtcagcctgggacattcccccgtctctatccaaacattattgcttggttcctagagataacaggcaagagagatgcctcacagtgcgagccagcctgtgttcagagcaggaggttcaagagaagccctatcacaggggatgcagtgccttgagagccaaaatgggcagctggaccatccgactgtcttgactgtgtctttggctttcatcccccaggatattttcaatgccgtcatcaaacaaaaccccttccttgtgtaccagctcccctgcttctggaatgtgcagctgtcagaccacacccgctccgagcagtgctacagagacgtgtctgatctaaaggtagggtcaacacagggacatccctggaggtagggtgaggtgggccgagaggacctcccaggggcatggatggctgggagatttatgtgcaatgtggtgagagagataagggcacaggagagcagaatgagtatgcttttcatctttgtggggtgttggtttttttccacccttatttgggctttctggaaagcctaaagcctcctggcgtaagaaccagcttgtgtggttattattcttgccatctgctgctggctsttttggttcatgccagctccccaaatctattcattcaactcaagcaaaaacatttattgagggcctactctgtgccaggtgctatagatgtggatgtgaataattaacctgcttccaagtcatgtatgacttggaggaggagagaaatgtgcaaagaagtaagtatttaaaaaaggacaaagtgctatgacaggtgtgggtgggtcagtcggggagatgcaagcataaatgtctcattcttcctcacagagggcggacaatgacagaaaaagctttcatcaccactctgtaggtaccaaacactgtgaatgaacctggctatagaaagaggaagaagacagggtatattagtcatctactgctatagataatgctgcataacaarctattctgatagtggcctaaatcagcaaccatttatatagttgatgagtttgtaggctggttggatggttcatttttttactggtttaacagagtatttgtggtcagcttcagatgggacagctggtgactggggcaacttagatgtcctctgtcccctcagcaagccagtatggtgttttctcatggtgaggcagaggtggcagaggaagccctaatacacaagaggaaaccttgagtcattgttgctaatatccctcattggccaaagtaactgtatgactaagcccgtatgattactttgagtaaggagtgtgagttaaggagtgtgttagaattccctccctacagtggaaggagtaaagaattgaccacaactattcaacagaacgaagatttcaacacaggcctgtctgacagcaagggcttttgcctctmaggttgtatcacagaggattagatacatgcatccttaaagaatttgttccatataaagtttatatccattgcaagttttaaaaaggaaaaaggattgcaaagctagcttttctaataaattagtcttttgtacttggcttctgatccatgtccccatgtgggtattatgtcttatttgtagtcataacgcatgttaaatgtggttttctgcttttcatttgttgcatatcataagcattttctgggtgagccacatggtgttaatgaacatcatatccaatagttagtctgttacctagccactcccttgaccttagttgttttcaaattttcataaatataaattatatcttaattaacagctttgtccatgaagcccttccatccaatattgttgtagcttgcctttccaggaatgaaattatagcattagaaagaaagaacttttttttaactgcacttgaaatttatttcaaaatattagaaaggatttaaaacagaggtgcctgcaacattcattccttccatcggcatttattcagttccttctgtatatcatgtgcttgttagaaataaggaaaagagaagaaacagacaggaatattgtcaagaatatcatggattaaaaagtttggagagggggcgaaataaaaccaactgtgtaaagaatatgtaaaaatgctggattaaaaaatattttacatgctttgaaagcataattgatcggttcataaagcaagtaaagaaagcaaaggccagaaacaatgacagagtgaatccaaaaagataagcaaagagcaactggatgtcacctttgcccttggaagggatgatccctagtggcagggagcctggtttaaaggtgagcctggtattataagaaatctatttagtctttgtccctggttcctggaacagagctcctaaaacccttgaaatttcctgagtgataagaacagcttttattgtgtatatgagcccctttgggttatacctgagtttatgctaatgaggtgtcttagagtagggcccctagagagcctcaggatggaaagaccaagtgatcagagggttagaacttccccactgatcaattcccacctacgagtgagaacatgcggtgtttggttttctatccttgcaattgtttgctcagaatgatggtttccagcttcatccatgtcccyacaaaggacatgaacttatccttttttatggctgcatagtgttccatggtgtatatgtgccacattttcttaatccagtctgtcactgatggacatttgggttggttccaagtctttgctattgtgaatagtgccgcagtaaacataggtgtgcatgtgtctttatagcagaacaatgagaacacttggacacagggtggggaacatcacacaccggggcctgtcatggggtgggggagagaggaggaatagcattaggagatatacctaatgtaaaggacaagttagtgggtgcagcacaccaacatggcacatgtacacatatgtaacaaacctgcacgttgtgcacatgtaccctagaacttaaagtataataaaaaaaaaaaaaagaaagaaatcactcagcaaatataaagctttgcctgtgtgacttctttcataaaataaagactttacgacactcaaaaaaaaaaaaaagaacttccccactgaaagttccatggacctctgggaaggcaggagggtgtgctagaaatcaagctctttaaatgctcttgaataacaagatttgatgaacttctgggttggtgaacactrttgttgctgcagggtggtgtgcccagagaaggcatggaagctccataccccctcaccccacacccccatattttgccttatgtacctcttctctctggctgttcccaagttgcatccttgataataagctagtaaatgtgtttcccagagtttcaggagccattctagtaaattatggaacccaaggaggggatcataggaatccttgatttacagcaaatctgtcagaggacaggagactgggatttgcaactggcatctgaagtgggcagcctcgtgggactaagccactaacccatagagtctgatgcttttgtcaaggaggtagtgtcactgttgtattaaattatagggacccagctagtgttgaagaactggtcattgtaggaaaataaccccacaatatctggcatcagaagtcttctgtgtgagagtatagaaaaacagtggtttttctcaataggtaactgtataatttattgttcaaacaagcgaatgctatcatgggatacagagggacaataggccaacaggcaaaacatataattattctgttgaaatactatacacaggaccttaggcccacargaagaaagacctcacataaaggcctcacataaagtcaggatccacaaagagtattatcctcagcggataaacagttaataaaactcagagtgtrgaagaagacagtagaggttgttgtctgtttcatccttggttttaggtagaatgagggagaaatgtttcctctgagattttattttaagcctatgcccatattattttgggggctgaaattacatgtgtgggagcaaaaatggaaagaaaaaaaattaaaaatttgccaggcacttggcagaaactaacataaatctgatctagaagaatattcttaaaaacaagtcttcagaattttttaggggaagttacaaggaaagcaaggttctcaggaatcacaaaacacacaaggaagtaagctaccctgagaaagtgcaaaaactgaagactggagttaaatctgaaagactgcaaatattggacttaccagatataaaacataagtatttttattacatgtagaaataaaaaatgaatattgaaagtaggatgaaggaatagtagattctcaaaaaatgaatagccgtatttggattaaatagtatttttagargtgaaagatatgattattgaaattaaatggatatgttaaacagcagcttaaacacagctgaagagagaattagtgaactggaagaggtataagaaattacccaagatgcaacacagaatgaaaagagatagaaaaactgagaaagaagcaaagaaattgggatatgtctcattggactatcagaaggagataatagagaaaattggaagtgaggcatatcttaagtatgccaagaaacaataacaggttgtatacctagaagaataatctttcaagtataagataacaaagagaattttctgcaaacatgcaaagaaactgctaaagtattgtcagccttaataatgaagagatcctctctaaaagaaaattatatttattctggaatagtgcattgcaatgggaatatacatgccatagcaaactatgtgcatacccagggaggtaaaggaagataaaggtttttaaaggaaaaatgaagaggattttataattgtttggagataattatctttggccaaaggatcagtaacaaagttgacaccagtccaagactggacaggcagttgctgggcagacgtgcctgcagaagtttttattttgtgtgtgtaaagttacgatggcatttgtgcaagattgtggttttcacggagtcttttgtaatcattcttgttatcagacacttgtggaagaaaagcctctttccatggcattcctggttctatttgtcagggttttgttaacacaaatgactccatttttattttggcaacattcatatttcacccttttgatcaagatgtttccccaaaagtgtcactgttcagtcatcctttagttaggttttcatgtctctcagtgccaggatggacctctcccaggtttctggtcttgtttcacgttggagagaatgaatggcagctaggagtcagtgtcaaaacctttttaaccacatttgagcaataaggaagtttaagtggggtgctcctcgtctgtctacttggagtctgtaattaagttcaattttgtctgttccataggcatgtgttaccatctcaaagtgctgggttagcattatactgttaggattcgtacatctgtaaaaaatttgaacaagtaacagatacaaaattaaagagaaaaatgcaaagtaaaattaatagtgatgtgacaagaacagtttgcataaggactttgagcaataaacctaggctttaaagacagccaattgaataaacaaaatgaccattatcctaccaagtgaaaaaggtaggctttgttatatcattatgatatagagccttgttctgacatcttgaaaaaaagctgtctacagcatgaaaacaatcaactctcgtcctggtttgcagtttgaatgtctctggtgatggcatgggacagtttggtgaaccttgtgtggcccagacatcaggcacgagacttatttcttaaaattcatctagtttcatcttatagggcttccaaaacagagaaattcccatttgtggtaactgcatagaagaaagtaggattgtagaaatctagaagagttctataggcaaataacaaatagcaatttgctctataggcaaataacaagaacttgaaaacagtgcacacagctatcatctaataacaggtgtattctagctttctttagaaatataactcgtgtccgcatttttttctttaaatcatagccatatgggaaattttctattttgttatggttctcttttattgatgggcatgcagtgagtgtttcttggaaatggccaatttttattaaaatatttctggaagaaaaaaaagaacagaaacataactttttcttcctacggtgatattggcttttccaaaaatagagtaagacaaatttgtttctaaaataaatttagtttttatcaaatattgcctgcaagaatagtgatttgaccacatagtaatctcagatttaaaaacctttcaaagctaagctggtggcaagtgcctgtagttctagctactggggaggttgaggtgggagaactgcttcaccccaggagcctgaggttacagtgagctgtgattgtgccactgcactccagcctgagtgacagagagaaaccatgtctcaaaaaaataaataaaaaataaacataaataaaaataaaaatttcttgaggttaataagataacccaagacagactttaggttatacttacagtcctaatgttcctgcacctgccaggaattgataatttttattcatctactctaaggctgagaaccctagaagtcaggcagtttatacatattctcagatatgacatttcagtcaaagccttgatgatataaccaattgttgccattgtatcctgctatagagagagagttaattttttttttatttttaggagagacagagtttcaccatgtatgccaggctggtctcaaactcctggcctcaaggggtctgcccacctggcttacagacatgagccactgtggcaggcagagagagcaaatgttattgaacttgtataaataaccatattaccgtaaaaaataagaatactcacaaaatctctccaaactttggagagagaaaattggaagaaggaaatgcttctaccttgttcacaaatatatagtttaccaaatcattgtgcactatagacagcttagggaagaaaatttccttaaatctggaaaacaaaacatttaagtgaagaactaacagtgttttaaataaaagtcaaaaacattatcagttacttaatctcatgcaatttatttttgttctgcttgagcttgattagtagtttcatgaattcatgtttcttcattggagttctcaaacatttgcrtttagtccattgatcttaaagtttttattaacctatatctaagagtacttgttagagtcgcttccataaatttgcttgcaaatgcctttaaagaagaattcaaaacaatagctgtggataaaaacttagaatagccatggctaaaaatctgatgggagttcattataataagcaattaacatggaaatttagttatttttgtgccacacaacataatgtctagaattttaactaatgtcatattagatttttaagaattttatataatttgggtagatacccataaatgtaatgcaaagaagatctagtatcacttattatttgacagcatttagcatgcagttcacaaaataagactaatcatttaatatttctacaagatgagagatacattytttgagactctccagagtctctggaaaatccaaaagttaatttcaggtmaataaaacttaagttagaattttgattcatggaaacctgccaaagattttaaaaggttgaaagcacttgataagaagttactgtgaagtaatagtcattcatgtaaccagagtgattatcaaaagacgatagagaaacttacgtggaatcttagtgctttcaaaactccattttcctaagtaatcaaatactgaataaagataacacaggaaattatattgataacatataaaatgtttgtttcttaggccagttattaaaaaggtaagaaacaacttcagcaggttgattgcttctccttgtgagaagccaatgtataatagataaccaggtagtcgacctgatgaaaagggtacttgaatttaatctgacatagaaagaatgagtccaaggttaggaatgtataccatattatacaggaatgtaaacaagaaaactagcaccttgagcaggggaatacatggtccttagtaatagcacgggaagtttcttggttacatgggataattccgacatgtcaagaaaagccaagagtacaaaatcaaggtatactggtggaagacattgcctttgtaggccttcaagataaactttttttttttttttttttttttgagacggagtctcactctatccccaggctggagtgcaatggcgcgatatcggctgactgcaacctccacctcccgggttcaagtgattctcctgcctcagcctcccgagtagctggaactacaagcgcgtgccaccacacgtggctaatttgttgtatttttagtagagacagggtttcaccatgttatccaggatggtctcgatctcctgacttcatgatctgcctgcctcagcctcccaaagtgttgggattacaggcataagccaccgtacccaagataaacatttaatggacaagccataatagcagagttagaactgggggaaaaaaaacagttacaggaaggaatggaaaacttaaaggagagagttatcccaggccttctcaagggtagaaagacgaagagcagaaggcaatgatgtatgacctgaaaatcacatgcagcaagatatagcaaaagttgaacttctgagacatgaatctgaaaagcttccagaggaaacctctgcctcaagaagtgaaattaccattctaaatgaagaagacagcatttctaacccaaaactagggaaattaaatggatctcaggaagaaattttgcagaaatagaaactgcagttcagaagatggcagttaaacagatttcagaattaaaaattatgatctcttatggttttactaagagcagatcagtacttcaagaaaaccttgttgttctaacataggggatgaaaattttagttttgttttagtgtatttttaatagcaaagctcaatctttaggaaggcttataaataattsccttctaattacaggcaacttgatcacacccacaatttcttttataaatttatccttcataaactttatcgtgacttactcagaccttttacaacatgcttaaactttctgctttgtcctttactttctctttattaaataaccagtcattttactttaagacaaaaatttaccacataagattgtttctcataggaaatgctcttttctttttaactatccttaccaaaaatacatccttatatccataactttcttcatattactctcctacttatgkattcctgtctgtcttgtttctatttccattctaaatatacttttcgaggcaacctttaagtaacctctgaactggacaaaattattctattttctcagtaagaaacatatttttatgccttgtaatttcattcatcaaaacacatcttattttggtatactttgtgatatgatttggctgtgtccccacccaaatctcatcttgaattgtagctcccacaattaacacatgttgtgggagggacctggtggaaataattgaatcatgggagcagtttcccccacaaatttctcatggtagtaaataggtcttacgagatctgatggttttataagaagtttcccctattgcttggctctcactctgtcttgcctgctgccatgtaagacttgccttttgccttccaccttgattgtgaggcctcctcaaccacgtggaactgtgagtcccttaaacctctttttctttataaattacccagtcttggatatgtctttatcagcaacatgaaaatggattaatacactttgtatacagaattatatataaattaattaggattttattcttagtaaccttaatttctagtgaaaacctaggaagccaaaaattttgaattctctgtcacatatcagcattttgtaataagaactattttataatttttagaagcatgttttaatagactcaaatatatttaagaagctgaaaacaacttatatttatgttcagcaatttgttcttatttttatggaaatgacccagacatttgatgagtgttttttatttaatgtaacatagcataaccttatgattttaaagtacatgaaaagttattttataaacatttattccacattccatttattccaaatgtttattttataaactttttttttttttttgagatggagtctcgctctgtcgcccaggctggagtgcagtggtgcaatctcagctcactgcaagctctgcctcccacattcacaacattctcctgccccagcctcccgagtagctgggactacaggcgcccgccaccatgcccggctaattttttgtatttttagtggagacgaggtttcaccgtgttagccaggatggtctcgatctcctgacctcatgatccacccacctcggcctcccaaagtgctgggattataggcgtgagccaccgcgcccggcaaacatttactccatttacatttacctaatttactgatttttaacaattcacctagattacttatgaaaactgaaatattacacaaagcgaatcatcatttcaagttattgtcctgttaaccatttttgtattttgtgaatatcaggtgtttgtttaagtaagagcctgaaagtaaaatacacaagtattttgcctgtaactcagaagctacaactgtttttattaaaccaatattaaattagtcctacttatcaaggagttacacaaagattattctgttttcaagttgacttcatagcttcatgactttaaaacatgtagcagaaacaaatacaaaacccagccaaaaatgtatgctgccagtttcgaagatatttccatttttattttaccaatgatttaaaaaccatcttatttatcaaagttttatttaagtcacaggawctaaaaggcatttgggttaattactatatattttatatgtgtgataattcatctaagccaatcaaaataaaatttcttaggagttttttttttggccaactattccacattttactatgtagatacagcataacatatattatctaacataatgcatgttatataatatgtattattcatataacatgttattctataacatgtattattcgtgttctatgaatatactatgaatattatatttcattatacattttattttacatttcttagattttactatgtagacataacatatataaaatgataaatgttatatgtattattcatgttatgttatatgaatactattcattgttatatccattaatattcaataattattgaatattattaatttattaatattaatatcaattatttaatttaacagtgttaaattattgatggtatttaatgatttgataatattaatatttataatgcaataataatgttctataatataatatgtattattataacacctattccagattttactttgtaaatacaacataacatattatataacataatacatgtacatgttggtaaccacacctaaacacatagacatacatacacaaagatcttactgcttttattttagaattttagccatgagatagtaatacaaactcacccatttataaacaacgattgcattcaaattatatttctctcaaaattgggacctttttacatagctaaacttaaatgctaatctagtgaaggctatggatcaaagttttggataaagcagtttgattttttaaaaaacctcttttacctttttttgtttcctttcttcagcttcaaatgagtttacattttagctgggagtgacgaattgtataagaaaaacaaaatctccagtggccttgaattagtaacacatttatctttgttcactgatcccctttgctagtcaatggttatggggaagcatcttaacaagagttttgttttccagctatttttttttaacggcccctgtgtggcagacacaacagtttttatgctggaaagagataccttatattactgttctgacctcaagattttgacctgagagcctaaccttcataatgatttatctaatttttattattttaggctatcagtccccttagttaactgctctagcatcctaagcaattggtagccaggcaaacccaaatttacatttgcaaaagatgtctaggttgttggttactttggagctgttgtaatatgtaaagccatttatttaaaagccctttaagacttttttttttttttaatcttggctagaatgccataagcactgaattttatctcaacaccagcagaaaagtcaactgatttaggccaggcacagtggctcacgcctgtaatcctagcactttgggaggccaaggcaggtggatcacttgagttcaggaattcgagaccagcttggccaacatggtgaaaccccgtctctactaaaaatataaaaattagccgggtgtggtgatgtgcacctgtaatcccagctactcaggaggctgaggcaggcgaattgcttgaaccctgcctggaggcagaggttgcagtgagcctagatcgtgccaccgcactccagtctgggctatagagcaagactctgtctcaaaaataaaaaagaaaaagaaaagtcaccagatttaaagtaggcagtaaaaaaagtagagatagagaactaagaaggctctgttatctatataatcacaaactcttaatttggggraaaaaaaaccaagaaaatagaaaaaagaagcttggggagttcaaataatctgtgttgtggctgttgatccaaaaacatgcatgaggaaagccttgtaattagctggagtctctgaaaacctggcacaccttcatgtgggagaatcccattctatttcttatcaatctcttgagagcaaagaaaattccataaatcctatctgagaatgtcaggattttggacttgtgtctcttcctgtgacattttggtaatgttcattgttattatatctgatttaaaatactacataaacttagttgataaagcaggggcaggatttgagaagattggctccaattttgaaagaagttctattgtaggtaagaattatcaaactgcatcaattgctacagagaaacttttcatgaaaggaagagtcgatccatgtgggaaacttcattgttaccttattttaagaaattggccacaaccaccccaaccttccaacaaccaccaccctgatcagtcagcagccatcaacaccaagacaggaccctccaccagcaaaaggattgtgactcactgaaggccaggtgatcattaacattttttagaaataaagtatttcttaattaaagtacgtatttttttagacataatgctgttgtacacttaacagagtacagtgtagtttaaacataatttttatatgtatcggaaaaccaaaaaatgtgattcacttcatgtggtattcactttattacagtagtctgaaaccaaacccacaatatctccaagttatgcctgtatatatatctgtccaaatacatatacacaaacaggcacacacacacacagagctcattagaactccagggagaaattgataagtccattttcatcttggaatatttaacatattttttcttttttccttttttttttttttttttttgagaaagagtcttgctctgttgcccaggctgtggtgcagtggcatgatctcagctcactgcaaccttcacttcccatgttcaaacgattctcctgcctcagcctcgcaagtagctaggactacaggtgcccgccaccacgcctggctaatttttgcatttttggtagagatggggtttcgccatgttggccaggctggtctcaaactcttgacctcaggtgatcggcctcccacctcggcctcccaaagtgctgggattacaggcatgagccaccgcacccagcccatattttttttcaaatgttgaaatatcaaaagacaaaaattactaagactatagaagatttaaactacacagttaacatgttgacttattgggcaaataaggaaccttgtacctaatgatctgagagtatacatccttcttaggctcatatggaacatttattaaaaagaaaccaagtactagacatcaatacatttcaaagaatgatattatactatagttctctgaagaaagcaaaattaaataagaaggcagtaacaataaggtttttaaaaatctatttgattacaattgaaaacatacttttacattactcatggttctaaacataaataatttaaattgaaaactacttagagcctaaatgaaaataaaaataatatgtcaaaattagtgggataaaataacatgtaaggaaatgtatatccttaaatgtttatattaaaaagaagaaaagttgaaaattaataagccaagtttgcaactcaagatgatatattaatataaacaacgttagagttggccgggcctggtgactcatgcctgtaatcccagcaacttgggaggctgagatgggaggatcccttgagttcaggagtttaagaccagcctcagcaacaaagcaagacctccatctctaccaaaaaataaataaatggggggatgggagtggggcagtggtggtagctactcaagtcccagttcctagagaggctgaggcaggattacttgagcccaggagctccagactgcagtaaactgtgattgcaccaccgtactacagcctgggtaacagaatgagaccctgtctctaaaaacaaaacacaacagaacagaacattaaattcaaatgcaatcaaattgaagttggtcagcaaattgatcaataaagtcaaaagtttgaaagggaccaataaaatagacaaacctatggcgagactcatcaagaaaaaagaaagtgaactcaccaagaaatgaataggggcrcctaattccagatccacttactcattctctcattgtttttgagcaagtgacttctgagttctagatatacagcaaagataaagcaaacagtctcagttggtggagctttcaatcaattagcagaattgaaaaaaaaaatagaatactgtgaacaacattatgtgaacaaatttgagaatttttgttaaatggacaaattcctagaaatgtgttacttaccaaaaccgatttaagaaaaaagtataaagtttagattatcttctagccattaaacctttttaaaacagtacccctagacggcaagtagaaataagttctaccaattttttttaatccaaggacatttccaattttaaataaacttttctagagaatatgaaaagaggaacactttttaacccattcagcaaagccaggatattatcaacaccaaaatcagacaaaaaaaaagtgcattagtctgttctcatgctgttaataaagacatactcgagactgaaactaggtaatttataaaggaaagaggtgtaattgactcacagttccacagggctggggaggcctcacaatcatggcggaagacgaaagagaagcaaagtcacgtcacaaagacaggaagattgcaagccagtctcactcatgaatatagatgcaaaaatcttaagcaaaatatttagcaaaccaaatctagccatgtataaaatagataatatatcattgccaagttgggtttgttccaggaaagacaagagtgatttagcattgaaaaatccacgtgtcattcagcatgttaatagattaaaggagaaataccaaatratcatataaacagatgaaggaaagttatttgacaaaattacgtgctcattcatgataaaaactctcataaatagtaactagtgaaaacctacagtaaactattgctgagcatttgctcagggccgtgcaattagttggaaagaggagagcgtgcaagagcacacacacatttatgaaagcattttggtatatgaagaggcaacatacctgatcattgaagaaatgattaagttttccataaactgtgctgagacacctgattatccacatggaaaaaatttaagtggatccctgtctcataccatgcataaaattaattccagacggattagaaacttagaaagtgaagggccaaattaaacttttattttttaaatgaaaagggaaactggccttaagacttcagaatggagaagtatgtattcaacaagacatcaaaaacgcataccataaatgaatgaatccgtaaatttaatcacattgatatcaataactcaatcaaacaggcattaaaaagagaaaagcaggccaggtgcagtggctcacgcctgtaatcccagcacattgggaggccaaggcaggtgcctcacttgagctcaggagttcgataccagcctggccaacatgtgaaaccccatctctactaaaaatacaaaaattagccagacgtggtggcgcatgcctgtagtcccagctactcaggaggctaaggcaggagaatttcttgagcccgggaggtggagaggttgcagtgagccgagattgtgccactgcactccagcctaggcaacagagcaagactccatctcaaaaaaaaaaaaaaaagagagaaaagcaaaagatacttcaacacatgtaactgacaagagagcactaaacaaaatatataagcaactcttaatattgaatgataaatctgtaaaacatgtaaacagtcctttcacttggttgccaggcaaatggccaataaacacatgaaaagatatatagcctcgctgttcatcagggaagtgaaaattaagaccacaaataattttatagccaccaaattggaagagtgatactatcaagtctcagttgaccagtggtctgttatgtcacccataggagtgtgtatggatacaccaaattggaaaacactttggcactatattgaaaaattgaagtggaatataccttacaatctgggtcttggatgtaataggtcacaaatggagaagtggatgactttctaaagaaagtcaggttcagccatcagtgagcgaattacaacagatagaagtagtgctttggaaggcctgtgtcctcctgatgaatgacatttcttgaccaggcagggcacaggagacttctaaactctcaagtctttttatatcaaaaataaaaacataaaaataagtacaactaaaaactttggcaggccttgaaaagggataaaattctgaaggtcaggcatggtggttcatgccagtaatctcagcactttgggaggctgaggcaggtggattgcttgagcccaggagtttgagaccagcctaggcaacatagtaagacccccgtctctacaaaaaataaaaaattagccggcatggtggcatgtgcctgtagtctcagctacttgggtggctgcggtgggacgtttgcatgaacccaggaggcagaggatgcagtgacctgtgattgtgccactgcactccaacctgggcaacaaaacaaaaaactgacatatgctataacttggatgaactttgaggacattatgcttagtgacctaagccaaacacaaaaggacaaatactgtattatttaacttaaatgacttakgtaaagtggcatgaaacatgctacttaaaatggcatgcaatttaaaatatgaattatttctggaatcttccatttaatattttcagacagtggttgacctctggtaactgaagtggagaaaagcaaaaccccgagtaaggagaggctgttgtactcccaagggaagaacataaaaaacagcaattaggaggtccttcgtaaacgcggaacgggattgaaaaaacaaaagatgggaggaagcggagaaaaagaatgaaaataggccggacacagtggctcacgcctgtaatcccagcactttgggaggccgaggcgggcggatcacgaggtcaggagatggagaccatcctggctaacacggtgaaaccccgtctctactaaaaatacaaagaaaaattagccgggcgtggtggcgggcgcctgtagtcccagctactcgggaggctgaggcaggagaatggcgtgaacccggggggcggagtttgcagtgagccgagattgcgccactgcactccagcctgggcgacagagcgagactccgtctcaaaaaaaaaaaaatatatagcaaagatgcactttgaccaggactctgagacccagattggcctggtgggacagacggtgttcttgggtcatccctgagggctccacagaaatgtccaggcaccaagaggacccagagggtctcaccatcccgctcagtcccacccgggaggtgaatcatcccttcatccagcatctccatgctgtctgcactactggcctgtgaatcacttagtagccatctcagttatcagattgactctctgggatcgcaatgcttgtgttcaagtcgccctaattttacttcgtcatggctccaaagtgcaaaagcagtggtgctgacgtattataattattcagttttattataatttattgttattaatctttcactgtgcctaattatgagttaaactaatcataagtatgtatgtataggaaaaaacatggtatggagttaggtacgtgatacggtttggctgtatcaccacccaaacctcatcttgaattgtagcccccataatccccatgtgttgtgggaggaacccagtgggagttacgtaattgaatcacgggggtgattttccccatactgttcttgtggcagtgaataagtctcatgagatctgatggttttataaggggtttcccttttcccttgggtctcattctttctcttgcctgttgccaatgtaagccatgcctttcaccttccaccatgattgtgaggcctccccagccacacggaactgtgagttctccattaaacctctttttctttataaattacccagtcttgggtatgtctttatcagcagcgtgaaaacggacttatacagcactattgcatggtttcaggcaaccattctgggttttggaatgtgtgcagatactactgtagacagggggaccctgcctctcctggtctccctcagctcacactctgctactccaaaggagagtcaacctgagcagccccctgtgggaaaagcgggagccccatgctgggtcagatgattgaaaatgtcatttaaagcgagaatcataaaaatattttaaccttgatttgctttcttttcatccacaggccaggttttttgatctgctaattgagtgctgtattatcttgcataaaccaccctcatgcatcttctgtggttatcggtgtcctttcattcaaagtgaaacaagaacttaaggactcttccaaaacaattggaggacggtcctgggttagttctattttcccccctttagtctcacccacacctaacacaaaagcaaatttgtttagggacttcttttcattgagctgttgcaaagcgtttagtttgcctttcagggaaacagcaattctttgtagttacataccataaactcaaataatatttaattagatttccaattgcattagaaacacaagatagaaaaacaccttcggtaataatcacagctcactcttgctgagcacagagcccatttgtaggaacagacatcctctgacatcctactagcgagaggcttaccagccttgggcatctactttgccctaggtgtccatggagaactttgtgctaagtagaggttggttaagagaacttctaaggggagaggtgttttcactgaagaggcaaaagtgtatatcctttgggagccaagcaatcttgtaaattctgatgacagttttgcttcttaccaactgaaggacttgagtaaatcacttaacctctcccaggttcagttacattattgagaaaattgaggccattattctttgccccattctcagccatgccccttgagtgctccatagaaatacacttgactttacctcagtctttgtgtttcaggaccttcattgttatctctttagtccttacgcttgatgactcagccttccctggctgagtcttaaattaaaaagagaagggaagggcccaagggagcatctttttatcactttaccagtggcacaaactcttaggagaccagagtgtgtagtgtgctggtttacagaaaggagcatgagagaattctgtgaaactttgctctagttcttgagcctttgatggaccattagagaatgaagctctggccagaatcagttggtaatgaccaggaaagggaaagcagagggtctaccaatgggtctctctaggggtttctagagtcccagagctgagtgagccatggttcctgctctcagaaaagtctctagtgagacctaattggtgagtaatggaaaattccaatagagtctgctaggtgctgtgatgtaaggaagtgagggagcctaacagagcaagaggagggactctaaagaggagggactctaaagaggagggactctaaagaggagggactctgagccagttggggagtgtgatgcagaatctgaatctcaaggaattcagattcagataggaaacctgagctgaatcttgatatccaaactcccagacacctgaactctcttccttccccatctgctgccctcacactacccctcagccccaaaacatccttgctgcccctctccacagtcctgtgaaaactgctgctcctcccctgctcatatctccagagcagggagtaagtgcaaggactacacgagaaagagtggaaacccaaatgcaagttaagaagaaatagatgcacacagctgggccattgcttcaaaaatgtttatgtagaatgcattgagctctttctggaatcaacaggaagtacatttcagaggaagttgttgtgtcaaacccctgtgaacctcattaggaaagtcatcagctccaagaggctgaagaagagacccagagacagcaaaccagaaccagacatggtttatttttatttttatttatttatttattattattatttttttaaacagtcttgctctgtcacccaggctggagtgcaatggcgcattctcggctcactgtaacccccacctctcaggttcaagcaattctgcctcagcctcccgagtagctgggattacaggcatggtggtgcacgcctgtaatttttgtatttttagtagagactgggtttcaccatgttgggcaggcttgtcttgaactcccgacctcgtgatccacccgcctcggcctcccaaagtgctgagattataggcgtgagccactgtgcccggccgacatggggttttatcgggattacatacaggggagagagtccagcggcagcaggctggacaggagagctgccttatgtacagaaagagtccagtggcagtgggctggacaagatacctgccttcgtacagcccagtggcggtgggctgggcaggaaaactgcaattatctgcaaacatcacgcagtttatatagcattttcacttaacactctcccactaatgaccttgatacggtttaaatctgtgtccccctccaaatctcatgttgaagtgtaatccccagtgctggaagtggggcctgctgggaggtgcttggatcatgggggtggtttctcatgaatggtttagcaccatccgcatcgtgttgttcttatgatagtgttctcacaagatccgattgtttaaaagtgtatagcatctcctccctctttctcttgctgctctggcccacataagacatgtgtaagtttctgccatgccccttctgccatgattgtaagtttcctgaggcctctctagaagcagatgccactatgcttcctgtacagcctgcagaaccatgagccaattagacctctttataaattaccagccctcagggtttttttgtttttgtttttggagacacagccttgctctgttgcccaggctggagcacagtggcgtggtcttggctcactgcaacctccacctcccaggttcaagcagttctcctgcctgaacctcccaagtagctgggactacaggcacacgtcactacgcctggctaatttttgtatttttaatagagacgaggtttcaccatgttggccagactggtctcaaactcgaacctcaagtgatctgcccacctcagtctcccaaagtgcagggattacagatgtgatttctttatagcaatgtaagaatggactaatacagaactctaactggcaaccttcatttaacccaaaactcaggactttggtcccatatatgggctcagatgttccttatagacaaggaaggaatctctgggttggccactcctagattgtctagctcagaacacacgttaagatgagtctgctggctgggtgcggtggctcacgcctgtgatcccagcactttgggaggccgaggcgggcagatcacaaggtcaggagatcgagaccatcctggctaacacagtgaaaccccatctctactaaaaatacaaaaaaattagccgggcgtggtggtgggcgcctgtagtcccagctactcgagaagctgaggcaggagaatggtgtgaacccgggaggcggagcttgcagtgagccaagatcgcgccactgagctccagccttggcaacagagcgagactccatctcaaaaaaaaaaaaaaaaaaaaagatgagtctgccatacagggtcgttctaagggttgcttaagttgctgctctcaggtgtgtttatcctacagaagtgagctgtcacagcttcattgtgggcctcaaaagatgaaaaggagttttccaggatgattggctgggaatggtgttccaggcatgacctcacttaatcttcccaagtctcacaaggtaaatcttttttcattttataagtcagaaaatgaaggatcacacaggttaagtcacttttcttgcccagtcacacagctaaatatgacagagctgagattccaactcacatctgtctgattccaagtccgcagcattttcctctgatacagcaatgagtttctacctgaaaatattttccaatgaaaacatgatwtataacataatgactgtatagaactattgtatgggactgtatacagtccctcttgtgtagggctattctgcatgaactctgtttggattaagtgggttttagagggttaactccagaacagagccccttaataatactatatccttgaaaggacatttgaatttttttttttttttttaagatggagtctcactctgtcgcccaggctggagtgcaatagtgcagtctcggctcacttcaagctccacctcccgggttcacaccattctcctgcctcagcctcccgagtagctgggactacaggtgcctgccaccacacctggctaattttttgttgttgttgttgtattttaagtagagatggattttcactgtgttagccagggtggtctcraactcctgacctcatgatccacccggctcggcctcccaaagtgctgtgagccactgcacccggccaggacatttgaattttaaacaacagactcagaggctgaattttagaccccagtccatttataaattggtaattgagtacacctaaaagaaaaatcctaaagcagaagagaaaaaccaagagaaaagatgccagccataggaggaaatgatatatcttcttaggggcaatttatagcatttgcataaaaaaagtagcccataactcaagcattgaaacattttataatagttagagttgtgtcagtttctacatctttgggggaagatgaggggctaccatatatcagcatactgaacatgtcacagctaagcagactacagtgaaaaatgaggcagggaaaacacagggtaataagaatgatgaatgttaaggttgattttggaggattgggatggatcaaggaagaaaaaaaaaacagttggttttgggggagaagatctaaaatctcgaattactaccttctagtcagacttctctttcacttcaggccagtgccggtttcatttctttcattgtatgacctgcgtccaagggctgtcagtgttttatgatctctttgtgcactgctgtgaccagtaaactcaaggagtcctcaggattaaatatgaggcagctggctcctgtttaagtaccctgtcctttgggactattgccctgtggcttgtatgcgggatctctcattcccccagcagacatggcagagcacccactctgggccaggctgtcactgagttctttaactcaccctaaccaagtcttttcatctgaaaaactaggaacttttcctcatgagtctaaagtcatcctcatgactttatagaagagatggaaagattaaaagggacaatacataaagcagtacaaggctttgagacattgtagtaaacctattattcttttttgtataatttttttttcttttttgcgacagtttcactcttattgcgtgggctggagtgcaatggtgcaatctcggcccccctcaacctctgcctcccgggttgaagcgattctccttcctcagcctcccaagtagctgggattacaggcatgggccaccatgcctggctaattttgtatttttggtagagatggggtttctccatgttggtcaggctggtctcgaactcccgacctcaggtgatctgcctgactcagcctcccaaagtgctgggattacaggtatgagccactgggccaggcatcttttttgtataaatttaagtggtacaagtgcagttttgttacatggatatattacatagtgatgaagtcggggcttttaggataaccatcacccaaaataatgtacattgtacccattacgtaattactcatccatctcccctctcccaccctctcacccttcagagtctccaatgtctgttattccatgctctttgtccatgtgccctcactatttagctcccacttaaaatgagaacatgtagttatttagctttctgtttctgagtatttcacttaaaataaggcctccagtcctatccatgttttcattccttttcatggctgaatagtattcatatatatatacytacactccacattttctttctacgttaagccattgatggacacttaggctgactctgtatctttgctattgtgaatagtgctgcagtgaacacacaagtatagctatcttattgttacaatgatttcttttcctttgggtagatactgagtagtaggattgtgagattgaatggtagctctgtttttagttctttgagaaatctccatgctgttttccatagagatactaatttccattcccaccaacagtgtataagcattctctgggaatagtttccatttggctagtgggcagacacataaaaaggcactcttcctactcctctgttctgtcttgtttcttttgttttctcttctctttctttcttttctttttttctttttcttttttgatatggagtctcactctattgcccaggcacagtgcaatggcatgatccccgctcactgcaacctctgcctcctgggttcaagcaattctcctgcctcagcctcccaagtagctgggattactggcacacaccaccatgctggttaatttttgtatttttagtagagatgggtcttaccacgttggccaggctggcgtcaaactcctgacttcaagtgatccgcccacctcagcctcccaaagtgctgggattacaggcatgagccaccacgcccggccaactctcttatttcaaagaagggaaatagagacacacaaaggttaaacaccttgcctaaggttaaacaccggttggtggcacagctgggatagtacctgaccttcacatcatgtgtccttggatcatgccagagaatggcaggctaagcagacgggaccttgggtgacttaagcttgagtctgttgtcttccctcagcactcatccattttttgctcctggataattttcagaactgaactcttttgagttttattgatttcagttgtccttcattggctttttacacatagctgataaacttccaatgcagttattgctagaaacaacaagattcctagaagcaaagtgatgtctctggaaattttaccctatgacagcattttccagagtgtatgtccaaacagttctaagagctgttaattggacttatttaaaatgggggaactggggaggaggatggggagagcggagttctatgtactacataccaaatactgtattaggaagtcctgcagccagaaaatctgattgattttgttgatccccagcatttcccacatctattttatatcaacacacaggaaagactcccctttgattacagaatgcctrgtaggacaagttccttagaagcccacacttccttacataaatactaagctctattaagaagaacacaattttgagcaaaggaagcaccattgtaaggctcaggtgcatgatattaacactgggcctcagaaagccggagggctaggcagagaaagggtggtccaggaggagttagaagatctacttttgagattctggaaaagaccataaattgaatggatcatgggttcataacttggccgtgatcagagaagagtaaccaaggtgagcaagagacaaaggtttaattttccagttatcacgaaggggacaggcaggtagcatatccaggtgtacatttgaagatccaaactatccttgaggaaagggctgcaaaacacatttcagcctagcaagctacccagtattgagtgcccgttgtatgcaagggtttgaagacacttagtgaagttgaggatatagagacaagttcatcataattcctgccctgaaagagccttacaaacaggggatacagaagtttcaactgctaatttccacataatgtgaacaatactgtgcaatattgcttagaggtatccaggtcagaaatgaaggtgctacataaaaagggatagtacgaatgaacacaggggcctaaaagatcatggtgtccagaaataacaaggagataagcagagagttcaggctgtgtactaaggagcttggaatttaaactatgggtcacagtactaaaatayttctkatctgacctattccaatgcaaacatatttttactgtggtacatgaatacactataaaacagaaaagtttcattttattatatgtttgagtaattttaagttaatttagtaataataaacccttttgctcttatgaaaaacataagtattcatatgtttaaacatagcaatattattgaatgtgcttcattatttttgaaatgttggtttagtactttgtgacacagtgtttcatagtcttagttttaagggcatgttatacaaatactagaatttaatggctatgactgcaaaaaggatccctcctaaaattcacagatccaaatggaaaaaaagtacatcattggctggctgaatacattttatactcattgtttcagtttaatccaaaagtcatacaaaaatatttgtagcattcagctattatatttaagtctctcttgatgaccatcatttgcttttgataatttattaaatattctttagcattttgataacacattcaaaacccaccatacaataagtcctcacttaatgtcatcgataggttaacggaaactgtgacttttcagtgaaacaacacactatgtgccatagaaacttaattcttgtttatatcaactaacaaggtaaattgatttctttatagtgtatataatttcacttgaagttgcagcctccaagaacttatcaaccttaagtgaagactgtaattttttttatttgcaagttaattttcaaagttaaatctattttgaagttttctaagtatatagaaatgagggctttgataggtaacatcatttcttggcctcacaatcccataacgatggaaacaatttcaaacatttattttctaaaagctctatcctgtttcagagtttctgtctgaaagcacaatatttactttctcatttgtcacctttccaccgaagggtcagatttaaagtgtgtgtgtgttttcaaaagtgtgagatagaatactaccagcaaccatcctttcttcacgtgtgccatctcttacatgtcctttgctttgagttagccagcaaagctgtgtgttacagattttcattgccacctctcatgtcattagaaagtattgtacaattgtaatgctatttttagtcttgcctttataaaattatctaaatcaatggcatctagcagcgcttgtgcctgctggcctcaggtactctgttgcaggcttgcttagcaatgatggagtcaaggaattcattgcatggtgctgactctgtgaccttactccataattcttttgttattccagttaaagcactgtacctctaatgattccacatactctcttttcataaaatatcgttatcattaaagtaggaatttactgctcagtgtataactctgcaggacagctttcctttagtgctcacaaaaaaagtcattctttctgtctttcattctctaaacagaatctatcacgtagcgtaagcctacacacagtactctgtactttgatttaattccatagcaaatctcccatgtaattcagtctaatactagttgcttccatccttcagcgtggttttctctgactcttcctgcaatatttgctgacaaaggaacttacttcattttgttaccatattatctttgtgtatttttacagccatttttgccaaggcaaaaaaaaaaaaagaaaaaaagaaaaacaagtattctccttactggactttattgtcctttattctgatgaaagaaatctctaaagcaacttctaacctcttttcacagagttcagtgaaacrttgtcaagcttaagaccgactttcacaagactttaaacatcatccagaaattatggtgacttcatctgcatattctgaatgctttgtttttaaatgtcttgctaatcacacatctttgtactaacattaagtaatatatcaaggcataatacacagtttgaagttcttcctgaatgatagtggttgtaaattcatatttcaaatagtcttgaaaatttacattttttgccagtttcttgtcagatccaattagggagtcatttctctactttgtaatgtagctaaggaagagcttatactgggaacagaagtgtcagctcagctgttttcttgctattcacatcagcttgtcttattggtattctcaatctgtagctcctttgtagaactcccttttttaattataaacttttatttggaaggatgttagacttaaaagtttaaaaggtagcataaagagtttgtatatatctgtcattcggtttcaatttcccctcacattaacatcttttttttggtgggggtcggggaatggagtcttgctctgtcgcccaggctggagtgcagtggtgtgatctcagctcactgcaacctccacctcccaagttcaagcaagtctctccctgcctcagtctcccaagtagctgggattacaggcgcctgctaccacacctggctaatttttgtatttttttttaagtagagatggggtttcaccgtgttggccaggctggtcttaaactcctgacctcaggtgatctgcccacctcggcctcccagagtgctgggattacaggcatgagccaccatgcctggccagcatcttctaacagttgtacattcatcaaaactgacaaaccaacatcaatatattgcttttcaagtaaacttcaagcttkcattgtatttcactcaatgtttccatttaagctttatttccttagtctccttgggtctgtcataatgtcacagtctttcctggtttttcgtgactgacctcaatagttttgtggagtactggtcaggtagtttctaaaatgtcccttaagttggtttgtctagtatactttctcacgattagactgaggggatagatttttggaaagactatcacagatgtgaagtgccctcctcctcacattgtgtcaggaggtacatgatgcccacatataacattactagggatgttagccattcttatgtagtaaaggcaatgtttgctaggtttctccactataaagttactaatttttgccaggccttgggggctcacgcctgtaatcccagcactttgggaggctgargcgggtggattatgagcgcaagagatctagaccatcttggccaacatggtgaagccccatctctactaaagatacaaaaattagctgggtgtggtggcgcgcacatgtaatcccagctactcgggaggctgaggcaggagaatcgcttgaacccaggaggcggttgcagtgagccaagattgcaccactgcacaccagcctgggtgactctgtctcaaaaaaaaaaaaagtttctaattttccctttgatactttattttttgaaagtgagtcattatatctaccctgcaatggaagtggagggattaagatccatctcctcgcaaagggggtagtagtatctacatatattattagaatttctctgtaattaaagattggtcactttttctcatttatatttatttattttaaaaataatttatgtctatatatactcatttattttatactttgggttataatgcaggactcttctttaaggcattattcattttgtgagggttattttaattcaatattagtaattataaaataatattatgaaatgcactaaaaataagtaatagtatggttggttgacagaagactttgccagattcatttaaaccccagaacacctcaatatttgagagcgccatgccaccatatcatgccttctgcattgatgcagctacatatgggtgctcacatgacttagcctctcccctctctccctctctgcctttgcttttctctgttatggcagggtggcttcctgaggcctccagccagtaggtagagcttagtcattcaacagatattaattgcacacttgctatgagctagacactggttacacaatagtgaacaagacagtgcaggcctttgctcttcttgaacttacattctagtgcagaatacagctatcacacaagaaaacaaatgatcaattgtcatttcaggcaaaacgtgcaatgaaaacataaagaaatctaaggctaatggaagagtgactagcactcatgaacccaaattgaagagagaagccccttttctcttaatgtctcctcaaaaggactctgttgacccttcatgggacaggtatccatgcaagaacccatccctgtgttcttaggaatggtcaggaatgactcactggtcagctggagtccgtgtctgggcttctggctggtcaggcatgactgacagccccattagagtcatgggaagaaggcctgatctacttctgcaaagggcggtgatgcggggcagacaaaagagcratagtgggcctcacggaaggtgcctgctgggaaccaggaagcacagctgcctctcccagggtttccaagcagcraatcctacggtgcccacccccaagggcatgactgaaattcggccaagttagcaacatcccacgggactcaagccagctgctcctccacccaccttggtcaaattcstcagctaaggatcccatgccaacctctagaggtgggatctgcttccttctagcctgcctgtcctccagtcacacccccgaggaggacactgtggggaggctaaaatgtgaatacagtcttagtaattaattccatagagacaggaagaatacgggctggttatcactcctggtcttgtgtgggttgtctgcagggaagtcgcataaaggcagcagtcattgaggacacttaacactgtttgcatcttttttcatgtcctgctatcaagacagcatcaggaattctttgcatgtaacagaatccagttcaaattggtttttacccccattttatagcataaaggaacccaacacattgaacatgatgaacattagagaaaatacagctgaattgtctcatggattcatgaccttcccagccctgagtattgtgaaaagtcttcattttcctgttgtccttttatcccctccttagcctctacctccttgggcagggaaaaataagaaatgttacagagaacagaataagcaatgataggatataagacaaggcctgggattcatgcattggcctaagtgtctacattttccaagtgagaggactaagtcatcaatgagttgggtctcttttcttcccctttcctggataatgatgtgtttttgtctgggaagaaatttttcttttcttttttggctgagactcctaaaaaccaaaaggcaataggaatctgtgtgacaggagccaaagagttatgagtaccaggaccctagactgcactgtggcaaaacttccatggctgaaagagatgtcttggtataaagggcaccatttttatttaatttttatttaatagcagtacctgataattgtcaggaattggaaaggaaaaggaagggggatgaaagggaagcttcagcagctcatggggagcataaaaaagctgagatacaatccatggggagtcaacaaacattgaccaagcctccttttgcatgcaaagttggatagaacacagctcttgcattgaaggatccagcagtccgggatgttggacagtgtcactttagctagtgctgagcctccctcagagagaatcatgtgggaatggagcgtgtatattccacagacttgattcacatcacaagcactgagcatggatctgctgcaggctccatggtgaacacctatattagattctccagagaaacagaaccaataggaaatagaatgtatatgtatctgaagatactaattatgagaattgacccatgggttatggaggcagagaaggcccaccatctgccatctacaagctggattcccaggaaagccagtgttataattcaatctgagtctgaaggcctgagaaccaaggaagctgatggttaaatccctgtattcgtccatcttcatacttctatgaagaaatatctgagactgggtgatttataaagaaaaagaggtttaatggactcacagttccacctagctaggtggaggcctcacaatcatggcagaagacgaaggaggagcaaaagcatgtcttacatggcggcaggcaagagggcatgtgcagggaaactgctctttataaaaccatcagattttgtgagacttattcataatcaagagaacagcacaggaaaaacccaccccgatgactaaattacctcccaccaagcccctcccacaacacctggagattatgggcactacaattcaagatgagatttgggtggggacacagccaaaccatatcggttccagtctgaaaggaggagaagactgatgtcccagctcaaatagtgagccaaaaaaaaaaacaaaaagcaaatttctccttcctcagttttttgttctatcagggcctcaatggattggacgatggctccctgtactgggaagagccatttgctttgctgagtccactgattcagatgctaatctcatttgcaaacaccctcacaaacacacctagaaataattgtttcaccaaatatcagggcacaccatgatccagtcaagttgacacataaaattacctactacaatgccattacagcttttgtttcattgatcctatgcagcaggtattattattttattttaagaggttggaaaatagaggttcaaatatagtaggtagtttggagtaacagaaaaggcaatggtttgaacctaagtcttaccagatcagtgccttgcccctgcccaacagcactcttgatctctgcctagtactttttttttgggggggggtgggtgggggagcggggacagagtctcactctgttgcccaggctggggtgcagtggagcaatcttggctcatcgcaacctccacctcccatctgcccagtactttaaacccaatttaaagtgcctgtgtttcagaatagtccccttttcgggtcactccttgaagtctagccaggaggacctgcccttggcctggcttcctctctgggctgtgttgtctgtaccttccctgtccttgcccctcaggttgtgtgacaatctgcagccccatatttaaaatcttgtttcttactcctccttcccccatagaggttctgttttcatccagccttcttcattggtaaggtgactctttcatgaagtctaaaccagatgtcttttataactgaatgaacacatgcaatatacctttatctccatcatttcatctgtcctgatattgaccacaactttgcaaagtacttgtggttctttgcaaagtacttaggttcaaacaccccttctacagatgaggggctgtctctgtgatattaggcaactaggtgcaggttacatagcaactaagtgcagctcagagctggagctgggtctggcttgtaggtttgtctgctcctccttttctctcatgtgtcataatcccgaagatgacaaggaaaaggacttgtgaaaatattgtccttctctttgaaaatccaaacaaggggataacagcgggagcttaaactccttcaagaaaaaatgacaagctctttgtcccttagacaaagaaaaggggaatatgtttctccattccaaatcccacattagtagagcttttatcactgatttactgtagacagacaaaatgtgaggattattgagaatgtcatcatcatgatttccattcttgaaccaaagggcagctactgaatactaactgcgtgccargcactgtggcactccaaaagaataataagtcaagttctttaccagcctggaaattcacatcccaatgctgccaggtgcaggcatgtaaataaataattacaagaagcatgcaatgagttctctaatagagctacctgcaagagcctgtagagcactgaagaaggacctagcaattgcytagggtgttatgttaggaatgcttacaatgagaatcagaaaactcaatatgcagtggcttaaaataaagtagggggtttgaatttcttacctgagaactctagagtaagcaaacacagacactggctcataggagagcaatgtgttgacctctcatggtcacaagatggctgtcatggttctagtcatcacatctctgtttacgatagaaaggtgagtgaagtgagaagaggacactagccatatgtgaacctttttattaggaaatcgaatgcttccctatgtaactttttgggcattcctaggtcacgtggccacccctggctgcaaggtagtctgggaaatcagagacttggatcatcatgattggcttggatcttgggtcatgatccattcacaggggcaggggacattgcaactacaaacaaagttagtgttctgttaggaagaatggggtggagggggagacacacaaggaggtgtcaatgtgagtgttcaggaaaagctttgcagaacatgtgcatttgagctcagccatgaaggatgagctggcattggtagaaaagaaggtaggaggccaggcgcggaggctcatgcctgtaatcccagcactttaggaggccgaggtgggcagatcaactgaggtcaggagtttgagaccagactggacaacatggcgaaacctcgtctctactaaaaatacaaaacatagccaggcgtggcggcgcatgcctgtagtcccagctactcgggaggctgaggcgggagaatcgcttaaaccggggaggtggagattgcagtgagctgagatcgcatcattgcactccagcctgggtgacaagattgagactctgtctcagaaaaaaaaaagaaaaagaagaaggaggaggaggaggargaaagaragagagagagragagaggaaggaaggaaggaaggaagaaaggaagagaaaagaaggtagggtattgtagagagaaaataaggacattctagcaagggggagagcacagggaaaggcacagcatcatgagagacaggtttaagaaatactaggattgccttttagcctggatatagagctggaatcataagtgggaggcagtttgcatcaggcctacctatcaggctaggtgttattctgtgggtcatagaaggtcagttggagtgttgagatggagacccattttctaatgcctcttatcccagtaacttggaagagataagatccatgttcttattcacctggccatttgcacacaggctctgatttcttcactgttttgcaccattaattacttttatgaaccctctggggtctaagtgcatcagaagtattggctggactctttccacagccttgtccttgcactgaggtcttgtttctgcctttgaactgctttcttctgtgcccttgatgggtgatagagtttctcgtgtctcctttaatcacatggacttctgctgccttcccagatgatgtttaagtttcctggacagtaatcaatttctgtcaattttctctggctcagtagaggccgactccaagtcggcacatatactcagcctttataggcatttcagatccaatcagatcacacccatggggcccctgatgcttggcagctcctgcagcccacctggcatgcaacttccatgcctccctctctctgcttcctgccagactggaggctctgcctgtgtatctgggaaatcctaaatcatcctgcagccttagtatcccaggggtgggtattagaaggggaaagtaggtttcatttctgatcctgtcatcttttgtcaatctcatgttcatttaatgatgacagatatgggagaaataagggacacagaattctaatttttctatctgcttgggttcaaatcctgactctcctactttctagctgtgtaacttcaggcaacgtgctaaacttttctcatctgacaggtaacatagtaagagcatcacttgtctcatagagttgtgtaaagagtaaatgagctatcagaagcaaagttttcagagcagtgcctggcatacagtaagtgtctgatacatgttagctgctaataataattattattattactacttgataatgtgcctcagaaagtggaacaagttatcacagattttcatcacaatccttgtagatccacatgcacttatcagctccttacaaaaatctattttgggtgcattctccagtgtcactctgtctcagatgtgaaagcctgtcaataaatgcctacaccaccagcttttcctgcccccaagccagcaatgatggctgatyctttccctcaagggaccaggacaagacattctttagcagtcaccagcttgctgcccccaagccaacaatgatgggtgatyctttccctcaagggaccaggacaagacattctttagcagtcaccagcttgctgcccccaagccaacaatgatgggtgattctttccctcaagggaccaagacgtaacatttcttagtagtcagacaagcactgataaaaatatatatatatatcagcaacacagatcctgagtcagattttcagagtgagagatgtggtttagtggaaagagcagtggcccaggagacagaagctggcctctacttctacctctgctgtgtgactctcggtaagtcactttccgactctgggtcttggtttctttccacttaatgcgcccttcccaggaaaaatcaccaacagcctctttaaatgcacgttatcatacttgtagtttaaaatggacagttttgtgataccttcctctctatctaagttgtaartttcaggaagagagtatggtctcttgtgtgtatctctgcattcacagcccccagatcagtgtctggcacaaaatcagtgctcatcttactatctgttgaataaataaatgagatataatagaaagaaaatcatttctgagtgtgatggttaaaactgagtgtcaacttgattggattgaaggatacagagtattgatcccaggtgtgtctgtgagggtattgccaaaagagattaacatttgagtcagtgggctggagaaggcaaatccacccttaatctggtgggcaacatctaatcagctgccagcaaatataaagcaggcagaaaaatgtgaaaaggagagactggcctagcctcccagcccacctctttctcccgtgctggatgcttcctgccctcaaacatcagactcagttttgggacttggactggctctctttgctcctcagcttgcagacagcctattgtgggaccttgtgatcgtgtaagttaagacttaataaactcctttatatatctaccctattagttccgtccctctagagaaccctgactaatatactgagcaagacagatctgattttgttttaagcttgagcatgtactcacttagtgaccctgggctagtctgaggctcagactcatcctctgtaaaatgaagataataatagaaatcaccataccaggttgttttgattgaatgtgatcccacaatcacattcatgaattttgagggagagtgggagacagtccattacatctactaagctattcaacccctgcaggagagagtaaggacagtagggggctactgaggaaasgtgagagctattttgtttcctctataatcccatgatcacattcaatgtagagaagtaaataataggtattatgtatttaatatcatatatatatatggatacatacatacataaaaaaccctggcctggccggatgcagatgctcaaagtgctgtaatcctarcmgtttgggaggctgaggcaggaggctcacttcagtttaggagtttgagaccagcctggacaacatagtgagacctaagctctacaaaaaataaacaaaattagctggacatggtggtgtgtgcctgtagtcccagccactcaggggaaggatcacttgagtctgggagattgaggctgcagtgagcccagattgcaccactgtactccagcctgggtgatacagcatagaccctgtctctaaaacaacaaacaaacaaacaaacaaaaaacaccagcctaatgtctagcatataatgggtattgaatacatggtagctatttaggttggtgcaaaagtaattgcagtttttgcaatttttaatggcgaaaaccgcaagtactttttgtaccaaactaaatattatttatttagatcctagcacaaggtaatggagtattctatgtcctgatgattaaaaactcaggtgcaaaatgtaaacctgaatataccttaacagatttttggatgggcttgccgatcagagggagctggatgggaaagcactcttcagaaccgcctttgcttgcctaagacctcgccatccactcccccatcttccttcttatgtaacaccagcacttgcctgtagtgaatacacaaactagacagatgcagagcgggatgaggcttgatgagctaacagacggcttgcggtgggttgtggggcaccaggagacctgggtcctagtcccaaccctgacttggcacagactcaccatgtgatgttgggcagactcatttctctgtaaatttcactctcctcatctgtaaaatgctcagccctttaggactagatatratagtagttaagaacctcaggtttgggcttcagagttgacttccagtctcagcactgcaacttaccagctgtgagatacaggcaagtcacataccatctccataaagtggacagtgggattcaaatgggcttgtttggaggatttaatgagaccatgtctcttaagtacctggcagatttgtgcacaatccattaagctttgtttgcggggtccataggccagcccttcttttcacttagtttaagtttctccctgttgaagaagcttaacatttcctcagtcagatccacatccatcaaccttcctgctggctcagcacttggcaagcaccggaatcattcgcaaagacgacacgatccccccactgggtgtgagtgacaccagcccacatgcaattattttaatgcatggcccaggatcttatgcccagatcaaatgtgttctcaggggagagtcttccctctcctacccttcaaaaggcacaagaagaaaagcacatattgcacactcatacgtccctgaaatgtaagcctcatcgaatagtttcatccctgccagccgtctctactctcctgaatgcggagtgcttgctttctgactgatggcggcaggaaggagaaaggagggcagaactccttccctgccccatctttgagagggtaggaaacccacacttatggaaccactctaacatggaagcactgagctaggcatttgtttaaccctcttacctacttgctgatccccaccttgcacttgaggaaacaggttccaagaagagaaacgagttgttcaaggacacacacagctaagtaaagagcatagctggaattcagacctcggctggtctgaggttcatagttcttactctggctactgtatcattcgttgttggttatgggagttcgtggggatgtggtttggaccaaataggtttccccataattcactgtgccatgagagagaaaactggtcttctagagcagtatttatccagccaacttcaatgggtattgctattgcacattgccaaaatagaggacagagggagctgggtcttccagtcctctcttcagatggcaggctctggaccctgctgcagactctcatagatggaacccaaccaaaggagggaaacaagaagtgactgagctgtggatacccagttccttccctcagtgtcgtagtccagtctggctgcttgatgtttatttctcagtttctggaggctgggaagtccaaggttagggcgctggcagatttggtgtctggtgagggcatgcctttcggttcatagtcagcaccttttccatctgtcttcacatggtggaagcaagcaagggagcactttggggtgtcttttctaagggcgctaatccactcacgagggttcttcccttgtgacctaatgacttctcgaagatcccacctcctaatgtcatcaccttggcgattaggctttccacatgtgaattttgtgggggaatgggagatagtccattacatttgatatactgttcaacccccacaggaggagagagtaaaggtagtagggggctattgagggaaaagctatttcatttcctctataatcagacaaagcatgaaacagaatgttttaaaagcttggcttctgtcctccacagtgtataggaaagaatgtgggcttgggaatcagacatgcttgtgtttgaagcctagctcccatgtttaccagcaaggtggccataggcaagtcacttcttcactgtttcttcccctttacgattgcatgccttgctagggtcattgtgaggactaaaagaagccaatgaatgtaaaactgctggtgaagtgttcaacccatgggtgagccccccaggagaaggctcccagtcaagggcatgagcagtggccactcagtacaggcttccctttcccgtcacaggtgtcccatggagggttctctggggactgtgctcaggtattcatgccgttgcactgggctgagccttgccttggtgtctgccaaggagcattgagaatatgatcatatatgaccagggccacctcacagtgcagtcctcatggggtctttccctggcttagctgtttttgatggtgtgtgatttccctcacctggactcaacctgtccccttggaccctctgcctccacccatcattcagggttcagcttatgtggctcaactgtgagaggccatctgattggcccagccatcagtctcctgggtccctgtgtgctgatctcagacacagtgcaagcccagtgagtagttaagcaggtggactctggaaccaggcttcagaggttccaagcctacttttctgtgaccacaggcaaattacagagtctttctgtgcctctacttccccatctgtaaaatggagttaataatcatgctgccccataggcctgttgtgcgtattaaataaamtaatacaaattatgtcttgctgatcatggttattctatagtaataatgaatcatttttaatactaacaatgaatgccaccagatattaataataaattaaggtgctttcttagaataaattttagtactattaaatattctaggccaggcgtggtagctcacacctgtaatcccagaactttgggaggccaaggtgggaggatcacttgagcccaggagtttgagaccagcctgggcaacatggcaaaaccccatctctacaaaatacaaaaacttagctgtgcatagtggcatgtgcctggtcccagctattcagagggctgaggtgggaggatcacctgagcccaggaggtcaaggctgcagtgagccaagagtgcactttgttatgaccatgtcataaacaaataaatattttataaatattttattgcttttcccagatttttttttcttgtgcatatcttgtctctccaatcaaactgtctacaaggccttctgtctcggctggaagttacagcggactcttaaccatcatcctaggctctagttttgcatctcccatcctgcgacttgcatcttcttcattatgaatagagtgatctttctgaaacctagagttacggatgttcctcctgctgaaaatctgcagtacctacagtctgagtgctgaccatgggcctctcaggtccagggcatgaccccacgacgccactaccaacatttttccgccccttgtgcggaaagaccccatatctttccgccccttgtgctccagctagagcacttgagttctcatgctccaaatgagccaccccaccccaacacaacacatcttccctctgtcccaggccctgtctccctcaagctccagcacaagcatcttcttctttgatgcttctctgatcattcttcagctctcatttcttcttcttctttttttttttttttttttattttttgagacggagtctcgctttgttgcccaggctggagtgcagtggtgcaatctcggcccaccgcaacctccacctcctgggttcaggtgattctcttgcctcagcctcctgagtagctgggattacaagcacctgccaccacgcccagctaatttttatatttttggtggagacagggtttcaccatgttggccaggctggtcttgaactcctgacctcaggtgatctgcccacctcagcctcccaaagtgctggcattacaggcatgagccaccgcacccggcctctcatttattcttgatcgtctctccattatcacattcaaattacctgtttgtggacacttttccccaactgaccatgagtgtgccaagggagggacccagtgtcctatgtctctggctgcttcccagccctctatactctaggcactcagtagtcagaaccagcatctactgagcacttaccatgtgctaggcattatttacatgctttataggcatgaacttgtttatttttcaaaaaagctttatgagacagtgtatcattcaacgtcctagctggaggcagaaaccacagcaattatttgaacagagaatttaatctttaaaaatagttataaggcataaagtgttcacttggtacaggaagcactaccctagagctgaagaaataggaggaggwggtaggaatgattaaaacctggggccaggacccagacctctaggatggcatcaccarccrattccagaggcagcatcackgggccgagaagtagggacagcgaagcgtgttctgartgtgggaaaaactgcagaatggatgtagctgctgctamaggaaggaggtgccactgctgggctgaaaaaatgggactagggtgatgcccacagggacaggaagcaacaggaggagcaagcgcctttctccccttccagacccttcatgtcccagtcatgctccctctgggtggcacctacaggcagcaggtggccaagcagaattagggtttgtagagtcgtggcctaagcrtcacatcttagggctgagagatgacaatgtaataactggcacagattattcccatttcacagatgaggaaactgaggcacagagattcagtcacttgtgtgagattaaargactacctagagcagagkcagggtttgatcccrggtgacctggcccccgagcccytacccttaaccactctgccaaaatgttgaatgagcgaatgagcagaccctcaaataatgcttagcccagtgctgagccatggcttcctacaggtgtgagggatccccaccccacccctgccatacctgaccacttccttatctccctgccaggtcattcactggaactcccccaagaagctccgggtgaagaacaagcatgtggagttttttcgcaacctctacctgaccttcctggagtatgacggcaatcttctgaggcgggaactgtttggctgccccagtgaggctgatgtcaacagtgaaaacgtaagtggctcgcaaggctgggcagggaaggggcggcttctctgctcatccatcaaggacctcccccatgccaggctctatgtcaggctcatggcaggacctaggtgaacacaacgccatcggtgcccagggtccaccatctagtcggggagagaggtacatcagcgggtcctttgcatgctcatcattgtggatgcagacagggtatgtttggtccagacgaggtgaagtcagaagtgagtttccaagcagaggaaacagaatgaacaaaaccaccagtgaaaggaaagatcaagtgtctctcatagccaggaaacaccaatgtttttgtggacatgatacccacatgggagaccctggattcagtgtagtcagtgcatggggaaacacaaaaagagcttttcacaagtaactggctcctttagggtgagcatgggtgaagacagtgttaggtaggtactaagtcaccgccatagctacagtctactatagctattcctgtttctctgtctcttcaccacttataatttgttcatatgctgtatctcatttgatgttcatagaaacccacttttttttttttttttgacagagtttcactctgtcacccaggctggagtgcagtggcgtgatcttggctcactgcaacctctgcctcccgggttcaagcgattctcccgcctcagcctcccaagtaattgggattacaggcatgcaccaccacacccggctaattttttgtatttttagtagagatggggtttcaccgtgttagccaggatggtctcgatctcctgacctcrtgatccgcctgccttggcctcccaaagtgctggaattacaggtgtgagccaccgcgcccggccagaaccgactttttagagttgagtaagttgaggcacagagagattaggcaggttgcccatggccccacaggaaacaaggagcaacgttgagactggttgtgagtttcttaggatatagagaagaggcactttaacagaaaaagcagggcatggggagtcaggctgacctgggtttggctttaattccttccagttactacctgtgtgatctcagataagtgactcaacctctgtgcttcattttcttcaactgtcaaatggagaataaaaacttttgtggggccaggcgcggtggctcacacctgtaatctcagcactttaggaggctgaggcaggcggatcacttgaggtcaggagtttaagacaagcctggctaacatggtgaaaccccatctctactaaaaatacaaaaattaccaggcatggtggcaggcacctataatcccagctactcgggaggctgaggtaggagaattgcttgaacccgggaggcggaggttacagtgagccgagatcatgccactacactcaagcctgggcaacaaagtgagactctctcaaaaacaacaacaataacaacaaacttacatgggatgttttgacagtagctgaaaagttgcatgcaaagcacctagcttggtgttggccctgtgttacatgcatagtcaatatttgcactctgctctttccttgacccttagtattagacacagaagtacctggttcattcctttaggcagcaaacatttactgaggaccttctacttattctgcacactaagtattcgtagatgaaaaaggactttggttcctgatctcatgatgtttatattctggtggaggagacacagttaataactaaactcgcagaaaacaatgatcagccagtggcaactgctacatagcaatatattagtgagcagctccactgrtttaaggatttctatgaggaggtgacgtttagtctgaaacctaaatgacatgaatgagcctcccagagaagagcaaagggagcacgttccaggtagaggaagtagctggtgcaaaggccctgaggcaggacaggttcggggtgtggaacagaaggatggccagtgtgcctaggagctagtrgggagggagggctcaggtaggcaggagccagattggtaggaggttgtatgttggatttcagattcagaattttgatttattgttgttgctgctgtttttatagttattttttatagttattttggatgtagtgagaattcttttaggctcccaatggcagggaagggcacctgtggaaggaccagaggcatgtactcgcctggccttttatcaggatgaccctggtcacagtgcgcccctgctctctgtgactgggtccccaagtcacagtggatcgccactggctctggcccttctccccatcaccctagaggccttctcagcatctgccctccttcgcatctagtgataaaggaaagaaaaccattaagcactggaactctttcagattctgggaagcacttagaggctcaacaaacactgttctttcagtttttccttcagttctctttgctcacatcagtatgtatcatcatcaagatttgagtgcccattcggcrcatttttgcaaacgttaaatggaaactgttctcctacctcgtttatttcccccctccatggagaaggctcccataaaaagccttgcaggatgaagccgtcagttaatcatttgtatcagtgcattcccatgccatgctgctgctcagtgttataagaaatgagactccttttatgagtgactcaccagcttttcctaccatctccttcccctggggggatcggcgaggtgaagaagtcgtcggtggtctttctcggaatccgtgaccatacttatttgctcaggaagaatgcgtgaatgctggccatctgccaggagccgtgtagctcacgggggttgaacttagagactgagcccacccctgtatgtaagtggcctgaagcttaacagctcttagagatgccaacaggaagggccgtctgggcccaggaggcccatgaatgagaaagcagcctgctctaagcagtcaccatggctgtcatcccagtctctctcccctctctcccttgaccactatgcatgggccacatccacctcctttctgtgctttctacattctgggctcaccatagggctttcgtgcttgctattcccactggcgggaacaccctgaccctctgtgtttaaatgtctcagctgtgacatcacagaaactttgcaatcccctacccccacacaaagtaatccattaagtcactgtytatgacatgccctgtttctttttgtttggtgttttttttttttgtttttttttttttgagacagagtcttgctctgtcgccaggctagagtgcagtggcgcgatctcagctcactgtaacctccgcctctccggttcaagcaattctgcttcagcttcctgagtagccagggctacaggtgcacaccaccatgcccagctaatttttgtatttttagtagacacagggtttcaccatgttggccaggatggtcttgatcatgatcacctttcatgatccacctgcctcggcctcccaaagtgctgggattacaggcatgagccaccgcgcctggctttttttttgagacggaatctcgcactgtcgccccagctggagtgcagtgccgcgatctcggctcatggcaacctctccctcccagattcaagcaattcttcttggctcagcctcccaagtagctggaatcagaggtgcctgccaccatacccggctaactttttttgtatttttagtagagacaggttttcgctgtgtcggccaggctggtctcgaactcctgacctcaggtgatccacccacctcagcctcccaaagtgctgggattacaggcatgagccactgcacccagcccctgttttctttttgtcagagcatctactcctgtttacaattacctggttcatatgttcgtttcctacattttttcataaatgtaataccaaaacataagactcttaaagactttgtactgttcacctctgaggttctccgtcctaacataggatagaaccaagcacataataagcacctaataaatatttattgagtgaatgtactaagtaaatttaagaagtaagaatgaattaccaccaagtaaagggaagagcagatgaagaagtgaactgttaaaagagaacatgctggaagttcatgtaccagagcacaggcatgttgggggcatggctaggaacaaagctgaccaggaggcgccctgactgtgctgagaagcttggagtttctcctcagggcagtgaggagccactgaagggttttggtgatgggcagatttatattagagaaaaatcactcaaggtagaggatgaaatgaaaaagacaaaactggagggaccacttaaaggacattgccccggcccagcacagtggctcacgcctgtaatcccagcattttgggaggctgaggtgggcggatcatgaggtcaggagatcgagaccatcctggctaacacggtgaaaccctgtctctctaaaaatacaaaaaaatagccgagcttggtggtgggcgcctgtagtgggcgcctgtagtcccagctactcaggaggctgaggcaggagaatggcatgaacccgggaggcagagcttgcagtgagccgagatcacgccactgcactccagcctgggtgacagagtgagactccgtccaaaaaaaaaaaaggacattgccccatcccaggcaaaaacatgatggatggggctctgatctctaggacagttgcggtgggaatggagagagcagatggattgttttgtgggtactaagaacatgagagtaggtgcagctagcactcataagtcaagacaagcaggttcctgtacactgctccagccctgttcctctgctggctggggctggggctggggctggagctggggcaaagagagagtctgtaaacattgcactcctgaaccacagctctgtagggagtttaccacctggtcttccgcagcgygtcaagtgttatctgcagacacaaccagagggaaagggtatgatctyggatccagcccaaagcctatgctcccagctctgtgggaagaggtcattagagctgtgataagtgcacagatggtggtgagtctgaaagaaaccaagtcaggaacctcttctttggacttgagatcctagatgggagcaggctctgatggcagtgtmtaagtgacttaagactcctttcatccactgtattagtccattttcacgctgctgataaagacatacctgagactgggtaatttataaaggaaagaggtttaattgactcacagttccacatggctggggaggcctcacaatcatggcggaagagcaagggacgtcttacacagtggcaggcaagagagagaatgagaaccgagtgaaaggggtttccccttataaaaccatcagatctcatgagacttattcactatcatgagaccagtatagggggaacctgcccccatgattcagttaactcccactgtgtccctcccacaacatgtagcaattatgggagctacaattcaagatgagatttgggtggggacacagccaaaccatatcatccacccagctgataattcaggtagtcgccagacacagggctagtgttctagcaggcagcattgcagattaaagytcggctcttgcagtsactgttgagtgagggttacagacaagcagaggattattaagtagtgcggttagtgccaaaatagtggtagtgctttgagagcacacgggaagggcattttacacaactagggagagaaggtgcatcgaggaagacttcctggaggaggtgagatttaaaggttgaataagtaggagtgaaggagtctgaagggtaaacttggtgggtgggagggagcaacatgagcactggagaccaggagccaacacaagcatgatcactcgaggacctgctgggagttgagagtcaaatgaagtyagtgtgagaactataaaaatggctgcacaggccaggtgcggtggctcacgccggtaatcccagcactttgggaggccgaggcgggcagatcacctgaggtcaggagttcaagaccagcctggctaacatggcgaaaccccgtctctactaaaagtacaaaaagtagctgggcatggtggcacatgtctgtaatcccaggtactcgggaggctgagacaggagaatcgcttgaacctgggaggcagaggatgcagtgagccgaaatcatgccattgcactccagcctgggcaacaagagcaagactccgtcaaaaaaaaaaaaaaagataagaagagaaagagagagagaaagaaagaaaagaaagagctgcacaagttaatttttgcattattttaactttttcactgggaaattgataatgacaacaagagtatgagctctctggtaatctgaatcgctcatttaatagacacatgacctcagagaagtcacctaaatgctctgagccttgggtttaccatctgagaaatgggtacatgacaccattgccatggggttttatgaacaattgaaggccaaaaaagaaggacttggcaccaggaacacagtgtgccttgggatgagtttcttcacagaccccaatgcctgacccatgtgatcataatccactgttccacacataggctttaggttttattagcaactctggtaaaaagacgtagcagagaagggaacctgtagagtctctgagaaatctgtctgtaaagcatgtgagagggtgtcacatttgctctaagtcaaacaatccccagtatccccactgattcggaaattcagggtaggaagaagaggctatttggtttgccttgctgccaaaataaaaataaggacatccagtcagggatgtaattcttcatcaaggagccaagatgtgaggggcagagcgccatttcagagccactggttgggctrcttgctctaggacaagacagtttgatttgcaagagaacaggctcccccagtgctatggaatgacagtagctaattggtcacagccrcttgtctctcatagtttgggcatctctccctggaacttgtaaattctttatgtagtgcagtaagcatttggtatgcattggttattatgagttgattgattgacatagggatggaggttagaattctataccttagcatttctctcccttttcctcaacaacscagcycctcaagaatatccaagaaatggcagggtgcggtagctcatgcctataatccttgcacttttggaggcagaggcacaaggattgtttgagcccagaagtttaaggttgaagtgagctatgatcgatccgctatactccagcctgtgtgatggagtaaaacccagtccctaaaattaaattaaattaaattaaatttataaaagaatatccaagaaaccccaggactcttccagaacatagttggataatcagagctattctctaccgttttttctattcagaatccttccacagtatccctaataggcttgcatctggcttctgctgaaattctcccaaagacagagagccaccttccaaggcagcttactctgctattggaaagctccagatgctaaattgttctacctcatgttgggctgaaatattcccttctgtaaagaacccactgatctgagccctgtcctctggagtctaggttttgttgggtttttttttgttgttctgtttttttaatgaaacataaggaaataaggatccttccacctccctagtacctgacagcccagaagatagcatagaaagtttccattcagtttgctatttagaaacatgcaatgctccctaagtattgtatttgtagggtgatgctttatcatcaagagggtcttgctccacctaagggaatttccaactaaaggaacctcatctttttaaatgcaaaaaccattaaaatagatgggttttaaccaatttggacaggaaacttgctgctaaagtgtatgccgttcctttagtaagcaaacactaaactcagtttagtattaaactaagtttacaatatttgatgactgtggttacattgaaaaggctggaggaggtggagggggttgtccagaggaggaaagatactgtttaacctggcaggaaatggccccagactgttcactgcttattctgtggattcctttctgacagctgtcactttctgcttatcagcttcagaacaaccctttctgggctcgcctccttgttccttctttccaaggcagccaacgcccccttccccccacaaaaaaaaaacccacaaaggtatttaatttagaaagactgatggtaaaagaatgatctgttgttatgttaaaagctagattatgaaacataccaaacatccacaaactacaaaaaaaaatacactggacaccaatgaatttttgaatgtatatggaattgtaagtcaacagccagtgtctccaacccctgcccacagcagacatcactaattgatgactgcattattcacctatgcccagcttctttatcctcctcaaaacagcactctgagtaatcagtattggtctcctagcctcctagtgatagcagggaaccaaagcctgctgggtatccctacgataggtattagtcattctggtctctcctgcatgagcacagctctttgtgctgttctaagacctttctctgcttgcctctagcttttgggaattggaaattttctacagggaaagaaagagaaagggaaatacaactttaatcttcaccacaaagagtgggagtcattatgagtcacatttcacagataaggaaaggaaggcttcaaagaaatgatttacttgttcaagaccacacaactcctaagtgctggggccgtgattagaaaccaggtctacctaactctaaagccacaagacaaggaagtgcttcccaaatggatgtagctatgtatgtcatattaatgtaatagtaagttacattattacatatatccaggttattccacaattctcctagttgttatatggatacggttttcttactctttcactaacccttcaaggtagttcctgttatctccttttttattatttatttgttttattttattattattattattattattattattttgagagagagtctcgctctgtcacccaggctagagtgcagtggcacaatgtyggctcactgcaacctccgcctcccgggttcaagcaattctctgcctcagcctctcgagtagctgggattacaggcacctgccaccatgccaggctaatttttgtatttttaatagagctggggtttcaccatcttggtcaggctggtcttgaactcctgacctcgtgatccacccacctcrgcctcccaaagtgctgggattacaggcgcgagccactgctgttatctccattttatacagaaggaaatagaagctcagagaggtgaattcatagaacacgttggtggcagggctgaagccggtatcaagccctgattcatagttgagtggtctctctacgactatttaaaatactcctctatctaaaattgcaatgcctgtcccataccccagcactccctctctccagggctccttcatttttctccatagtacttatcactaatataatcatgacttatttatttttgttgatcatgtctctacccactagaatgtaagctctgtgactacggggctttttatctgttttattcatcagtacatcttcattaaagagtgcctggcaccagatccatgctcaataaatcttgttgaacaaatgaactataacaagtccttttcttgaagcatttgtggtgtgccagaagcatccctccacttggactcagaaaatttggcccaagctgggaatagtggctcatacctgtaatcccagcactttgagaggctgaggcaggaagatcacttgagccccaggagttctagaccaacccaggcaccatagtgagacctcgtctctgtgaaaaataagcaaaccacacatgcctgtggtcctagctactcaggaggttgtggtgggaggatcacttgagcctgggaggtcgaggctgcagtgaatcgagacggcaccaccacactctagcctgagcgacagagcaagaccccgtggccctagaccagatctatgattttaggcataactctagccttacatgaacctcggttttcccatctgtaaaatggtcagtaaatgcacccacaccaggctatttgaggaaagttaaaggggttaaagtattcaaagtgctgcaccatctaggcagttattgttacgagtattttccagaaagcttgtcttggatacccgctctctcaactgctgggagatcactgcctcacctctgaaatgaagaaggcttccaagcttaactctctcaygctatgaaggtgacaggccacttccaaggccacgttccctgacactaagcctgctaagaggaaaaaacaacagcatcacctcaactagaagttaaaaataagacacatataaacagattctataacattgtatggcatcaccctgcaagacaatgccaagaaacagatggctctgtggaaacagctgtatctcagaagaatcccggagaaagcccagaatgcattcctgctctcacgtgcgagccgcatgtcgccaactcttcagtcacgcagcaggcagcagagcccaggatggacagacccaaaaccctaagacaggctaggctgctcaaggccagtctccaaaggaccctccaggaatgtgttaagctccagagagagggggwgaagggaagaggagctgtgggatcaagagactcagtggatacaagtctgggccacggtttccccttgtggcctggctgctttgatcctgttcagctgcaacttacacagagccctgtttgacccctctaggcactggttgtcatctctctgcacttgccaggtgttcggccctcccttgtctataaagcagctccctcccttcctctcctttcyaccatatctccctttctcaagtggcatctcttacttgtgcagtagataagaaggcagctctggaatgaggctgcctcatgtgaaatcccagctggactgccagctgtgggattcctggtgatctgcttaaactccctgcacctcagttttctcatctgtacgatggaaattagttattcctatctgatagacttaagaggaatcaataaagtaagacagggccaggagcttagaacaatgtggcagatggcaaaggccccccagaattaaggtttgtgttgtgattgcactgtgtttgtaattagtgactggcttcattgcctctcctcctagaccataggaataatacaagtgcagaagcaggagctcattccccattcctagcacaagacttggcataaaataagagcctatgaattgtatgtgatgcgtgaattaatactgataactgggagggaggagaccaagcctttttcttatctcctccaagtcgaggtcagggctgggcagaccctctctgaaccttcactcaacagtcctgaatgcagccccctacctccctgcaaaagaatgaaaatggactcatagtttggtttccttagtaaaaaaatgctttgggttcctggaacttgttgattaatacacacagcaggcaacgaggaaggtcgtgagctttttctgcctgtctgtgtggcttaataagatgtaactgctttgtggaaaccacagggacaagctctgggttaggtttcaggagaccagagttggagccccagcttctctgagcaccttgggccctcatctgtcaactgagggccctaagggcagccttgcctgtctcatgcaagcgctggggaggagtaaaaatgaaatagtggatacgaagccaccaaaaagtgaaagcaagttgaaagtgcaaagcaacatgcttgagtggtaatttccccatcagtgatttcacccattgccccaagacatcagaaggaggggtgtcacaggaaggaagaaacggggcctccttaattggtccatcgtactatgtctccatcacttacaggctacaagcattcaaatgtgcctgttagtcaaggtagcacaagcagctgtaatgtggctcaacctgctggaaccttgcagaaagtccacatgggtgttcatgattggcaggtagtttttctgcaggttgaaggacccaggctccttttgtcttgtggctctgccctccacagaaccccagcctgctctacaggattctcttgctctggctgtcagccaagaaaagaaggcgaataaaatttgttcctgagcaaggcttcagagtggtgcctgtactagccagagcctttccagactccagtggccasagctgtatcacagagttattcttaactgcaaggaggctggagatacagcctagctctgtgcccaggaagagagcaaaatatggatattggtgagcacaggatgtttctgccaccatgtgaaatacatgtgttgagtcctctgcagtcacagaatcgtttactgttagaactagaaagaagcccagaggctgaccaactaggcattgtagtgagttggttacctgcaagaattcagaggaaatacacctgggtttgaatctcagctactctgttcgcgcattgtataaccttaagcaatggctaaacctttcagatgatggatgtcttcttctactaaagaggactaagagtggttcttgatctgtagagttgatgtgagtcttacatgagaaagaacctgcaaagctctccccactttacctgacccagtgagtgcgtgatccttgagcgtcactttaggaagtccaaaccctttgtcttactaattcagagacatgacttgctcaaggtcgcatagaaaatgagtgtcagagatatcaggtctcgcttttcagttatccccataatctcactccttagtttgcgcaactgtgaacagaagtctctaaggccagagcacaggatgcacttgtactccctctggatcctcaggtataaccagccatcatttccagcagctcaaaaagtcagtctaggccactgtccttaaagatgaggagaaataaatgcaaactgcctaacgggccattttcccttgggtccaaatttccctstgcctcagctggctgcccaaagaagcagtttagcaaatgcattttatctcaggagaaatctgtcttttgtttctgtgcctcccttgtcaggagccctctgttccctgtggcagtggccagagagcagagtacagtagcattcagaccctgttaatgaaatactccctccggctccatggctccccagagaaattacccaaaccctgggtgaaaaggaggcaggttttgtttttggcttttttgttgtttgttttggggggggggttgtttgtttttggctttttgtttttgttttttttggcttttttttttttttttttttttttttttttgagatggagtcttggtctgttgcccagactggagtgcaatgacatgatctcagcttactgcaacctccacctcctgggttcaagctgttctgccttagcctcccgagtagatggggttacaggcacccaccaccacacctggctaatttttgtatttttagtagagatggggtttccccacgttggccaggctggtctcgaactcccgacctcaggtgatccacccgcctcagcttcccaaagtattgggattataggcgtgagccaccgcatctggccaaggaggcagtttctaaactgctagagtctccccattgagataacattagccacgcagtcaggaataagcgagcctaaattagaatttgaaaaggtacataatataatcataaccacattgcttaggtttgggtagcactttacagttcacaaagcagttttacgtgcattagctcatttgagaaaattgcagggaattagttaactacagaaaagtttaagaagccaataaaattcatctgtgaatccaccactcagaaaatctttgttaacattataatgtgttcccttctttttttgagtgggtttttctttttcctttcgtctttttcctgcactgggaccacagttttttatggcctgcttcgttcatggaacattgtgtcttccaccatctcatttgattctcacctccatctcctgggaagaagtaattgtgttgtgaaatgtccctggtttgaggtccgaagactggattcccatcctggacttcttctcgctcactgaagcagattactgaaagctcctgagccttagtttcctcctttgtacaacagatatgtgtgctgaaggattaaattgatgaagcaatgcacctgaaaacatttagcattgcgccagtcacatagtaggtacccagttagtattaggtggatcaaggtgcaaagcaccatgtagaggagaaatgaacatgcaagttcaaggatggcttctggttgccccagagtcctgtggacaggtacgtctgacagcatacctttctttctttcctgttttgtttttgttttttgttgttgtttttgtttttgatggtggtggttgttttttgagacagagcctcactctgtcacccaggctggagtgcaatggcgtgatctcggctcactgcaaccatcccctcccaggttcaaacgattctcctgcctcagcctcccaagtagctgggactagaggcgcacgccactgcacccagctaattttttgtatttttagtagagacggggtttcacggtgttagccagaatggtctcgatctcctgacctcatgatccgccttccttcgcctcccaaagtgctgggattacaggcatgagccacggtgcccggccaccttttttttctacaatacccactgtggttggtaaatgacaatattccctagataataccctttatacactgcagcaagggctgcaagtgagcttgggatgtggatgccaccaaatcccattattggtaccatgaagttcagagctggaggtggcctcttctccaggactgccctagtccatcccactagggcaaggtgtactttggaagtcctcggagcatctccgttgaccagtactccctctcctaacatacaggggctgaggacatccaacagaggcttgctgaacatccaagatggatcacatcagccacgcagtcagcaataagcaagcctaggttaggatttgaaaaggtacatgatataatcataaccacattgcttaagtttctgcagcactttagagtttacaaaacacttgacatgcattagctcatttgagaaaaatgcagggaattaattaactacagaaaagtataaagaagccaataaaattcatctgtgaatccmccactcagaaaatctttgttaacattggatatagaacctggatattgctaggttcagatggttcagaaatgaaggggatacagctcctgctgttaggagctcaccatatggatgctttttagaaagtggttcctggagccatttacctgggaatgtctttttccccaactcaagggtatgtacctgtgtgtgcatataaagagaaggagaggccagacgcagtagctcatgcccgtaatctcagcactttgggaggccgaggcnggtggatcacctgaggtcaggagttcaagaccagcctggccaacatggtgaaactctgtctctactaaaaatacaaaaattagctgggcatggtggtgcgcacctgtaatcccagctactaggaaggctgaggcaggagaatcgcttgaacccgggaggcagaggttgcagtgagccgagatcgtgccactgtactccaacctgggcractgagtgagactccatcttagtcaatcaaccagtcagtcagtaaaggggatgagaaacccccatacatgcatgtgtttctcattctccactcactaatgcccattttcacatggtgaggaccagctacttgtctgaagcctcatcaaagaaggacccatttctccacacacatttgcctacccacgctcacacccacgcatcacacacatttccactgtcctcttcattgaactggaagcccttcattcttctgagcatattaaaacagaaaccaaaaccaaaggaaaaaaaagccaaccctgctcttgcaaagaattttgtagatgtttagtctccagtggaggataatttcttgtgctcttctgcagtgtgggtgagggagtttaggagcatagcagttggttacgttttctgccgggaggtaacattatggtttataggcatattttaggccctcaaggggaaagccagggggactccctctaatatgtatgaatcagaagggccaccctggctcatccagcccctaccatccctgcccaccaggatcttgccatacagtctccttcaggtgaggtttgaggacaaaaagtatccacataggtgtcttcaggggcccaggtgtttccctttcctgtgataatcactatgataataggtgacatctgttgaatgttttcttcaaccgctgttttctctatatgcagcatctttcagaatccttctataaccttctggggtagtgagttttgtcgtcctcattttacagctgaggaccctgaagctcagaaaggttaggtcactcacccacttacctgagatgatccaggcagaatgggttagaaccagtgtccttagccactgtgctgcatctgcgtcttcacatgaggccaagcaggcatctttcctgaagcagcagcatggtggtggaggggcacagacccaggtttgacacctccacccttctcaactgttggatgaggctgccagtgactcaccgggggctctggggaggagaggaaatcacctgtacccagcaccttacgtggagcttggcacatgcttgtttgctctccaaaagcttttcagccgtcacagacccttggatgcaaatattgaagcaaatcataggctgaagaatgggcttattgatcaccttctgtgcatataattagaggacacaaaaggaaaattgaaaggatagtcttaacttcacagtgattacaggttttttgtatacagcaaatatttttcaggcatgcaacacatgatattagcacctgtcacaagccaggcayggtgctcaggacaatggtaaaatgtcacagtctcaccgggaaagttgccgttaaataatttcagtttaagttgacaagtgctttaatggagttacgaactgagtgctcttggagcgcagagaagaaacggattgcttctacccagcaggatctgcagaggtctcacagagcaggtgccatctgggctgaatcttgaaaggtaaatggaaggttttttaggtggaggagagtggagtgaagtgagggagggcatccccgagagggaagagcatggcacggaacaaagtcacggaggtgtgagggaaaggcagatttggggagcacacagaccaatgatgaggccacagagtgtgggggtgatgggtcagagagagcagcccgtaattgtcaacaaggaaatctggatttaatcatacaggtcagaaggaagcagtggggtcatagatcttagatggaatgagaatttcagcttccttgtcttatattaaactgttggcatggtgagaatcttcaaataggcagggacagcaaattgacttgaaaagctgaatatccctaattgcatccttttaacggttaaaaattttagagatagttgacagtgtctcacagatgattggatctcagccagtttcccaagctgcatttggaaatgttcaagtacatttggagcatcacagggctgtctggagaatgctataagcatttggtgggcaggagctcgggaggttgattgtccttcaatatgtggtacaggtccccataataaaaaagtgccccccacaaaataccaatagcactctatcagtatctattgctcagaaccagtaagatctcagtggccttcaagaagcatttattggccgggcgcggtagctcacgcctgtaatctcaacactttgggagggttcggtgggtggactgcctgaggtcaggagttcaagaccagcctggccaacatagtgaaaccctgtctctattaaaaatacagaaattagccgggcrtggtggtgagtgcctgtgatcacagctactcgggaggctgaggccagagaatcacttgaacccgggaggcagaggttgcagtgagctgagatcgcgtcactgcactccagcctgggcaacagagctagactctgtctcaaaaaaaataagtagtatttattgaggcagctgggccaggctggcttgcatgactttggcaattggggaggagctgctctgccccagatgtctcatcttccagcaagctagcctcggcatcttctcatggcaatggtaggggtgcaagaaacactttctcttgaggtctagcctcaagactgagacaatattacttcccctgctttttgttaacaaaaatacatcatgattctagcccttattcaaggctagagaaataaactgtgcckctttagtaagcaccactgcaaaggacaaggatatctggggtggcggggagtgggggagagagaaggaattggagcaattaatgccatcatcttccatagcacacatcttgagaaataatgccatcaagtaatctgtcaaggcaatggtcttaacaggtacaaagctctacagaagcaagttaatatattttcttattgactgctacactgttgatttggtgatttaaaaaagtacaccttcttggaaaaacattctatggtattcagctaggttggtaacccttgccatgtaaacttttgtctgtattctatcgtgtgatagacaaggctgatttaacagaaaaaaaaaaatggaaccagccctcctgtgacctttggcaaattatcatttttttttaatatactttaagttttagggtacatgtgcacaatgtgccggttagttacatatgtatacatgtgccatgttggtgtgctgcacccattaactcatcatttaacattaggtatatctcctaatgctatccctcccctctcccccaaccccacaacaggccccggtgtgtgatgttccccttcctgtgtccctgtgactacaatagcaaagacttggaaccaagccaaatgtccaacagtgatagattggattaagaaaatgtggcacatatacaccatggaatactatgcagccataaaaaatgatgagttcatgtcctttgtagggacatgggtgaagctggaaaccatcattctcagcaaactatcgcaaggacaaaaaaccaaacaccgcatgttctcactcataggtgggaattgaacaatgagaacaaattatcattttttaaaagtttgtttttatggaaatacagattgcctccgacaagtcctcccattctttttttttttttttgagatggagtctcgctctgtcgcccaggctggcatgcagtgtcatgatcttggctcactgcaacctctgccccctgggttcaagcaattctctgcctcagcctcccgagtagctgggattagagatgcccgccaccatgtccggctaattttttgtgtttttagtagagacggggtgtcaccatcttggccaagctggtcttaaactcctgacctcgtgatccacctgcctcagcctcccaaagtgctgggattacaggcgtgagccaccgtgcctggccaagtcctcccattctaagtgcacagtttgttgaattttcacgaaagtgcacatccatgtacccatcgctccagtcatggtggagcgggtttctgtcactcccagccctctcttgcctcttcccaggcttcactcccccaccccacatgcccgagtccaatttttgtcactgtggattagctttttgctaagttgtgtcactttttaatttcagttcttcatctgtaaaacatacatcatacctgcctggtagggrttcacatgagaccgtgtctgttgggcagctgcagatttgcacatctgtgtatctgcctctgcatatctgaaatgttatcttcttagctccctgtcagcaggtgtgcctgctcttttcacaagttggtgaaggaagagagaagtacagctagttaaacaacttctacaagcagattaatgaagtaagactttcagagagttcaaagaaagaaaagagaaaaaagtacgggtgccaagattctgattaaacttaggtgaaatgaaaggaaaagagtttctgttttgttaacgtgctaagttttgttttgttttgtttttttccgagacctagtacaaaaattgaaatcagtagctctagggagagaaaagcatcaggtcatacggaggtccttgtcagttttgagcgttttcttctttgggcattttcctgtgtaatttttatttttatttgttttatttgttttttgtttgtttgtttgtttgttttgagttggagtctcactctgtcacccaggctggaaggcagtggtgcgatctcagctcactgcaacctctgcctcctgggttcaggagattctcctgcctcagcctcctgagtaggtgggattacaggtgtccgccaccatgcccggctaatttttgtattttttgtggagacagggtttccccacgttggccagggtggtctcgaactcctgacctcaggtgatccagccaccttggcctcccaaagtgccgggattacaggcatgagccaccgtgcccagcccattttcccatgttatttgaaattgttatgctgagttgtctaggaaaacatttctcatttgtttctaaggagtttatggttggttatatgtttttcagtgagcaccacctttgttcttagctaagaggggactcatttctcaggtgttaaaggcatcctcttttttttgtttttttctttgtttgtttttgttttgaaacagggttttgctctgtagcctaggctggagtgcagtggtgccatctcagctcactgcagcctccatgtcccgggctcaggtgattctcccacctcagcctcctgagtagcactacagccacacacctccatgtccggctaatttttctattttcagtagagacagggttttgcctggttgcccaggttggtctcgaactctcaggctcaagcgatctgctcgccttggcctcccaaagtgctgacattacaggtgtgagccaccacagccrgtccccaggcatctgatttttaccatcacctttttgaaattagattaagttgcagagggaaataaaagtggtgatcccttccatgtacgtcagacccatcaacaacgtcctgatgggtaataaactcaggggagggcagggctcaaggggcaagctcatgggccccctcggacctcttcttcacgtgcccaagccctctctcctaccctgcagctccagaagcagctgtctgagctggacgaggacgacctgtgctatgagttccggcgagagcgcttcactgtccaccgcacccacctgtacttcctgcactacgagtatgagcctgcagcagacagcacggacgtcaccctggtcgctcagctgtccatggacaggtatggcagacggcctcacccaccccagtctcctcaccgcggctgttacatggaggatagagaatggagaagggtgtgcctgcttcccagtgcatctgctaaaattggaggatggagcaggaagagatggcacatgggcttagaatattgaagcctgggccgggcacggtggctcacacctgtaatcctagcactttgggagccccaggcaggcagatcacaaggtcaggagttctagaccagcctggccaacatggtgaaaccccgtctctactaaaaatacgaaaattagctgggcatggtggtgtgcgcctgtaatcccagctactggggaggctgaggcaggagaatggcttgaacccaagaggcagaggttgcagtgagccaagatcgtgacactgcactccagcctgggtgacagagcacggctccatctttaaaaaaaagaaaaaaaaagagtactgataagggtgagctgtgtcacatccctaccacctccccagcaccgaaaaccaagggctcttaccttatcattgtctgaggatagatgaaaggatcgattcttaagaagtagagcccgactcgaattacctcaggaagagggacagtggggagactggagctacaattgcggctggaaagcaacgctgtttcttttccttctatgtgtattgatgaagcaaacatccatcaagcatttccaggcagtacggacatgagccccgccctgatgtagcttacaagccaatgcactgcttctcaaccttgtccagggagattgaatcacctcgggagttgtataacacgttcacatccaggctcccttgcagagcagttaagtaaggacctttgtaggatagagcccttggcattgttttgttttaagcttataacgtgtagccagggctgagaatatggagctagtcacataaacagcaatacacgcctcccgggttcacaccattcttctgcctcagcctcccgagtagctggractgcaggcaccagccaccatgcccagctaattttttgtatttttagtagagacagagtttcatcgtgttggcctggatagtctcgatctcctgacctcgtgatcctcccacctgagcttcccaaagtgctgggattacaagtgtgagcccctgcacctatcccaatttatatatttttaaaaacatctctggctgccaagaagtgaatggatttgaagccccaaggtcactcagccagggctacatggcttttctatacttggccattccaggtgccccttcccaccttgtcagactggcttccgcttcaatttacacatggcccacagtggctgcccttaccccaactccctcacatgtcatcccccctcagctcctacaattaggaaggaagtttgattcctcattctgtcttttgagccacatcagagatgcctatccagcctatgggtgagattccatgggattgttctaaggattaaatgagctaatgcctgtacagtgccgagaacagtgcctggcacataagtgttccataaataccaggtgttattagtcatgaatgactgaagaatggacaaactgatgaaagaacaaacacctggatgcaaaaacgttttcataaaggcacttgagagctccaggaagtgagaggaacctggcgctggaggcaacgtggaatgattcatgttgagggtggctcagggaagtggattccttgctctgtgagtcccgccacatgcaagcaaatgaccacatgcataattcaatggcttcaggggccggcggtctcttggggattcacaggctccaaaagaacttggagaaaggccactgggactcctgtgcacagagaacttgbggatcctagcaggtaacaggtaaagacagcatgggacaaaagagcaagggacaagcatggaggctctagcaccaggtccatgcttgacctgctgtgagggccctggcgagccctgtcccttcttgggcccacagttttctcatctccacatccacatgatcactcggcaaataccgctcaccgttctgcaccaggcacttagtgggaggggaatatgtgttaaaagacctatccctgtcttcaaggagtatgcagcctatgtggggctcaggcaccccattcgttttctgttgttaggtgacaaagtaccacacattgagcagcttaaaaagtacacctttgttaccttgtggccactatgggtcaggaatctggaagatgttagcagggccctctgcccagggtctcaggactgaaatctcaagggattatccagggctgggatgtcatctggggattggcatccacatccaagctcatttgggttggagcagaawtcagttccaggatggaggtcccatttccttgctggctgttgatgggtgtccccctcagctcctcgaagccacgctcagttcctagccatgcagccccctccctgcagggcagcccacttcttcaaggccagcaggagaatctctctggcccctgaccctggagtcttctataacatcacatgatcacaatgtgatattcagaagccctgcccacacccaagagggcgataacacagggcatgtccgccagcggggcgggaatctggggggtccctcatagaactctgcctgtcactgacaggtaaacaggtctacagtaggatgtttagttctgagtgtcgtgcaggaggtgcaccgattctatgagagcccaaggaagtggagaaaggaaaaggcagggaatgtgtccgaggggaggtagtacctgagttgagttggaggctgagtggactgagagtagaaggcacagaaggagagaaggagggctccccgagatagagcgtgcagcatgttcacgggacagagaagacgtcagggccagtggggaacacaatagtaaggtgtggttagggcttagggtgtaggagggagaaagaggagatcaaatacacatggccaggtaggcaagggctggatcacagagggcctcagggaaaccaggggaggtggccagcccttccagctcaaatctggcatcctgtgtgtctccatagggacacccaactggtgtcccagagtcacccctaaaattctcaggtccctttggcctctcacccagatttcagtttggacacctaggctccccaccactaagcatcaggaagccacctcaccacaaagtccctcttttcacatatrtgtttccttctcctccatggcatttatagtaaaaagaaaatggaatactccatgtcagtgctgaatgatggtctagattggtctctttcaactgcatctgtcccctcccgtgagctaactgaaactcaggtactataatccatgcaagtgagagggtttcacttaaagccaggtgcccrtttctccaaccatcactggctctctgttgcattcaggcctcctgataatgcattcagattatcagcaaaatattctgagtcaatattagtggccagtggctaccaaagaaatctgatatactttctaatcaaagtaaagagtagcataacagtgaatgacacttggtccctggagtcaggcactgtgggttctttgttgccctgtcactttgtttttggacaagtcacttaacttttttttttttttttttttttgagacagagtcttgcggtgtcgccaggccagagtgcagtgttgcaatctcggctcactgcagccttccccttctgggttcgagcgattctcccgcctcaacctcccaatagctgggactacaggcgcgcaccaccaggcccagctaactttgtatttttagtagagacggggtttcaccatgttggccagcatggtctcaatctcttgacttcgtgatctgcccaccttggcctcccaaagtgcatcacttaacttctttaagcctcagtttcttcatctgtgatctgaaagtggtaactgtatcattatcctcatccctaaggttgttacaaagatcagatgagagaaggcgtgccagtgcttagtcctgacatacattcagaggctcccagaatgataccagtactgttgaccagaatcttaatatttgtgatattgggtaaaaaggcactagacggaaggacagagagctccgggttcaaatcccaccaactcattcaatcctcagctggtgttctgggcaagtcacttaacatctttgggtttccgtttcctccttctataaaagaaggataaaattacttgcctcatagggtcctgtttaggagtaaataagagatcctctataaaagccctgagcacatatttgacatccagtaaatactggctagatctgaacatccttacgaaggcatgtgcacatgatagttatttaggagaggtaaagtgatgtagtagaaaagaaaaaaaagcaagacttggattcaaagtacacttgtgccacttcctagctgtgtaagtttgaacracttacttagcctttttgagcctcacttgactcatctacgagatggtgataacgtcagattcactgattattgtctgggttctacaaaataaggtgtaaagtgcctagtaagtagttgatgtgagaaaatattaatttcccttttcttaatgtttctcacctctctgctggctatagaatttgctatctggaatttgcaaacaagtagaacaaacatgtttctagttattaacagctcaaacccatccttctgtatacactagttagcaagaagagaatacagacaaaaccaagtgcctccttctattgccagtgggatccatccttctggcctgggctgcagacacagtgcatttaaaagaaagtccggggccrggcgyggtggctcacgcctgtaatcccagcactttgggaggctgaggcaggcagatcacaaggtcaggagatggagaccatcctggctaacacagtgaaaccccatctctactaaaaatacaaaaaattagcctggcatggtggcgggcgcctgtagtcccagctacacgggaggctgaggcagaagaatggtgtgaacccgggaggcggagcttgcagtgagctgagatcgtgccactgcactccagcctgggcaacaaagcgagactcggtctcaaaaaaaaaaaaaaagtccgggccccactcacatatacagcaaacaccaaccatagcggtcttcccttcaaagcatggacagcccaagcgtagcagacacacgatacccactcctgtattgtgacatgtatcaccatcaggacagtatctcaagagaacccaagggatgccaagccctaatgagaggcacttaacgggccacaattaaaaattataaagcggcactgcaggcttatgaagaatggtagaaattcctgcagccacttccactctgtcaacacatccgattatgatgcagcacgcggactggtgcctgttggattgatttttaatttaagaaacctttcagatatatttgtaaaccttcgagtcagaagtaggccctacgtgaatgccacaacgaattaggagagccggccttcgcactcccgtacgcagctccctctggaattccgttcagaaagaatgaacgttgcaaccatggccatgaagccaggagttctgcttctccttcagcagctcagcacccttccctcccatcccagcagaagacaccaatggcaaagggacagagggagctgatcacgaggggttcacctatcttctgacaccacaccagggagagcctggttctttagtgtgtttttgacaaagatgttaagtgttgactacagttgcggggcctcatggggatgacaggtcacttctctgctctctctgagtaaaggagagagaatgggctgggctcacagagccctactctctagaacagcgttgcttcaagcctgctcctggaaccagcaacacagcattgcatgggagcttgtcagaaatacagattctcaggccccaccccagacctcctgaaccagaatctcgggtggtgcctggaaataggggtcttaagaagccccgcaggtgatctttaagaagcttacatttgaaagcactgaccgttctggagagtgaaaggtaattttttctccatgtaacaggcagagcgatgttttaaaaatgtaaatcaggtcacatcattaaaaccctcagatgacttcttgttacatgtggaacagtgtcccacccgcctgctgtggtcttcaaggcccatccagcctggcatctgtgcaacccctgacaccttcatctcacccctgcccctcaccgtcctgtgctgcacccacactggtcctgtttcttcctgctcgaacatgctgagcccattgttaccccaagggccatcccctcttcttggagagctttccccccagacttttcacaacrccagatccttctcattatctgctgtaacaaaatgccacaaattatttgatatatgaacaatggaaatgtatttatcacagtgctggaggctggaagtccaagatcaaggcttcggtcgatttggtgtctggcgagggggcacttcctggctcacagagagtgcctcattactgtgtcctcacgtggtggaaggagccagctagctccctgggcctcttaaaagggcatgaaggctaggtgtggtggctcatacctgtaatcccagtactttgggaggccaaggcagtcaaatcacctgaggtcaggagctccagaccagcctggccaacatggcgaaatcccatctctactaaaaatagaaaacttagccagctgtggtggtgcacacctgtaatcccagctactcagaaggctgagacaggaaaatcgcttgaacctgggaggtggaggttgcagtgagctgagatcgcaccactgcactccagcctgggcaacagagtgagactcagtctcaaaaaaaaaaaaaaggcacgaatctcattcaagagagttccaccctcatgacctaatcaccccccaatcaaacctctggtttgtcgattgtcttttttccccactagaataaaagctcctgaaatgcaggcgcctaggccccttgcctgtatagtataccagatgcattggaaataacaaatatttattaggtgaagacatgtttgagaggcagaaatagaacctaaggaggaaattacagctgtcatatactgagtacctgctgtatatctagctttgcaccagacactttgtatcatcatctcatttaaccctcaaatccaagtaaatgttactgtttcacaaactgccctgagtcttagcagcttagtacaagaactggaatgagcttgtgattctttggattggcagtgtgggctagactctgctgggctcattcctgtgtctgccgtaaactaggtagcttttcgggggtttgtctggctatcagcagggaccatgggaacgccagggcaaggtggtgtagggctagttcacatggcggcaggtacaagccggttgtctcacctcttctcatgtcatgtttgctaatatcgcatggaccaaagcaagtcatgtggccaggattcatgtgggagattatttccagagggtatggatagaggcaaagggacgattgatagctattttgtaatctaccaaaggcattattatccccaaaatacatatgtgcaaattgaagctcaaagagctgtcacttgcccaggaatactgacatagctcagaggacaaatccaggcctgtctgaccccaaaacctacagttgcaagctgtgtgatatgctacacagcctgcctcatgggcagtgcaccagattagaatggtccgccttggtgggtgtgagttccccatcccagcagacactgagtgatcactgcctgggctgcttagtcccactgagactctagaattccttccagccctggtcttctgggtttctgacctggccgtctccctacctgttcctttatgactacagagactgcgtgaggcttccagctttaatgggactctctggaatagcccccacctgtttttagatctgccagacatttctgagcctttgcccacccctccctagatgaagcagtggtgggctcgatggggtagtgggaaccaacatgggacagagacaggccttctgggtttagggtcagctcttccatggactcatccagcaaaagaaagcctggccacagagcttggcatcagcaagaactgcacggggacgacccttagggaacacatgaggggagagaacctaggaggtagaggttgcagtgagccgagatcgcaccactgcctccagcctgggcaacagagtgagactctgtctcaaaaaaaaaaaagaaaagaaaaagggcaccaatctcattcatgagagttccaccttcatgacctgatcacctccctaatcaaactctggtttgttgattgtcttttttccccactagaataaaagctcctgaaatgccggtgcccaggccccttatctgtatagtatatccgatgcattggaaataacaaatatgtattaggtgaagacatgtttgagaggcagaaatagaacctgaggagagggccgaggggattgtggaactttgagacagataccaagagggactgaggaggggaaagagtggggaggcattgacaccgggagaagaacacgctcttacttggggaaacagacaatgaagcaaagatatttgggaacattgttctcagcctaaccccaatccatagtaaataatgacctggatccgggctttggggtgaggtagacccgaatgtgaatctatgtccttcactttgtaactgcgtgacttgaaagaagttatttcacccccttaagcttccttgcctgtaagagggtggtgacaatctcaatattatagttactatgaggattaaatatgatagccacagtgtggcaaagacatgacaagcagcaggtaaagggggagatggatgagatcatgatcacactttaaatattaccatcattattagaaacctcagtttgtcacagttgttcaggtcctggcagaaaagttggttctaagggactaaagattggagagattggggctggagggcatagaaacagcagtgcgttgtgtcaccattctgtctcgcttgtggaggttccacagaacaacatccagctgtgttatctgtaaagctcaacttatttttcatgtgcacagcaccttctgagaaccttgagtattttttctctattctttttttttttttttttgagacagattctcactctggagtgcaatggtgcgatctcagctcactgcaacctccaccccctgggttcaagcgattcttctgtgtcagcctcacaagtagctgggactacaggcgttcactaccacgcctggctaatatttttgtatttttagtagagatggggtttcaccatgtcagtcaggctggtcttgaattcctgacctcgatgatctgcccgccttggcctcccaaagtgctgggattacaggcatgagccaccgctcctggcctctctgttcttaccctaaactcttggctgagcttaggagagggactgtggcaggtcacggggcaggggaggggttcctttcttggaaaactgagacacagaggcaaaaaccaagccagtgagagaatcctgagaagtggtcctctcttcatgcccagccaaacctccctccttccgcccacttccttcagcaggtctcatgtctacatgctagaaattattcttgcgttttgctctccaattctcagaggagttgtacaaatggccctctcatgaagcgcagagtcccccacatttgcagaaggtaaaacaggtgcaggaggcataattcaaaattccagatcagagcccaggagagggcaggcccccacagcagaagtctagtacaaagttcagtgcaattaggcgtcatggagaatgcatgcctttttaagaaatggctctggtcggccaggcgcggtggctcacgcctgtaagcccagcactttgggaggccgaggtgggcggatcacgaggtcaggagatcgagaccatgctggctaagatggtgaaaccccgtctgtactaaaaaatacaaagaagaaaattagccgggcgtggtagcgggcggctgtaatcccagctactcgggaggctgaggcaggagaatggcgtgaacccgggaggcggagcttgcagtgagctgagatcaygccactgcaccatcctgggcaacagagcaagactccgcctcaaaaaaaaaaaaaagaaaaagaaaaagaaatgtttctggtcaatttggttagcaagcattataatggatgagaaatggagagcattttgcactggtgaatatcttaatcctccctattgaacgaggaagcaaatctgggcagtgccacttaacagaattactgagagaaaactctggaagtcatcaaaaaggccattgaaacaagataggtgtgcccatttccttttgtttagaagcatggaaatgcatggaatcgatttcctggtaatcgtccgaataaagtgggcattctgaccaggagactgctgattacgtacytcttgctgggtaaggaaaaacaattcaagtaggcttttgctgtttcttagccatagattttatgtaccagacgcttctaacgcctttgaaagaaaatatctttatagatttatcttcagacgtctttgcagaaccctctctgttgcaaaccctccacacacaccttttttttttttttttttaattttttccctgggctctatttttccccctctccctggctcagcatctctgaggtagccttgcacagttgcctggcgccctggggtagtaggggctctgaagacgagtgatgcagacagcatcaccccaggtagacttttgtttccaacattcacatatttttctattcccttttttagtgttatttttttctccctgactccaaggtcccatcagggtacctgtctacacatgtctggcctctaagtgtaagaggccaagctgattgaacatacggcacgtccgttcctccatcaggaaaatggggagaatgacagctagtgctcaaggttattgagagaattctgggaagctcctggcacactgcagcacatctgtaattatagttgttgtagctcttgtgtttactgtttattttaccgttccttgtaacttagcagcctctaagtttgtgtaagtcctctctggctggtcactgccttaggagatcagcagagcttttttatacctttgtggagagagaagtgtaggactttggggctggaaggggatcttcaratcatttaatatactcaccacctggctttgaaacgaggagtccaaggcttatagtgggatacaacttcatatcacatgttcagttggaagcagggaaagatgagaaccagcaaggtaagtgttttgatgcctgttttataggtaaaggaactgagtgagtcaacgttgaaagcagggatttgatccacagctggttgatcaagtgtcactggaggcagagccccacaacaggcccggcggatgatgcatggatggcccaggtccygcggctcaccctccctgtctcttccaggctccagatgctggaggccatctgcaagcactgggaggggcccatcagcctggccctctacctgtcagacgccgaggcccagcagttcctccgctaygcacagggctctgaggtgcttatgagccgccacaacgtgggctaccacatygtgtacaaggagggccagttctaccccgtgaacctgctgcgcaacgtggccatgaagcacatcagcactccctacatgttcctgtctgacattgacttcctgcccatgtatgggctctatgagtacctcaggtaaggacctgcaggggcctggccatcaggccagaaggcacatagggccatgcagtgccaggaccaraaggcccttagggtcatcatctagtccaacaggtttcttttccagatggggcagcagagacccagaaaggggaagggacctgcccacagccacccagcaatagagttctcagtgaacagactgaaacctgagtttgcagaaggaaatgttgatggcagagcttggtccagcgaacatctctttttgtctgccagtctattgctttttctgtagcatctatgaaaacataccctcctcaggcaggcacgcgatggctctcgcctgtaatcctagcactttgggaggctgaggcaggtggatcacgaggtcaggagttcgagaccatcctggccaacatggtgaaaccccccccctactaaaaataccaaaaaaattagctgggcttggtggcatgtgcccgtaatcccagctacttgggaagctgaggcaggagaatctcttgaaccagggagtcggaggttgcagtgagccgagattgctccactgcactccagcctggtgacagagcaagactccttctcaaaaaataataataataaatagaagaaaacataccctccttcttctggttttggaccagacaaccttcatataacccaagaaagattattgcccagtcttttaaacaaatctaagtgatgatgatgcctagtgcttatggaagtgtttgctgcgcrccaggcactgttctgagtgcytgagaggtaggatctcatttcctcccccaaagtccctgccgtgggtagtattatcaccttccttttctaaatggggaactgtgggaccgagaccaggagccgttggcccggggttactcatctaggaaagggaaactggggtggaaacagccagtctggctgcagagccaagtgcataagcaccatgacaactgcttctgtgaatctccagtgtccctttccagctccccccacatcatgggacggggtgtcagcagctggagaaagcactcggctaatggaaggcttagatggctgtgtgaagagtgcatttattacagaatagtacacaattcggattgataggagccatggaagtcatatggcccaaaggtcccatttcacacatgagaaaactaaagtcacacagtatcatggtccaatgacatttwaaaaaaatcctttatttactgccattggtcagcatgaattatgccartacctagtgagtgcctgcctagatccaggtaccatgagaggtgatttgcatatatcatcccattggttctacacatcgaaccccagaggcaggtatagctacctgcattctacaggaaggaagagtggggcccagagaagcaaaataacagtccaagtccagagagctcacgccagggtgtgaaccagcgtctgcagccccaggtctgcccgtcaccctgctacacgttgttgggctgcgctggggtttctgtttgtcgcaaaccaggcaaggtctgatttctttctctctcgttctcttgctctccctccctccttctgactccgtctctctgtctcttagtatctttctcttactgcctctgtctctttctctctgaaaagagcttctaggagtctttaaactttctgtcgggaagccaaagcgtaggtttagcctgcataccctccgtgccctgcgctgtctggagcaaggtcaggcagcctgtgttctctctccagcttctgagtccgtgtccttccagggacatctccgggtttcctagtgttaatccctcccctggggcgggaggagtccctaycagactctgttaaaaacagtagggtcagcgacccctaggcagcatgaccctgaatcgggaatgggaggtgctgtggtacccagcaccatgagcctcaacccctgacccrccaggctgcagaaatggagcactccctccagccccagcgcctgtgccagtgcctgctgggtcttagaatccagtgtgtggagccagggtgcccccatgtggccagacggggcttgcagcctctgatgcctgcagattctgaaacttgggcagcttccgggatgacaggctcccaagggaacagatagatgatgggagtgagtgccaccctagactaagaaaagaggcttcaggattggacccctgcccaccctccacccctctgggactcttcttcgctccagccaattgaaagtgagctggccccgtatgagtctgtggtctctactccctgtgcaaggactatttaattatttgacctcatgggcatcatgttttaaaaagcaatacgtatgaacagtttttttttctttgtctttctatgttttattaattaaaggcatcgttcactgctaatccagaccctacttgaagtgaggtagctagtgtgcccttctacttagcacttgcttaatgcagagtcacttgaggtggtagttggccttagctaccttatcacaggaaggtatgtggttcccctcaggggttttgaaatattgcaaattgcttttaaaactttattactttcttcccagacttttcccaagaatgctgagtacaattcaatagagagaccagagccctggtctcagggagccagtcgtctctccacacaatcgtgccattattgctttatggacgcagggaaggttactaggtattcatatttttcaagaggagttgggaatctggattttcatataaaatgtttttttaatgttggcaactaatttttaaaaattgtttttagatgatgatttggagcaaaaaaatcatttcaaatgctgttgaggccgacaaaatatgccttcaggctgccttgactcctcacacccccaccccaaactaccagagtgtaacctctgacctagacaattcctaggcaccaaagtatttatgagaatcaatgaggaatgtcattctctcggaagccccaaataagcagacactgttcttttcatatgacataatcatatcaacttacccttggcttcagggacattttttctggtgagtagatggattcatttctgacccagacgttaccagtggatgccccttgtgcacaccatagcatcactggtgggagttgaggttaagggtgctgtttgctgtggcagctgaggactccaatgaagcccccagacccktctagaaactgactttctcagcactgatctcccataaaattctgtacccaakctctgtcaagatattaatattggccaggtgcagtggctaacacctgtcacccagcattttaggaggctgaggtgggagaattgcttgaacccaggaattcgagaccagcctgagcaatatagtgagaccccatctctacaaaaaatttcaaaaattggccaggcgcggtggctcacgcgtgtaatcccagcactttgggaggccgaggccggtgaatcacgaggtcagaagatcgagaccatcctggccaacatggtgaaaccccatctctactgaaataccataaattagctgggcatggtggtgcatgcctgtagtcccagctactagggaggctgaggcaggggaatcgcttgaaccccggaaggcagaggttgcagtgagctgacatcgcaccactgcactccagcctggcaacagagtgagactccatctccaaaaaaaagaaaaaaaattgctgagcattgtggaacatgcctgttgtttcagcgacttgggaggttgagacaggatgatctcctgagcccaggcagctgaagctagagtgagccatgattgtgccactgcactccatcctgaacagcagggcaacaccctatctcaaaaaaacacatttgttaattacttaagaatgatgacagttacaagttactgagcccttaccatgtgccagaaaccctgccagctgcactcagtctgtcattacctctgttcttcacactgctctttaaggtaactaccattacaggtgaccaaactgaggccccagagaagttaaatgttagcattagaggaggaggaaagcagccttcctccatgccagcctgctcactctgtcgaaggggccaggttactcccaaacccccagggtaccagagcaggccgactggcagccctcggcttgtacccccaaacactgatttatatcaccttttttggggttctatttggttaccaaaaaaagttcagcatgttagctctttgagcagttgcttagcaaccagctaatattacagccaaaacaaacagatcaattggaaaataatggaataagctgtacgcatggacaatagctgcagagttttactaaaatctccttccagccccttcatctactttttctgaagaatgagctcctggatgtacagctttcacttttgatctcagaaatgtcaggcgaaagtcagcggggcatggcagaggttgcgcagacttgcctttgaagccaggttccacaacactaatcaagtgtgtgagttggggctgcttgcttcatctcctcattctttcacttcctcagttaatataggagctaatgatagcctcctgtggggctatggcgggtgcccagcaggagttcattttctgccccttggcctattcagtattggacttctgtgctaggcccctgccccaacccaacccccgccattgcaaactctgccaccttctgtgcagcctgggtagcttcatgtgaccatctcaatttttttgctttctgaaaatgagaaactatatattgatactactcattctttcaaaaactgtgtagtgagcatgtactatgtgtcaggcagtatgctacattgtaggtgatgttgctgtccctgggggtcattcagacctgcgtttcagtgcagaggactctccctcccctttcccttccctcttttcccctcccctccactcctttccttcccttcctttctttctctctctctttctttctttttctctcttttctcattttctctctttaattcatttctttccatactgcttcctctctctctctcactctgttgctcaggctggagtggaatggtgcaatcatggctcaccgcaacctcaacctccccaggctcaagcgatgctcccactttagtctccccagtagctgggattataggcatgcgccaccatgctgggccaattttttttttaccatttgtaaagacagggtttcgctatgttgcccaggctggtcttgaactcctagtctcaagtgatccgcccacccaggcctcccaaagtgctgggattacaggcaagagccactgcttcccgcgtctctctctctctctttccttttttctttctttccatctttcctttttcttttcttttttcttttctttcttctttctttcctttacttctctttagacacagggtcttgctctgtcacccaggctggagtgcagtggtgcaatcatagcttactgcagcctcaaactcctgggctcaagcaatcttcctgcctcagcctcccaagtagctgggactacagttgtacaccaccttgcccagctaattttttaatttccttttagaaaaataaacataacccagaccctattgtccaggctagtctcaaactcctgggctcaagcagtgctcctgcctcagcctcccacaaccctaggattacaggcgtgagccaccatggctgactgatgctgagtactctttatttagaatttatttgaccttgggaaaggcacttaacttctctaacttgttttatctgtgaagtgggaatcatactgctttttcctcttccccagttcttaaggaactgagaagataagagctaacagtatttgcagagcacccaggaatgcccgaaacattctttgttccatgcctctgcgtggccaggcactgtttcaggtgctggggctagaacagtgaacaggggagacaaagttctggccctcaggtttacagcctggtggtcattgcagctgtatgtgccattgctagcatcgggattcacacagatacgaggctgagagatacaggagctcaaactaataagggaatgacccaatgtgggtgcacactgaaggtctctaaatgaggagagaggaagacgtgagacatcgtggcatttccaagacctggacagcttcactctgctgagactttccacattcatgagactggtacaggtttctgacacctttcactgaccctgcagaatcatcatctttttttttttttttttttttttgagatgatgtctcgcccttgtccccaggctggagtgcaatggcgtgatctcagctcactgcaacctctgcctcccgggttcaagcgattctcctgcctcagcctcctgagtagctaggattacaggcgcctgccaccacgcctcgctaatttttgtatttttagtagagacagggtttcaccatgttggccaggctggtcttgaactcctgacctcaggtgatccgcccacctcggcctcccaaagtgctgggattataggcgtgaggaatcctcatctttaatccatgcccaaagtgtaaagtatctctactgtcctcactgccttttgccttcttggggacaaacccttcttttttttttttttttttgagacggagtcttatgccgcccaggctggagtgcagtggcacgatcttggctcactgcaacctctgcccctcaggttcaagcaattgtcctgcctcagcctcccaagtagctgggattataggcacatgccaccacacctggctaattttttttgtatttttcagtagagacggagttttgccgtgttggccaggctggtctcaractcctgacctcaggtgatctgcccatctctgcctctcaaagtgctgggattacaggtgtgaaccactgcgcccagcccccttcttgaggacaaataggccacactgggtagagactgtattctgacactgtgtaggaatgccagatttctgttcgactcttttctccccagcttgacatctaaccacctacccccttacattttccctggcacatcatggctgttctataaatacttgttgaatgagtgcagacatgtgaacaaagccaggtagaggtggcaccaggtgaagctgactggctgcctgcccagagacattaccaggtaacatttccttgggcccattcattgtcttaactctgctgtatctataacattcaacatttactgagcacttactatgcgccaagcactgttatgagccctttcacctgtattttaccattaaggctcaccacaattcatcttacaaatgaggacgttcaggctaagtaacatgcccaagggcacagcagtactaaaaggataactggcgggctgggcgcagtggcttatacctgtagtcccagcactttgggaggccgaggtgggcagatcacctgaggttgggagttcaagaccagcctgaccaacatggagaaaccccgtctcaactaaaaatacaaaaattagttggacgtggtggtgcatgcctgtaatcccagctactcaggaggctgaggcaggaaaatcgcttgaacctcggaggcagacattgcggtgagatgagatcgcgccattgcactccagcctgggcaacaagagagaaactccatctcaaaaaaaaaaaaaaaagaaaagaaaaaagaaaaaggataactggctcatcttaggcttatccataggtgttctatgcttagcctgtttattgatccagttgcccgataggcccattttatcttcatcgtgatggccatgaccatcatcatggcttgtatttgccaaatgtatcctatacaccagggaactattttaatctttgcaccagataatccatgtagttcttacaaagtcacacagcacagctgctaatacagtccccagctcacagagaagaaaactgtggcacaaagttgtaacgtgttcaagagtatgagctggtgagtgtccatgcaagtgggatctgaatccaggcagtctgccgcacagctgccctccttagtgccaggcccccgtgatccccagccagcgtttaactctatgccagtacgtggcaagtgctctacaacgtttagctattattactaacagtaaacatcaggacagtggggtaattaaacaggaatgttgagcattacctgagatggtggagacagagtctstagcacagagcctcgcacatggtcaagtgctcagtaaactatggcaatcattactactttttatttgtaaaatttaccccaaaagctccttcttagcttctctttctcacctgcccctctctgactgacaggttcttcctctggaaatgttaatgccacccattaaggaatcaccggatcttgctcatgcctgtgagcccatctggctctcagatgacatgcccatgtctgacctcatgtattatgtgtgtattctacagtggcactctgtgggctgccctgtctccctcatttgcaagtccttgctgttgtccccacaaagctcctggaagccagtcagccaagagctcatttcctagacaactggagtagaatcgagcaaaccctattccctggyctttatgtttagggatgagacaagaggaggacagggctgtgctgaggtggcctccagagtgagcagcacaggtggctccttccttcctctctgcccacgtattgtcaccctaaggtagattgctaaatcctcaggtgtcattcacatgatttcccattgccttggtcaaaagccatgcttaygtctagcactattgaagctagtcagtttaaacrgctatgagggacagctggagacaagagggcttctcgtagtctcccaaagtcacataggcacccacacgcatgtacacacacatgtgtgcccttctttgcctctcactggttgatcacacctgtgtctgcactggccctgctgcttctcatcacacatcactagctcactggttcatgcccacacaccttgccaggaataagctaaaataagaaaatgatggtgcatctcagacccaggcctctgctttctctttaacccccactggctgatccacttcttacgagcatccacgagaatatgagtgcatgaccgtctgtaaaggacccaggaaggaaaaaacactgtttataagtgccctgtctcgtggcaggtgctgtgctaggccctgggcaaatgttatcttttttaggacaacctagtcaaagataagtgcttttattcccattatacaagtgagattaaaacacagaagttaagtttgcccaaaggtcatatgtatttaagtggcagagctatcrtgtcaactcaggtctttgtcatttccaaagaggcctcttcacagtcccatcctctctaccgcatagggcagttacaaatagattcctccattccctatacacttactgagtgcctaccgtttgcctggcactgtgcaggacctggaaacgtaaccatgaacagaggctcaccccagacctcaagcccagcagggctgagaggtacatgcacaggcagccaccaccagtgagcgaaacagtctaggatgaaccagtcccaaagaagatgcagacccaacatgaaggggagcatgaaaggagacacatcaaggcccatggaggtggggaagggaggtacggggaggccggtttttctaactggctatgcactaaatcttgagagaaatcagtgctgttccagggtttctgaaacagatgcacactccagcacaggtttctttatctcctcctgtccccttttaatataactttcataggagtccctgggaacttgtatgagaaccacatggatttcttacgactcaggtttgattaaacagtgggctctctgacatttgatgctgcagaacagggctgtggaaacccagggctccgagagctgacaagtctggttctctcccagcattctgacagcagccccagtgccttcagccctgcgattcccaatagtttgtcacttgtcagcattggcctcagccatttattgcaacaccgcaaagaagtcagcacgggcatttctgttacaggcgtggaaacctgagtggcagagatggggaattccccaacccctgcccgaggagtaggggccacaagaggtcccaaatggttaccagcatccagtgggctgaaagtcagtcatcctggtgagaaaagagagagtagaaagatgccttcagaattatgggatgggcttcttgaaataaggctagtaggagtggtcattagtgctaaatgcagagataattcaaacaaggtgagaatggataaatctgttagacttgacagtgaggggacattgctgactttggccagatccacagagtcaaagacagattataatagtttgagagactcatgggtggtaatgaaaggaaatagccagtataggaggctcagtataagccagtgacatgtaggatcagtacacatgttcccaatctcataatactctttgttttctgacctccgctccactttgctcattcaaggtggaatctgccatgtggatgagattgcatttaaggagcataggtacacagatcgtagcctcctgccttctccctttttgccattcctaaccactctcccactactgccttgacccatgaactcaaagaagttcatttttccagttgcaaggttgggaagacagacacaatcactgcattaacagacttggtcccaatacatcttgtggttattgatctttcctgcttaattttaagctggtgcagacttcattaatatcattatatgatgatgatgataactactagctgtgtggtagttacttgttaacctctcagaactttaatatctttatcattaaactgaaaatatgagtatgtaagtcataggttgcaataattaagagaagtaatgcatataaagcacttagcatggggcttgaaactcaatgcatgtaagcatttattataatttatcaaccacctacagtataccaggcaggtgctgagaaattcagtttctccaatcctatatgctttctcgttatcagagctttgcaaataacctggaacaccctttcctgactggctaactcctgcttcttgattggaacacatctcagtgatgagaagtcttccatgactctgcacacagagaggagtatgcttctgtcttcctccctccctacactgtgagctatgcatggacaaagttatatgtgttcatttagctctgtgcccaaggtttaggtgttggcttcattaatattcattaattgatgaatatattatcttagttctcttaatcaccaagtccataaagcatttattattatcaagataaggaaacaaaagcccggggtgttaagaaaatggcccatgattgcacagttagggaagtagtggaattaagatggaatctacatcatccgattaaaaagatcatgctctttttttctcactgttcagcctcccttcaaactggcatgccacgagaggtacccagccatcaggtgtgctgaagataatttcagttggctcctcttgaaatatcagactctgtggctccaatcccatatgtcaggcacacagctggaattgaggagcagctaggcgtggactctcctgtttatcccatcccctgctctcccctctcccttttgtctcctcgacatgtaagcctggcatcctttgccattgaacatcgtgctctctccccatcagcctgcaccattatccacatcactggcctggccctgcagctgcttgaggttgccccccaaaccccccagtatagaaagacacaaaaaagagatacttccagaatcctttgtccctgtttaaatttgactgtgctctctccttttcttaacctcagtgatggattatttttctaattttgttttcttgaagatggcatcaaattgggtttgtaatatgtcctagttcgttttgtggtgctataacagaatactggagactgggtaattttttagaaatgtattccccatggttctagaggcttggaagtcagaacaaacttggtggcagattcgttgtctgggagggctgctctctgctgccaagatggttctttgtgggttttgtttgtttgtgtttgtttttgttttgagacagagtctcactctgtcacccagactggagtacagtggcacgatctcggctcattgcaacctccgcctccctggttcaagcgattctcctgcatcagcctcctgcgtagctgagattataggtgtgtgccaccatgcctggctaattttttgtatttttaatagagacggggtttcactatgttggccaagctggtgtctaacccctgaccttaggttatcccccaacctcggcctcccaaagtgctgggattataggtgtgagccaccacgcccggccccaagatggttctttgaacactgcatcctgcagaggggaggaacgccatgttctcacgtggaagaaggtggaaaggcaaaaaaaatgggaccaaactctctcttgtcaagcttttttttttttaatcattatgtattaaatgtattgatgtaatacattatgtatgtattgatgtaatacattatgtattaaatgtattaatgtaatgaatacattatgcattaatgtattcatgagggtggggccctcatgacctaaacacctcccataaggccccacctctgctgctgcattgggaattaagcttccaacacatgaatgttgggggacaccatagcacaatacctaagcacgcaccagtgagagaggaggaagttatttcagggaatgctgaatagaggagaatgcataagggtagacagacaggatttagggagttcttcctttggtggaaactggcaagtaactggaatcccattttcaggcaaatcgtgaccattgtgggactccaggatgggtctgattggaccacaagggtctcttctcccgggtcttcactcactgtgaaggagttaggtgttggtcgtagagttttccttatatcctctcctgtggaccaacataggttaatttttctagacacttaagatgaaactaaattggccagcgttgtgacatggatccttttcctgattagcaatccagccttgcactgtgttgacttatttttgcagaaccagaggtgaggaagggaacttctttttttttttttgagatggagtctcgctctgttgcccaggctggagtgcagtggtgcaatctcagctcactgcaccctctgcctcccaggttcaaacgattctcctgcctcagcctcctcagtagctgggattatagacacgcaccaccacacccagctaatttttgtatttttagtagagacagggtttcaccatgttggtcaggctggtctcgaactcctgacctcaggtgatccacccgcctcagcctcccaaagtgctgggattacaggcgtgagccaccgcgcctagctgggaagggaacttctaaatggccatggccctcacacccacctacttgactggtgccctagatgctagcagtcagggaagatgccaccagcgacctccatgttgccaaacccagctgccagcccccagctctcatctcatttgacttctcagccacctccaactgccggtgactcctccatggcacacgttttattttctcctggcttttaggtgctcatcgcagtctctttgtggttcttcaatcttcttggtccctcccaggagttcccattgctggctcctcttctcgttctacctgactcccattttatagatattccatgttacagatahggaaattgcagaaccaagagattaattaagtagttagccaggatgcagacccgagcagcctgcctctagaatgtgaaccactgtgactccgaggaggtgaagttgtcagaactaggcagtgcacggcgtttccttatgtcttccgagacactttcccgtaatctcttcatgccaggaacctgggctgtttccctggttacagggacctgcctctagaggaaaggatggagttaaaaagagagaatgagatggagggagggaggtgtgtatgtatgtgaaagagatcaacagccagggtcaggttgaggattggtaattccatgccaccgtagcaccagggaaacccatccagctaatactctgcccttccatccatgctgtttctttggtttatgcagaacccgggcaagcctaccatctgcacccacccctaccccttcatttggcataggaagcctcactgctcactcacactcacatcccctcccctgctcgccagttttgccagattggagcaaaagaggatacgaactacccatatacctgagtgagctgagaggaggggctcggggaaaaaagatatacagaagaggaggctgtggggggctttggaggataacctttatcaaattcacagtttccccactggttagctctgccacgctggaaraggtgaatttactctgtdagcaacacctgaattgtttttgttacaaagagggactcagagggctggctagagaccsagatctcataagttctgtttctgtagatgagcaagcagaagtcttccctggttgtaagtagtaygytgacttctctgaatcctccttcactctcgcccattctcttgccttggatgcaccagtaggctcagctgtgacaggggaaggggacttgtttgttaatgagttaattctaagtcaggcactgctttgggctctagagccctgagagatgagagataagcctttattatctccatttaagatggggaacctgtggttgggagaggttgcagaatgggcctgaagtcaggagagagaggagcagtcaggtttggaagctgctgctgtctggctccaagtcacttatgttcacagggcttcccattgtatcagcaaggttctgagttatttatattgttttaagaactccttggtccagctgggcgcggtggctcatgcctgtaatyccagcactttgggaggctgaggcaggcagatcacgaggtcaggagatcgagaccatcctggctaacacggtgaaaacctgtctctagtaaaaatacaaaaaattagctgggtgtggtggcgggcacctgtagtcccagctacttgggaggctgaggcaggagaatggcgtgaacccgggaggcggagcttgcagtgagccgagatcgcaccaccgcactccagcctgggcaacagagcgagactctgtctaaaataataataataataataataataattccttgatccaatatactatagtaggtttgtgaatgttcttgcaagtgtcttggacaagacaagggcaacaaaactttgaacctgtgcataggcagggactggagctggtctgcaaagaggagtcagaccataaggaagagactgtgtcagctcaggcccatgtaggggacaagaacagagtggcagtccaagaaggacatcaatagagcttggtatcattgaatgatgaggaggaatctggaccaggtcggaattaggacactttttattttaggtaaggtacctggtattaatttctgttgcttgcagctaaacaaccctaagcaatatattacaagacccacagtagacagactcagtaagcagcatgtcttaccagcacagtcctcaggggtctccagagacacagagccaataggagatgtatatagtatatcctatagatagtaatatatgtatcaatatgcagagctagatagtgatatgtgtactgatagattgacagagcttaagggattggctcacactgttgtggggttggcaagtctgaaattgacagagcaggccagcaggctggaaactgaggcaggatttctgtgttactgtcctaaggcagtattccgtcttctctgggaaactcagtttttgttcttaaggccttcaactgattagatgaggcccacccacattatcaagggaaatctcctttccttaaaggtaactgattgtacatgttagctattaggttggtgcaaaagtaattgcagtttaacacgtctatgaaacacttgcacagcagtgtctggactagtatgtgacccagtaactgggcgccatagcctgggccatctgatacagaaagggaaccatcataggcatcatgtaccccgtgcttaatgtgtgccaggccttgtagcaagcccttccacaagcactgtgcttatcctcatcaacatatttttcaagtgcatcaaccccaggactcaaaatagtgaaagtgacttgcccaagaagacagcctagtagagtcagagctagacgccttgtctaatgaccactacacctgactgtcctccaaagcttccatcttaataatctacatttagcaatctaaagagtaatagagtaacccaaagtcactcagcttctcagggtgggcctagaactgaagtctcctggctgttcgcccagctttctcactcatcgtcctgccccactgttcctggaagactctgcattctatcctctgcaggactcactttccagagaactaatggctgcaaattgttgacccctaagacagcaagccccatccagggtaagatgtactaacagaacacagaacagaaagacccaggctgctgttaccttctcaataaacagatgagctcagagtttgtaccatgaagccttgtttattgctgaaacaacttcataatgagaccctttcaggacatcggtattgaaacctacttgaactgactctgaaatrgatctatctggtgacagatccatctttgtggcagtttgtattttagtgagatgaaagggagtttgcagaaagcactctggaatctggtgctatctatgcagagggaaataaggcttgctaggactgtaattgtgaggcatgctgcttgctgagtctgtctgctttgggtcttccagtatattggttagggttgtttagttgcaggcaacagaaactaataccaggtagcttaagtaaaatacaaacaaatcaaagaaaaacaaagcaaataatggatgggttatcttatagaatcaaactaggacttggaaaaccaacacataagacagcaattaaccagggcagctctgggcccctctgcagcagttcagaagtctttagagcatggtctgtcatcactgaaagtcaattctgtgctttcccagtctctatttctattcaaatttccaagagtaagaaactgatgtgctyagcctgggtcaagtgtctaatcctaaacaacctgcccttgccaggggtgcaggtagggcaggcagagagctctgagagcttgcttctatgtataggggcaggttgcccccatagaaaggggaattattttctagcaggaattaatctctaagaagcagctcctatagcaactgatgataatagtaacttgatccttatatagatacaaacatccatgtttgtagatctctgtatccatcgtgtatatatgtgtatgtgtctttatatcttgcccattccctttatagttctgccctcgcagccttctattctgtttctatagcattgtattctaaaataatcagctacaaatgcaatctggggccccagtttagagagatttgtccttaggcttctagcatctcgagacgtttatatgaatgtaagcaccatgcgggcagagactttgcttgttcttttcaccctgtatcttcaagtgcctggcacatcataggtgctgggtgattgctgaatgggtagcaaccacccaccaatactgggacaccttcccccctgccccagggattccaagggctttgctgtcttggtccaagtatattctttagatccatatatcccacccccaatacccagaatcaatagataaggtacccacctctccagggggaaaggtaaatagcctagctctgcccctatccaatagaggattgatacaaaagagagtgctagctgacactagatgcctggccacagaggagggaatcttggatgtttgaaaactaacattgttcagacagacaaagcgggagaagaatccaggctgggacaggctgactcaaacctctggtcctcagactggctaagtagagctcgtccacactctgtatcttgctgtcgtcctttacgaacctcctctggaatagtggtgagagagctatatattatttggtatatagttaacatgagcactatggtaaagagtgaactgcaaatgatattcagagggttccaaaatgaacttccagcccatcccaaccaccccctctctactgggagctggtgagatccattaaccacggatggttttaggaaactgtccttattctgacctgatccaggttccccctcattattcaatgatacgaagccctgctgatgtcctgtgtccttctgggactgccaccctgttttgtcccattcaggcctgggctaacttagtcacttccttatggtatgattcctctttgcacgccagctctagtccctgctaatgcacaggctcaacgtctggttgagtgaagtgactttaataatacagcaatggaggacaaggtttttttgtttgtttgtttgtttgttttgtgacagggtctcgctctgtcgcccagggtggaacacagtggcgtgatctcagctcactgcaacctccacctcccaggttcaagcgattctcctgcctcagcctcctgaatagctgggactaccagcaccccccaccacgcccggctaatttttgtatttttagtagagacagggtttcaccatattggccaggctggtctcaaactcctgaccttgtgatccgcctgcctaagcctcccgaagggctgggattacaggcgtgagccaccatgcctggccttcaatggacagttgtatggccaaggagggctgctgctttcagtggtttttcaaaatgccttacaatgcctaccttttccccaggaaaggctgctttctgtatctcagagatggaaacagacagccatgatgaccctgagacccaaaggtcagtgtccaagcaggagccagaatgaattcctaggtcctggccaagagtgatcacagaatatccaagccagggagtcgtgatagcactgcagtgtaatagtgaccacttgtcccagcatgcctgccccggccaggtgtgccaagtggcagtatatgacgaccttgttcggtccacaggaggtagatgttattgccatcattttagggacgagggaccaaaggtagtgaggagctaaatcgctttcccaggatggcaggtctcataaagtgaccttgccagggttcaaatccagtctgtgtttattaaaagcctcatgctggccgggcgcagtggtgcacacctgtaatcccagcactttgggaggccaaggcgggcggatcacaaggtcaagagatcaagaccatcctgccaacacggtgaaacccagtctctactaaaaatacaaaaattagatggacgtggcagcatgtgcctgtagtcccagctactcgggagactgagacaggagaatcgcttgaacccgggaggctgaggttgccgtgagccaagattgcaccactgcactccagcctgggcaacagagcaagactccatctccaaaaaaaaaaagcctcatgccatatggcactaaatgcttggccgtggatggctctccatgagcctttctccctttccaagtaaccaccacagagctgagaaaaggcagacaaacccaggcgtgcaggatcgggtctcggaggagcagagtggaaggccaggcactaaggcaagactttaactttctcttagggagataccagagctctgtctcaccagcactggctgcctagggtggctgtggctgctttaaaggcttggagtctggagaattcaaggagttgaggagtcactgaaatggaacctgaaagtgcccagtttggtgattctctcatcggctctctgtccacctgctctggtgcggccaggggtgcagtcggagtgattgaccagcccagggaaccaagcaggctgggctgtaacccctgtgatcctttgaagccttccttctgtgcctggctggcaggagcacacactgaaaacatgtgggaggttctcccagcccctcagtctggtctgccctctgtttattctccaggaagaccaagttctctgtctcggggacagcagatcccattccactctgggttccccaagtgtttagcaacttgctttgcctcccagggctccccatctttcttcttttcttttccttttctttctttccttctttctctttcttttccttcttttttctttctttactttttctttcttttccttcttttttctttctttactttttctttcttttcttttctttcctttcttttctcttcctttctttctttctttctctttcttccccccaccttttttttgacagaatctatctctgtcacccaggctggagtgcaatggcgtaatctcagctcattgcaacctctgcctcccgggctccagcaattgtcatgcctcagtcccccaagtagctgggactacaggtgtgtgccaccatgccccaccaatttgtttgtatttttagtggaaacggggtttcaccttgttggccaggctggtctcaaactcctgaactcaagtgatcctcctgcctcggcctctcaaaggctgggattacagacgtgagccatcgcacctggcccagtttccccatctttaattgagaggatgacctgagctttctttcccacacttcsccgggccaatgaccaccccgccctcatgggggaaagaccttggcctggtgtcacagggactctgtcyctctgcctgtcccctcttttcaggaagtctgtcatccagctcgatcttgccaacaccaagaaagcaatgattgtccccgcgttcgagacactgcgctaccggctgtccttccccaagtcraaagcggagttgctgtcaatgctggacatggggaccctcttcacattcaggtgagtggctctagctgctgtactctgggggtgctcgaaggccttctttctcctgggaaacccagatgccaaagctatcgatctggaagtttgtcgctcgccttagtccattgtgaggccaggaaagcaccgctttctccagacaacgtccttgtaatctccctcctctccccatgccggtacgtgccatgtacttttttgtgcatggatgacagacgttatgtgttcagatggaagggtaggcatgtttggagggtggaagggtaggaaggtttagcttatttctgtttgtccttttttctaaactcagtttaggttcctgctgccatctcctggctccgagttctcccttttgtgtgcttgtccattcattcgtctggtaggtgggtttcattctattagcaccactgtggcagttttcctttttatttgtggtatgagtggtctgttctttgagcccctgaggcctgggggacgtgtagccgttgtgtcaacaacttcaagtcatcaaggtgacccagcacatgtggcagccagctttcctgttgcccaagtgacagtcgcaaacagaaccctgattttccttttttcccaggcccccgagtcctgcaggaacattgcaagggagctcccctgtcacctgtccccagtgtcccaggagtctgtgccaccgcacaggagcaaacaggttccatgtcctggggayaggctgcagcattacatgtagtgatccaggggaaagtaggtggcctgctaggtgccgtaactgagcagtctaaagagagggctggtacgtctgcctgctccaggtgtttgcttgtgtttgtttgtttgtttgttttgtttgtttgtttttgagacagagcttcgcttttattgcccaggctggagtgcaatggcgtggtctcggctcactgcgacctccgcctcctgggttcaagcaattctcctgcctcagtcacctgagtagctgggattacaggcatgtgccaccatgcccggcaaattttgtattttttagtagagacggggtttctccatattggtcaggctggtctcgaactcctgacctcaggtgatccacctgccttggcctcccaaagtgctgggattacaggcctaagccactgcgcctggccctgctccagtgttaaagtgaggccacccttgtgaatgatgtcagaatggccaacacttcctggaagctaaaaagcatacgtttctagaccatcggaattttactgaaaacattatagtcttaataacttgggttttcctaccacaattaagtttctagaaatttctagcaagtttcctcaaataaactttatcttgtgaaaataactttatgaggtgggttgttcgttcaacagttcagaggctatcatttttcacattttatacagatgaagaaactgaggagtggagaggtcccagtagagccaagactcaaactccaggcttcttcctctatccagaattctggaaagtggcctggaagagttagtaaccccccacccaacccaagccttccttcttttctgaaagaaataactaccacttattgtgtgcttagcatgtgccaggcaccgtgattacatatttaattctcacaataaacctatgtgacagatactatcatccccattgcatggataatgaaactgaggctctgagaagtttaataacttgcccaatgacacacagccagtaaatagcagagcctggattcgtaccaggtctgaggaacctgtgttctcagtcagaatgccatccagctactgattgagtcctgaatttttttttttttaaccagtgtttaaagatgcagagtaaaaacttgctcctcagaattgagactttcaaaccaaaccttaatataagtctcccatgaatgccatagtctgatggctgagcacctgacacatttccaaggcatccttcctgccgtcttcataccacagtgaaccgagaactcatttcacagccacatttgtggccacaagagctggggtgtggcctgctgtgtccgtgattgctgctctggccagcagcttgccagccatcatgccaagtgctaagttacagcccttgtctccgagaaattgctattgtcacctgctctccaaataacaaactcttcagcctctgagcagccgaaatctgctccctaccacacctggaatgagaaaacatccacacccctacaagtcctctagggcggtggctccagaatgcggtccctggaccagtggcttcagcatcacttaggaacttgttagaaatgcagaggctcaagcctagcccagacctcctgcatcagaaactctggaattggaaccagtcttccagataattctaatgcatactcaagtttgagaaccactgcttaaagcaaagtgccccaaatctcttctccccagtagcatcctgtaaggtgtacctaggaaacctctctcatcttcccatcccttttttagcagggaaggaggctacctggcatttggcaataggtcattcacaggctggggcttgttttaacgagaggttcattgtaacttgactgcaccctgtgctgcccagcctttctgcaagctgccagtgtccaggctaaactgatcaaagctgcctcctcagccagatgactagaactgacccagctgtccctacaatggagtgcaatggcgccgtctcccccattgttttcccttccttttcacattataattttctgagagtttagattctaaaggtggatgaccaataacatggctgtcaatatcactgagagcaagaccaccaggaattgacatcatatctgggaagcaaacaaggagaaataataaagagaattttctctttctctttttttttttttttttttttgaggagttaccatatatcagaaactactctgagtactgtatgtgaattaagtcacataatcatcataaatctatgaagtagatattgctgtgtccgttttgccaagagaaggaaacaaaggtgccaagtagttaatgtacccatacctgttgaatgacagaattggaacccaggcaggcagcctccagaaccattgcttttaaccactttgttataaaactagcatttattgaattcctcttagatgtcaatactgcgccagactctttatattttctcacttaagctctttggcagttcaaccagataggtattcttttccccagttgacacaaaaggaaattaacggctaattaaagcattttgttctgcaaggcattcagctcctaagtggcagaggtgggatttgaaccctggcctgatggctccattgtgctttaaaacctcatacaagttcacggccatcagctgtgctgtgccagttctgttgaaggcatcaggtgttaagactgcccattcagcaagttcacaaatggaaaagcaactgcttctgggcctaattgttggatcatgcccgaaattgacatctcccgcaatatcccttttccacactccatgaaaatggcattgcttcacctttcatttttcttccatttaagtggctttggttttgatggaagttgctgtgttgatggagctgaagttcaagttcctgccctcccctagcctggctgtctcacccaacagcacaacttgatcaaagcccacccattggccagtgcccattcagctgcactggccagttccctgagggtttggggggagtccagcctcagtggtagaaaagcaaaagaaggaagcagttgcattccctgccagaaagtgtcccattggccacacggaacactcagtctcacttagcgcctcccttgctttggagagactgcccacaggatgagatggaacccagacttccacttcctctctccctgcagctatgctcttgggttcccacccttctgtcttgttttcatttcatgaagcttttctttccagctctggatactcttcctaactcttctcttgggccctgtctagtccttcactagatgcccagcttcctgccgtctctctgtagcttctagaggcatattgccatctcacacatggacctgtctcaggtgcctctcatgttgttaggttactcattcattcattcagtttagtgcacaattgttgagtactcgttcaacaggccaggaagtgtgggggacagggacatataagagaggtgacccagccggccgtggtggctcatgcctgtaatcccagcactgtgggaggccaagacgggcggatcatgaggtcaagagatggagaccatcctggccaacatggtgaaaccccgtgtctactaaaaatacaaaaattagccaggcgtggtgatgcgtgcctgtagtcctagccacttgggaggctgaggcaggagaatcgcttgaaccggggaggcagaggttgcagtgagccaagatcgtgccactgcactccagcctggagacagagcgagactccatcccaaaaaataaaaaaataaaaaaagagaggtgaagtgcttaaggaggctcctggcctttgagcaaggcttcccgggtttgaatcacaactccaccactgactacttgtactttgacatttggtaagttataagaatttaaaacaatatctgcgtgtgtgtgtgtgtgtgtgtgtgtgtgtgtgagagagagagagagatttaaaatagtcccagtacacagtaagtggttaactaatattagctgcttcttattgtggttatatgattgtattcatttgctactactgtataacaaattaccacaaacatagcagcttgaaacaaatttgtgatctcacagtctctagggatcagagattcaggcatggaatgactggattctctgcttgggatctcactgggctgaaatcaaggagtcagcagacctgcatttctcctcttcccagatcactggtggttagcagaatttctctcctttcgttcctaggcctaaggtcccattttcctgctggcttttggccagggactgctctcctagagtctagttaatttgccacatggcccccataggcagctcccaacatagctccttgctttcttccagacccaggtctaaagggtcacatgattcaatcatctcccattttcacacaaagtaaagtggtgagtaaccttatttatatctagaacaatcccttctgccatataatgtaccataatcccaggagtgatcacatacatactcacaggttctgcctcaaggggagagcattggacagggtgagagtcatgggggaccgtctgatactcctaccacagtctggcagcaatcactacacaagctcacctgcagtcaattcctgagaaatgacatggagccctccaggagttccttttcatagtgagaatctcctcgttagtgaaatgtgcagatagcagatgggattagggtttcctgcagctgctgcagcaaaatactacaaactggatggcttaacataatagaaatttattctctcacaattctggaggccggaagtccaagatcaagctgtcagcaggtccatgcttcttccctgaggtcctaggcctccgtctggtgattgccagcagtgtttagcaatctttgatttatagatgcacccgtcatccaatctctcccaatgtctatacatggtattcttgctgtgtgtctctgtgtctaaattttccccttcttataaggacaacaaatattggattagtgccaccccaatccactgtgatctcatgataacctcattatatctgcaaagatcctgattccaaataggtcccattcacaggtactgggggttaggacttcaacatagcttttgggagggagacagttcaactcacccgaggactacatcagtgtacaccccttcttcctccacatcggctgcatttggagagcttggcttccttccctacacccaatggcttttctccgtgtgtctcaggtaccacgtctggacgaaaggccacgcacccacaaacttcgccaagtggcggaccgccaccacgccttaccgggttgagtgggaggccgattttgagccgtatgttgttgtgagacrtgactgcccggagtacgaccggaggtttgtaggctttggctggaacaaagtggctcatatcatggagctggatgtgcaggtgagaagaacggagcatccacctggtatggtcgacgggggagaggcctagatcctagagcttaagggatccttggagacawgaaagcagagagctaagagggaacaagatatgcttgaggaccagtggtagtactgatccttgggctcttratcccaaaccattgctccttcctcaacccttgggtgagagttgggttcttggccaggacccaggtaaatgtgagtttcctgtgacaaaccatttcatcttctcatcctcacccaacctgatgatgaagacaagcaaatgtgaccattcatcacttggtctttgagtcacgtaacagacacgaagcatccttagagttccatatacatgacaaagcatgctgctaagatgcagctagttattccaccctttactaaaagattaatagatgcatccatcattactaaaagagtggcgactttgagactgtgtttaatcacgaactccttcattcatccaactgatacgtattgagctcctacttcaaagtatgaatcttctacagaattctagtaggtgaaaccaaggatcagcacacattttctgtaaaggaccagatagtaagtgttttgagcttcatgggacctacaggtctccttttcaactacttaactctgctattgtagttcagtcttacagtctttaaacaaatgggtgtggctgtttcaataaaactttgtgtacaaaaacatgaaatggaccagacatgcttcaatttttcagcccctgtgttaaacaaacaaaagcaaaactgctctggttaaattagaagaaggattcctcggtccctccagcctttttttttttttcttttcttttcttttgtatgctcttctccaagatctctcctcctggtgcacagtgcaaatatttttcaacaagagcacctccaattcagaaaaagctaaggttggatactgagcgctggccgttcatgagaatcaccaggagaactttccttccaatagttccaatatgtttgagaacagccccaggtgattgagaggcgttagggttgagaacactgatgtagataggttatagaatcatgtccatatttaacaacagaaagcagggctgtcagtatccatattttttataatactttgaatgagcagagtgccactcacagacaacagtgttcagtcagcctcagcttctgcttaaaaggaatgtcatgttcatgtgtccagcagtgctgtgagatgaactagttcaaagaaagttaatttttctagccatgagacctgggctttgtttgttttggacagttttgacagaattcttgaaaatacgttgcatattttcttttttttctttgygaatagcatgtcccagacatactcttaaccttttccagtaccttaaggaaataatgagtgcacacctgccaggtattaacacccacacccatggggctagtgcggttggtggggttctttgtccctccattaaatgtcccagacagttcagctctgggagatcttgcattttcttttgatggtttttctcactcattcctcaccagcaactgtcttttcttgctgctgttgtattgttctacctaaaacagccgcctttccccatcccagttatccctgagtttattcttatctgctctgagctgggaaactagataacaaaagcttgtcagacaatatgtccaaaatgagagtaaatagatctgagtaaaagtgtgctgagttctcctctaagcgatatgacctaaatctgggtcacctgttttggctattcagaggccttttatttttggcctgagtattaagctgtattctgccaagttgagaatactgggtgacagtgtgacctgcgataaagatgtgtcagggagaggtttgttcttggtgagcttaggtccagcaaaatacttgtttttatttcatctggtctctcattcctgttttgtaccctcttttgcactcatctgttgagactgtcagatcgcatcaagtcctatgaggaatcataaacagatgtcagttaatcgagcaagagaatatcccatggcgtgtgtcatcctagactgtccatgtgggtgtgagctcacatctatttatcaagaaaccttttctaggccatgagctcggctcagcactgtttatacagtattggcttctccgtcatggtcatcattcaagaatattattactttcaccttatagatgagaacatgaaggctcagagaagccagtttcctggtccaaggtcatggaaacagccctgaattaccccactccaaagctgttgtgctgtcctttgccatctgcttgtgggtgccattatcaagtcattcattcactagccattcaatcattcgcttgggccttcatcatgcatgaccctcggctcttgcgggttctcacgctgctcttgtcttcttccaggagtatgagttcattgtgctgcccaacgcctacatgatccacatgcctcatgcccccagcttcgacattaccaagttccgttccaacaagcaataccgcatctgtctcaaaaccctcaaggaagagtttcagcaggacatgtcccgccgctacggctttgctgccctgaaatatctcacagccgagaacaacagctagcaccaagaagcccaccactagggggagacatgctgtaggggaagtgccactcgctgtttggggcccggccttcaaattcaaaattgagccatgctttttcggtttgtttttatttatctctttggcccagccaagctgccctcactacagagaccttggacaaggatccagccagtccctctctgccccacaaccctgcattcccagaggttagctatgcagcccacctagatgagtctcttcaagaatgggaaatcaaggggtgacagggagtaaaagggttatcatcttactgcaaagccacaagatcagggcagggctttaggatgttctggatgctttttaataattatgcttcccatcataactggggagaaagggaagtcagggttctaggggttattcgtcccaggaaatagaagtgaaattgtctttattaagtgaaaactttcccctttgccctgcaatgtagctgggcattcaaacggagggcaaaccgatgatctaaaccaaccacttggaaaaacccaatggggacattgtaaccagagggtcctggaggtggggttgatgggtttccttatccccaaagtcactcctgttttgttttgtttttctttgggggttttgtttatttttggggctggcaatccaaaatagaaaatctgatcctttgaggctctaaaggaaaatcagctgcctctaccaaccaccctctatcagcagtggcccaggaaggaggtcaagcatcttcggccgatatttaaacatgggcagcttccttcaggatgatcaccgaggctcccgtgactttgaactccctactctccagaatccaggggctatagcgatggggactgcggaattacgagggctggctgttttacaccggtcacattttctattggcagtgactgattcatgggaaagggctttgaaggaactacttcagtgcacacacaaggtacgaacctctcaggcctttcgaagaactttcataattcatgaaagcccagttctgaagattcacgtatccatctggagacctacaggaagaaagtgattgggttcctctggttcttgcctgcttcactgtggatgggaagaggtgacaacctcagtctccctttgggacctgtccaagggtaggcaaccmccttcaccttcacacagattgaggagacactggactttttacccattttctttaatcttcaatattaatattgtgtttrcattgatgagaacaagagttaatgccctaccctctgctgggctgtttgtattgagttgcaatgtgaccagcgaaagctgcatttaataaatgaaagtacagactgtttcttccccattcccctcccactcttgcaggaagctactgagacacaccttgacatagagagctaaattgcagtggataaacagcaacttcacactttctgttcccccattctatttttctcatcatttgaactttagccttttttttccccttttgcctgaagttagatcccactctgtctctaactcaaaccatcttcaagttttccattccgcatctttctcaacactggagccagatgttgtcttctaccagatgtgggctaggagggtaaatcctggtaatcaattgtaaagggaacatcccatccttgggcctggtagtcatgtgggaccctatagcaatccggtttgtgagatcactcacgatgttacatgctcaagtggatgttacacggaaatttatacaagaattaggaaaattaccattaggactaatttttgcatagatctagctaggcttatgtatgtatgtaaatatatatgtagacagagcatacaagtatatagcctatatacaaagcatttataaataaaaagtgacatatatgtataaagcagaacaaaaattttgaaagtacatgtcaaagtccaatttgttcagtggtgtgccaggccagcttctacatgctcacaaggcctttttgggcatatttccagtttccacgttcagtgattcctctgtccccatccccaagagctagttgttaaatatttaccagcagcatatcattgactttctctctcccctgtgtacacacaagcacacacagacagatacacagatacagaggcactcactaatttctcctccttccctagagaggaccactgttaggagatgtacacataccgatacaggttttgaattaatcattaccagctacttgagccaagtgaaaacctgatggtagcactggttcctcaatgttaaaaatccatttttaattccytaaagcctttttatttttaaaattttgcttggcccctgactcatgcccagccaccttgctttcacttgcatttttatgggcgtagctggtgaccatgtaatttgtcatctaaatcgggtcacttctgagaatgaaaggtgctaattatttttacacaataggcataaactagaagatgatgtaccttcacgtacagtgaatttattaaggccagaaactgatacttcacaccaacaggagaaaatcctatttccccaaagacaggtgccttacactgtaagccaatctcactgaaggctggagctcagacattggcggatgcccaacttcaacagagaggctgccaacccaatggaggctgaggtccgcagagccagcagcctgcattcccagaacttacactgggagcagcagttcactgccagccccagcttatgtgtggggagctgtagccatttgggcagaggtaattgcaaaagatgttgatttctttgcatcaattccctggggggtaaaacaggcctttaaatgtgtcacacagatgttttcatgcttaaataagccaatactaatcttggctttcagttgagaggaaggacaaggttccctcatttggtccccttaacagtcagtgtggaggggaactgagatgttttcagtaaccactatgtgcagaagcctttggcaggcatgagttcaccgaacccttggagcaaaactgcaaagtggatattaacatttctacttggggaacctgaatgcattctgtgtaattaagtaactcctccaaattcacatggttaatatatggcagacctagaatttaaatcaaatcctacttctttgaatccaaaggcacataacctgcaatgctacttcctttcccaataagaaggaaacagatatgaaacagtgacagacaagagaatttgaacctatgtaggaagattcttggatttctagtcttcttccttcaacatccatccaataacacacacagtccagacagcaatctcctaaaatatgccaaatcttgctatgctcatggacttcctgaaaattaatttgaaatagacctgggtgatctataatcatattcagacagctgggttccactctaggggatagtaattgattctctgaatgcttctcctgggttgtttcttagattacatggctcaggtagagacactaagttttaagctctcccttgtaccctgacttagcatgctgcttcagagtgatctctctgaatgtgttgagctgatttacagagcacatatttgctgagttgactaatagcctctttgtgccccatcatgaaaggacagaccctactttaattctgttcctttcaaagactctactgtctttgagttaaggcttcatttgtggtcaccaggcctttagggagctctgtgttagtgaaagaaatgtgattcaaatcccctctcagacacagctccttcacactcttggtagagataataagaactaccctttattgaaccaagacttctatggtagttggcaatgatggatcctcacagctatgttataaaataagggaggtattattatccccattatttagctaataaaactagctcccagagaaattaatgtgacttgcccaagaccacacaggctgctaatggaatgccagaatttgaaccaaaatctggctggcttcaaaaacccctgtctttccactaaaatgtgctactgccttcccatacaatactgaaatcagcttagctgcgaggcttgtacagtcgtatcttcatgtacttcatatacttcgttttcctcatttttttttaaccctaagggtttattattcagcttagtgccattcaagtttatgaaatgtcacttatctgccatatgcattctaagaggtttcagacccataggatctaatgtcggatataccatgatctttgtttccattcatttaacaaaactccttttaagaagtgtcctttaatttcaagaaataactggtgatatccaaaaggaggtaatgggggtgccacaaaaatgtggggtttctgactgtgaatatttaatggatttggtcattggtttgttgtaacacattcgtatagtcttttttttttttttttgagacagagtcttgctctgtcacccaggctggagtgtagtggcgcgatctcggctcactgcaagctctgcttcccaggttcacaccattctcctgcctcagcctcccgagtagctgggactacaggcgcccgccaccacgcccacctaattttttgtatttttagtagagacagggtttcaccgttttagccaggatggtctcgatctcctgacctcatgatccgcccacctcggcctcccaaagtgctgggattacaggcgtgagccaccggtggctcaggttaatatagtcttaagagataatgtcttctggaatgaaaaaatgccaggcagttctgggaaagtgtttcccaaggtgtcgtaccaaggccatctgatcaatgaggccaggacaatgtcatgaaatgattgacagggctcactgagagcaaagctttgacagattcctgggtaagtggtgctgaagaaagaaaataagggctctagtgacatcagtaatttcactgcactttttatcatttttttctgaattccacaagtaatgtattgagcatctactcattggtggacattatgaatgcaacagtgaaccaggtacagtctactttcatgtaagtgcaattcattagacagcagaaaagtaaacagataatgccaaggctggtttcaccttaagactttcacagaaacggttttagttttgttttagtttcatttatttttgaaactgtaagtttgaaaactaacaggaaaattgcaaggataatacaaataactttatcccttacatttagattaaccatttgttaacattttgccacatactcttcatagtttttttcctcaaacatttgaaaatgaattgtagataccatgcccctttaaatttaaatactttagtgtgtatttttttaaaacataacattgtcttgtataaccaaaatacaagggttaaattcagaagttgttttgttagttcagtgttttgaatgaaaaataaacatgcatacacaaggctatgcatatgtctgtatgcatatgtaattttttgagtttattaatgttatatagcatattatgtgacaaaattttatggcaagtagtgctaaaaagccagattcagaaggtttaccatccacatgtatacatttctgagatgattcaatatgtgggtccctaaggcaatgtgtactataatatgtcactaacttagtcgccttattaccagacaatgaaagtgattattttctacctgcttaaaagttttataacaactaggccgggcgcggtggctcatgcctgtaatcccagcactttgggaggccgaggcaggcagatcacgaggtcaggagatcgagaccatcctggctaacatggtgaaaccccatctctactaaaaatacaaaaaattagccgggcgtggtggcgggcaccagtagtcccagctacttgggaggctgaggcaggagaatggtgagaacccgggggacggagcttgcaatgagccaagatcgcgccatgcactccagcctaggcaacagagtgagactccatctcaaaaaaaaaaaaaaaaagttttttaacagctattaagatattcatcagtttcagttgaaatgctttttgtgttagaatgcrtgtttattatgtgtggatataaatgtgaaccttcatagtttttttagtttctcagatatgcaaggagaaaagatacatcaaaacggcgatgtaagaatttttgacttttgcgggccgggcatggtggctcacgcctgtaatcccagcactttgggaggctgaggcaggcgaatcacttgaggccaggtgttccagaccagcctggccaacatggtgaaaccccatctctactaaaaatacaaaaaatagccgggcacagtggcagatgcctataatcccagctactcgggaggctgagaggagaatcgcctcagcccagaaggcggaggttgcagtgagccgagatcgcgccactgaactccagcctgggcaacagagcaagaccccgtctcaaaaaaaaaaaaattcttgaattttgccattatgtatgggtccacataatctagctcattaatattccagctttgaatcttcaccctccccaaagattatataatacttaggtaaaactaagtgacttggttcctttccccatgaatgttaagatcaacatttaatattgagaagatcagaaacatcttctacgtaagtgatagaaaactgcgtcaccctactgattccagcaccaatgcaatgggagcgcatagaggcctctttatgtgcagcggcctagcaatcggcctcaaggtaaaaagctccacttagaagtctctgagaaatgcctctgttttcttggtggtccctgggtactgggtcacaatcggctgatcactctcagacccccgaatcccaggaaaacctacgtaagtgatgccttctgcagtctagtgcatcttgtagtaagcgaaaggcaattctgagcttcacaatttcattaactctgagttatttgaacataacccatgtctaattcagcagaaagaaattgatggaagactttgatgtaatcctgtcctttgacaacagatctgccttcaacgttctaatattgttcagagctatctttaagcaatcgcagctaccattaatggagcccttgggcgctgagtgctaaatttgttgcttccgtagcttacaggactcccatgagagaagggattttttggggttttatttgttttcttttgagacagggtcccctctgtcgcccaggctggagtgcagtagcacaatctcagctcactgcaacctctgcctccccggattccagcagttcttgtacctcagcctcctgagtagctgggattacaggcgaacgccaccacacccggctaatttttgtgtttttactagatacagggttttgccatgttggccaggctggtctcgaactcctggcctcaagtgatccacctgcttcggactcccaaagtgctgggattacaggcatgaaccactgtgactggccatgagaagatattatttactagacgaggaaactgaggcttggtgagattgagtaattggtgaagccacaaatcaaactcttttttttttttcctc

SEQ ID NO: 93835 - DNA, 22115 bp, Homo sapiens
  misc_feature (1)...(22115): n = A,T,C or G
aacaagtggtgaagtttcggattaaactaatgaaaaatatatagaaaaccagaccaataatataatcattattatatagagaaacaacaaaaggttttgtatggaagaaaaaaataattacagtatactataaatgtcccctatgaatagcatatccataacaaaaatcacgtaaacactgagtgtcgtttgctcggtcctaataaaactgtactagaaggatgggggtgagaaacgtttgcaaatgggagcaagactaggaaagaaaatgaaatcctatcttccaggccaggcacggtggctcacgcctgtaatcccagcactttgggaggccaaggcgggcagatcacaaggtcaggagttcgagaccagcctgaccaacatggtgaaaccccgtctctactgaaaatacaaaaattagccgggcgtggtggcgcatgcctgttatcccagctactcaggaggctgaggctggagaatcacttgaacctaggaggcggaggttgcggtgagccaagatcatgccattgcactccagcctgggtaacaagagcgaaactccgtctcaaaaaaaaaaaaaaaaatcctatcttccacagggggaagccaatatttgcctaaagctgaaaaatcattaaataaacaatcatgcatgctattttgagatgcagtggtttagattatcaaagaaagtagtgaaagttattgtctttcatgagagggaaaggacagaagtggagcaggaagcagttgttggtgagagatttgtagaactatttgactctttaaatcatatgcatctacagctttgatgagaatattmgaatttaaaagaaagtaaaagagaagacaggaaagaggaaggaagggagggagggagggagggaaacaaaggcccggtgcagtggctcacgcctgtaatcccagcactttaggaggctgaggcaggtggaccacctgaggtcaggagtttgagaccagcctggccaatgtggcaaaacctcatctctactaaaaatacaaaaaaattagccgagcgtggtgatgggcacctgtaatcccagctactcaggaggctgaggcaggagaatggcttgaacccaggaggcagaggttgcagtgagccgagttggtgccattgcactccagcctgggcaacagagcaagactccatctcaaaaaaaaaagaaggcaagcaggagccaaatcattcaggggctcaaagatggggtgcacatgacttaatggacattttaaaatctcaagtaaacccctttcccagtcagggctcagatttcttcatctatatcttgaggggttgggtgacaactcctgttcaacctgtctgagatcatcatgagctgtaggacagaatgtaataaaatatttacatgatcaagggcgatggttctttttttttttaaccttttaagtaggaagggtaatgtgctgtaacaagatttgagacaagcatgtctcatatataagcataaaaacccaatcatcatgcttaccaagtacaaaaggatcaagggcagtggttctaaagaagaatcaccctactgtaaaatgtagattccctggctaatcttctggggagtctgcctccttggtgtgaggcagggatggggaactggcatttttttttttcttttgagacagagtctcacactgctcattctgctgcccaggctggagtgcagtggcatgatctcggctcactggaatctctgcgtcctgggttcaagcgattctcctgcctcagtctcctgagtagctgggaccatgggcacccaccaacaggcccagctaatttttgtatttttagtaaagatggtgttttgccatgttggccaggctggtctcaaacccctgacctcaagtgatccacccacctctgcctcccaaagtgctgggattataggcaggagtcacatccaacccggaactgacatttttaataagcattcaaagacatctgatgccagccatctgcttgccacacgttgagcaacgctactccaggacaagtccttggaggtgcaagatcacaggtttaattgagataaaacggcaaatcaattccccttttcagggagaaagtgtcaatttggtattgatatgtttttagcacccctttagcgttagataatctcctggaacagggagctggccacaggcaaaagaatctacctggaattgaattacactgtttggttttcattgcattctcctttattcttaccttctattatgggaaatgaaacgaattttcgatttacaatagtgacacaaagtttcctttaaaatagattcactgaaatttctaagtatccaaggatgtattttaggatgaagagacaataaagcattttcactttttcctagactcactagattttggcacatggatacttgcaatattgatttgtattatgagagtgatctaattattacaaaaggagctataatcactaacttattcttaataataatggttactggtacctttacaataatgtacaatccaatgtttaaaaatgataccacttgagtttggtttgatcctataaactttcaacaaatgtcttgggaggccaaggcaggcggatcacaaggtcaggagatggagaccatcctggctaacgcggtgaaaccctgtctctactaaaagtacaaaaaattagccaggcgtggtggtgggagcctgtagtcccagctactcaggaggctgaggcaggagaacggcgtgaacccgggaagcggagcttgcagtgagccgagattgcgccactgcactccagcctgggcgacagagcgagactccatctcaaaaaaaagaaaaaagaaaaaaaaattttttttcaacaaatgtcttaaaatttaaaagcaggctgattagtttggaaccagactacaagtagagctaacatttggtgaataagaaaacatcacactacattttggatgtatgaaagaaaacttgaccatgtgaagatatatgaataaagaaatgtactatagatactactttaggaaaaaaaagagtgatctataaataaaaacatttgacgtatttgaaaacgtgtgggtcttgcatacgactcacatgataaatctaaaattcaacctagcaatggataagaattaagaacggatggtttgggcaaaggacattaacagacattgctccaaaggtgatacataaatggccaacaagcaaatggaaagatgcttaacattaccgattattagggaaatgcagatcaaaaccacaatgagataccagttcaggcccattaaaatggctattatcaaataaacagaaaataacaagcattggtggacaaactggaaccctcctcctgcattgctggtgggaatgtaaaatgttgcgtccattgtggaaaatagtatggcggttcctcaaaaaattaaatatacaggctgggcacagtggctcacgtctgtaatcccagcactttgggaggccgaggtgggtggatcgcctgaggtcaggagttcaagatcagcctggtcaatgtggtgaaaccccatctctattaaaaatacaaaaattagctgggcatggtggcaggcgcctgtaatcccagctacttagcaggctgaggcaggagaatcgcttaaacccaggaggcggaggttgcagtgagcacagattgcgccactgcactccagcctgggcaacagagcgagactcggtctcaaaaaaaaaaaaaaaaaattaaacatactgttaccatatgatccagcaattctactactaggtatatatcctaaagaattgaaagtaagaactggagcgtgcaatattggttttctgttcctgtgttagtttgctaaggataatggcctccagctctatccatgttcccacaaaggacatgatctcattctttttttttttttttttgagacgaagtctcgctctatcaccagggctggagtgcagtggcacgatcttggctcactgcaacctccgcctcccgggttcaagtgattctcctgcctcagcctcctgagtagctggaattgcaacctctgcctcccgggttcaaatgattctcctgcctcagcctcctgagtagccggaattacaggcagtcaccaccacacccagctaatttttgtatttttagtagagatggggtttcaccatgttggtcaggctggtctcgaactcctgacctcgtgatctgcctgcctcagcctcccaaagttctgagattacaggtgtgagacaccatgcctgaccatgatctcattctttttcatggctgtatagtattccatggtatatatggaatatacatgataagtcactctcacttcagttggctttcatgaaacactgtgacaggcacaagaggacaaagtgtctgccggcatcgttctcctcctacctcattgactgaactttgctgcttccactcctttgcatgacttccaaatatcagaggaccttagggcacagcttgtgcctcttctcttctctacttataggatattctctgcctagtgatctccaccagcctgtggtatagatgtacctgtgtgcttgtgactcaaagatgcacacctgcagtcctgagctctatgcccagacgtgggttctccacttggatgtctaatggccatctcaaacttagcatctccagaccgaaaaccccaaatctgttatgttattcccccaaagcccaaatccataacttccccttggcatctctcccccaaatccctccctcactgcactcttgcctttccctcctccaacaagccaagcttttcctaaccacagggcctcttcaggaacagtttcctctgcacaaaactctgttccccagacagatcctttcacctcctctgaggctctgaacgcctcccttcccacctctgcttctcactccttcacattagtctgtttcatttccttcattgcacttattatcatctgaaattatgtgttggtttacttattttctctcacacttgattttttttttttagaccgagatttgctctgtcgcccatgctggagtgcaatggcacaacttcacctcactgaaacctccgccttccgggttcaagctattctcctgcctcagcctcctgagtagctgggactacaggcgcccgccaccacgcttggctaatttttttgtatttttagtagagatggggtttcaccatgttggccagcaactgtgcctggcctcacacttgatttttaatctccatgagagcaagcactaggtcttgcctgggcctttatcaatagcagtgagcatagcacctggcacagaggtagttctgaacattaattattgaatgaaataaaataatgaatgtaggctgggcgcggtggctcacgcctgtaatcccagcactttgggaggccgaggcaggcggatcatgaggtcaagagatcaagatcatcctggcctacatggtggaaccccgtctctactaaaatacaaaaattagctgggcatggtggcactcgcctgttgtctcagctactggggaggctgaggtaggagaatcacttgaacccaggaggaggaggttccagtgagccgagatcatgctgctgcactccagcctggcgacagagcaagcctctgtctcaaaaataaataaataaataaataaattttaaaaataatgaacgcaggcccaagaagagttgtgggaaatggggtgatatttttgcatagacttctaaggctaagaaggaaaacaaacagacgtggtgggcacaaatctacccccaccccaactgggtcccaactctaggctctctggcctggcaccaccactgaaaggccccgttccccaaacctcagggtattcttagtccctcctgttcccagcgctgccaatcccccgcccacccccactttagttgcgtgttccagcctctccgccccgcccctccccgccctgaaacggacgtgctttttagaggagtccactgggcttggagtcagtggcaataaccaggggcaataaccaggcgtgtcccaggggggagccccgctctgcagccctgtgcgccgtagagagctggacttaggctggcagcatggccgagttcagggtcagggtgtccaccggagaagccttcggggctggcacatgggacaaagtgtctgtcagcatcgtggggacccggggagagagccccccactgcccctggacaatctcggcaaggagttcactgcgggcgctgtgagtgcgtgggagtggatggggtggaggtgaagggggcgagcaggagggtccggcctgacgcatacttaacctcccctcaggaggaggacttccaggtgacgctcccggaggacgtaggccgagtgctgctgctgcgcgtgcacaaggcgcccccagtgctgcccctgctggggcccctggccccggatgcctggttctgccgctggttccagctgacaccgccgcggggcggccacctcctcttcccctgctaccagtggctggagggggcggggaccctggtgctgcaggagggtacaggtgaggggcgggccgggctggggctgcagggggagcacaggaaggggtaggggactgggggttggggagaagggcaggtgaaatggagaggtgagctggtgtggccacagagtagcgggcagaggagagggaatggcggagccttggggagcgggaggtagcagcctggtgtaggagaaactgtacttatgggaggaggggacctggtagagggtggcaatcgtggagactgtgtggctggtggtagtgatggtgagtttctctccccaccccaacctactccccttctcccacagccaaggtgtcctgggcagaccaccaccctgtgctccagcaacagcgccaggaggagcttcaggcccggcaggagatgtaccagtgaggagggggttactgatgggggagggtgtgcccaaacgatgaggggcagcttgagtgtcctggtcatgacagagattaaaagcccctgcctccacctctcctatcaaagctgctcctgggatcagcagcgtctacaggaacgtattagaaatgcaaattctcaggccacctccaacctactacgacactgagggtgtagagtgggaatttttgttttgacaagccttccagatgactctggtggccactgatgtttgaaaaacactgctctagggccaggtgccgtggtggctcacacctgtaatctcagcactttgggaggctgagggaggcggatcactggaggtcgggagttcgagaccagcctggccaacagggcgaaaccccatctctactaaaaatacaaaaatcagctgggtagggtggcgggcacctgtattctcagctacatgggaggctgaggcagaagaatagcttgaacccgggtggtggaggttgcagtgagccgatcacgccattgcactccagcatgggggacagagcaaaactccatctcaaaaaaagaaaaaaaaaaaggaaggaaggaaaaggaaggaaagagagaaagaaagagagaraaagaaagaaagaaagaaagaaagaaagaaagaaagaaagaaagaaagaaagaaagaaaagaaagagaaagaaactgctttaaatgccttacctttgctggtgtcttccttgccctgggactttttcatgcatcrgcttgttgtgtcctcccagaaatctgagtagagccagaaacacgcccttcaagccccaggaaactcaccctccagggctagcaaggggtgagatggggsctctctctgtgctctgggctcagcattggagatcacaggggaaaactgggacttggagataacagaggagttggagataacagrctagataacagctagtgaggattcccttggcacaaagccaggaactgcattcagaaacagattttcaaaagatcttgatccggccaactcatctgctatctaaagcctgggctgcaggcttttgctcytggtctgtgggatcagagcagccacaggctcatttggttcctggtgattctccatgtgtcatgaattccacccctaaggaaaccattgcaccaaatctggcagcaacagccccaagagagggaatagacattgagatctactgtgtccatggagacccagagtcagcctaggccctgccaaaacgagctgtgagatctyagaccaattttttcatctcttcaattcttattttcttctgtaaaagaaactaagaataccaatctcrtttgggttaggaggaacaaatgagaaaatggttaagaatgtaggtggtcagctgctaagtcttgcacaactgtgtgctcttgctgttgttcctgtctttcagttcactctgttccaacactctaggctcttataaaacgtacagtgaggtctcagatccattgcaacagcattgcctgggagcttgttagaaatcagaatctgcatttaaccaagatctctatgtgagagggattcaagtctgagaggaagggtttggccaccacctggtggcagtgtactttaattgcaaatttttctttgaagttgaaagctcaaacccaaaagcaagttttgaatgaatcaaagaatgaatgagtgagagcatgactggctaggggtcatcaagtttgcagatacatgaatttaccatttccctggaaggtctttggctgtgttgcttgtttgagaatagaatttagagatgcctcrggcggctccccctaaactatgaaggctgaagtgcctctctatgggacacctaccaaaggcaactgaaaccttctgcgcagcccctgtcccaggatagtctcgcctctacaagatgcgtctgtgttagtcgggacttctatagttgcaagaacaaaagctaactccaactagcaggcagaaaaaaagtttgtcggccagacacagaggcacttacagaaacacaggcaggaattgtccacccagtggaaaatggccataactaacagtctgtgtttactgctataatctacatatccagagagagaccacctctctggctcagccccaatggcaaattccctggaaaggactctgattggcccagctctagtcaggtgctcaactctggaccaatcacccttgaccaggggagccatctcactgtgggaaaatggcagctcccttgcagcctccttgggtagaatggaagggcagctcccaggagggccctcttggctgaaggggtctggctgtkaccaggccccccaaggggactgccactccatctgccctagcaaagagtctccctgaggcctcttgctgaccaccttccctctctaccctccaggtggaaggcttacaacccaggttggcctcactgcctggatgaaaagacagtggaagacttggagctcaatatcaaatactccacagccaagaatgccaacttttatctacaggctggctctgcgtgaggatgcccacccttccctgcccctgggcctcagatgccctatgacctctgccttctgccctcccctagtcagttcccccaccctcagtgrtatgagtcacatagtyctgcccaggaaacagcctccttcccactaccaatcccrcagagcaacagctaccttaggggtagtgactaccttgggcccggaggctggttcaggatcccaagaggcataaggctggctgacagggaagggtctcccagggcctcctccccactccccacccctcacatcccctggcagttttgcagagatgaaaatcaaggggttgctggaccgcaaggggctctggaggagtctgaatgagatgaaaaggatcttcaacttccggaggaccccagcagctggtgaggagcttgggccagggatcctgacctctttcctggggcatcagctcctgtggctgcccagagtctcagaaaaccaagcaccaatttgctakgtaaccctgatcaggtccttgctagaccttacttttccccacagagacaaaagagaatatggacggaggggatccctgaccttctaacgccttctaatacaacagacatttgttgagctgctacatatcagacaccgggttaggggctacatggttcttcacggggctcacagttgagcaggccagttggtgttaattagactcaaaatcaaataattcatttcactgtgaaacatgctcattggatccagtgagggtgtaaagggggcacctgccataccctggagagggccccaggaaagctctcccaagggggtgaactatgctgagacctcaaagttcagtaggccttagcagtgccaaggatgggccgtgggggcagagagcagttcggggaacagtgagtgtgaaggccctgaagacagaaggatcagccacctttggaggaaagaaaacaccactgtggtcaaagtgtaatgaacaagagaaggagagcgagagaaggagcaggaaggtgcacgggggtcgcacaggactttgtcggccatggcaggacttgcgtctttcctcagcccagtgcttgactggttgccagcaggggaataatgtggtcactgtgcactgctggggggcaagagactatgagaatctgctatgaggctctggctgtggtcaccagaggatggtggcctcagcaaggcagtggcaatgcaatggagaggatgggtggaccgagaggtaytcaggatggagaatcaatgggatttgatatgtgaggggtactgccaagagaggtccccaggctccggctgggcrcagtggctcacacctgtaatcccagcactttggaaggccaaggtaggtagattgcatgaggtcaggagtttgagaccaggctggccaacatggcaaaatcccgtctctactaaaaatacaaaacttagccaggtgtggtggcatgggcctgtagtcccagctactcaggaggctgaggcctgagaattgcttaagcctgggagatggaggttgccctgagccaagatagccccactgcattccagcccgggcaagagagtcagaccctgtaaagagagaaagaggtggggagtgggggagagagagagagaggaaggaaggaaggaaggaaggaaggaaggaaggaaggaaggaaggaaggaaggaaagaaagaaaaggaaaaaggaaaaggcggaagctgaggcagacagatcacttgagcccaggagttcgacaccagtctgagcaacatggagaaaccctgtctctaccaaaaagacaaaaattagccaggcatgctggtgtgtgcctgtaatcccagctacttgggaggctgaggcaggaggatcggttgaacccaggaggcagaggttgcagtgagccgaggtcacgccactggactccagcctgggcaacacagcgacacagcctgtctcaaaaaaaaaaaaaaaaaaggaaagaaaaagaaagggtcccgagtctcctctgtaggcaactgggtgggggatggagctgccacttcccaaatatcaggcaatgggactgacctgagctgtaggaataatctgtatttggcctgcaacgtgttgcatttgaggctagtgagttattcagggggagtgtcaggcagacactgggatgcatgggctggggactatgatttgctgctgggtgaagaggcagtgactgaagacaaggggcaggggaggtaactctgaggacacactgtgaagattagccagaggcctgtgggagctggggtaaccccgtccccgtgtcccccaccccctgcaaagcacgcatttgagtgaccccgttcccctgtcccccaccccctgcagagcacgcatttgagcactggcaggaggaygccttcttcgcctcccagttcctgaatggtctcaaccctgtcctgatccgccgctgtcactacctcccaaagaacttccccgtcactgatgccatggtggcctcagtgttgggtcctgggaccagcttgcaggctgagctagaggtgaggggtgcagggatcttggctctgcacagtcccatctcagtgccttcacacccgtcccctactggagacagaggggcacactcacatttgttagggacctaccgcgtgctgcgtgccaagcacactctcccgaaacacactcctctcccagccctgaatcctctcccttctacaactgcacccccttcatttagaaaaccaggtggcagccccagatctcctttcttctgcagaagggctccctgttcttggtggatcacggcatcctctctggcatccagaccaatgtcattaatgggaagcctcagttctctgcggccccaatgaccctgctataccagagcccaggctgcgggccgctgctgcctctcgccatccaggtatgcagtcaggcaggggcagggcagcgtgaagaagagtcaggagaatggttggaagacactcatggctgcctctctccccacctgcctccccccagctcagccagacccccggcccaaacagccccatcttcctgcccactgatgacaagtgggactggttgctggccaagacctgggtgcgcaatgccgagttctccttccatgaggccctcacgcacctgctgcactcacatctgctgcctgaggtcttcaccctggctaccctgcgtcagctgccccactgccaccctctcttcaaggtcagtggcttgacaaggtggcccagcctgtgcccatgcctctgtgcctcttctaagcagcctttcctcacatggccctatccatgcaagctgggatgcaragcccccgtccgcttcagcagcatctcctggcacaactcccctggaagcctgctatccagcaggccctaagtaacataaatgcagcaccccagaaaggctctcgaagggagatcaggcagcatcaacagccgtcatagaagcccaaatcttaggaaggggaaggacctggggctggcaggtgccwaagtttgaacatggctttgagagaccamgttctctgcagatacttctggggtaggggagggctgggtgggaggcccccgtgctctagggtgggttctgtaggtttcctagaccctgctagctttcagacggcatggattcraggcatctcctctgtgaagggcaggatggccccctcccagggtccacccacagtcgctgctcagattctctgatccttctagacttctcctgggtcccagatgcgggccctactctgtgctcttctgtactagctggttctttctgactatctgcagcttctgaggcctggcrctcagaggtgggctctggtggacggctccacattgccaggcccacaggccctggttttcctagtgccttccctgcctaggggctaggaaatcacaggaygccagagccggaagacacagggctcagccacatcagcacccacrtttgacaaaacaacctgaggctcagggagaggaaggarcacgcctgagctcccagaacaagctgytggtggagcccagcaggaactccagggctcagacccctgtcccaggctgcctcctctcattcttgttgcctctttccaagtgacttgcarggctggtgcctgtgtgggggaaggtctggggccagaacaacccaggcctcccctagctctgccattttcctgccatgcagctgctgatcccgcacacccgatacaccctgcacatcaacacactcgccmgggagctgcttatcgtgccagggcaggtggtggacagggtgagagctgtgttggggagggagtaggcaggccactccttcaatgtgacgaatttgaggtcctggggtaggagtggcccatctccccgacaccagtgctacctcctgcttctggagcaaggtctgtaggacccaagagtcctgtctctcagtccacaggcatcggcattgaaggcttctctgagttgatacagaggaacatgaagcagctgaactattctctcctgtgtctgcctgaggatatccggacccgaggagttgaagacatcccaggctactactaccgtgatgatgggatgcagatytggggtgcagtggaacrgtgaggggccgtccctggagagccgagggctggtcggggaygtgggaagacaggaaaggagactgaggccccagggaggctcacgttgaggaggagggccagacattcatgatgctaagcagaggcattcctcagagcgggtcsgggttggaggctggacctgaacctggatgcattgcagctttgtctctgaaatcatcggtatctactacccaagtgatgagtctgtccaagatgacagagagctccaggcctgggtcagagagatcttctccaagggcttcctaaaccaggagagctcaggtacagggacctcagccctcaggcgcatttgagtgagcccatccccgtgtcccccaccccctgcagagcacgcatttgagtggccccgtccccgtgtcccccaccctcaaggctcaccctcaagcctccgcagcagggtcctcaggtccctggaagccccatcccagcccagctctccttgcaggtataccctcctcactggagacccgggaagccctggtgcagtatgtcaccatggtgatattcacctgctcmgccaarcatgcggctgtcagtgcagggcaggtgaggaaaggccagcgcccgaggtggcaggctggaggtgacccagctcctcagcctcattctgccctctcggccttcagtttgactcctgtgcttggatgcccaacctgccacccagcatgcagctgccaccacccacctccaaaggcctggcaacatgcgagggyttcatagccaccctcccacctgtcaatgccacatgtgatgtcatccttgctctctggttgctgagcaaggagcctggagaccaagtgagtgtggggctgggggccaggctgggccaaattggggtaagagagggtgtgatgtttaccctgctggcccagacccaaccctgccatcaggtagcgggtccctttgccccactgaccctccagtgggacacatgagccttggacatttcacagtgaaggtcaaatggccaaatgcgatgatgcggagccactctcagtagcaaggggaacgtgtaattatgcttcttggaaattccgaattgagctttcattccccgaaagcttcytgcagataagctttacatggatatctgtttaagaggagggacatggatcaggccccatcgagggctacttcaggtcccacacttgggggctagggccagagctggctaaggcaagttgcagctgctcagatagtggggaccaggagtctgggatgcaggacctcagcagccgcctcacccaaccttgtggtggatcctcagaggcccctgggcacctatccggatgagcacttcacagaggaggcccctcggcrgagcatcgccaccttccagagccgcctggcccagatctcgaggggcatccaggagcggaaccrgggcctggtgctgccctacacctacctagaccctcccctcatcgagaacagcgtctccrtctaaatcccaggggaacacaggcccagatgacatccctttgaccacatcgctctaggataactggcacccagagaaaaggactcctcagaaaaaacaggcccccatgtgcctctcctgggacaacmagactctgtaactcacccccaccaccatacacacacacaaaaacagaaacaaaatcaaaacagagaaagcagaaaatctaccaagaacagagtctcaggacagwaccactgagtcttttggaggctccaagcctcaaagtgcccgcagagcccaccttgagggttttgctagttggttttgttttgcgttttacagccgtggggggaagcacataatcccgccccrgggcccactagcatccactgattggaccttatggtcacccaactcaaggacagccaccaagaagtggctgccaaagagactgggcgcagtggctcatgcccataatcccagcactttgggagatggaggcgggaaaatcatttgaggtcagaagttcaaggccagcctggacgacatagcgagactccacctctaccaaaaaataaaaattaaaaaacaaattgggcctggtggtgtgtggctgtggtcctaactactcgagaggctgaggtgggaggactgcttgagcccaggagtttgaggctgcagtgagctatgattgtgccacggcactccagcccaggtaaccgagcaagaccccgtttctattaaaaaaaaaaaaaaaaaaaaaacaaggccgggcgtggtggctcacacctataatcccagcaccttggaaggtcaaggtagagggatcacctgaggtcaggagttcaagaccagcctggccaacgtggtgaaacccggtctccacccaaaatacaaaaaatagctaggcgtggtggcacacatctataatcccagcaacttggaaggctgagataggagaatcacttgaacctgggaggcagaggttgcagtgagcccagatcatgccaccgcactccagcctgggtgacagagtgagactccgtctcagaaaaacaaaaatgaaaacaaaaaatgcccaagaggttgattgtgacctactgtctcagctttaaagtgaacaaaacactgaaaaagggtcactgggagccaggcagaatgagaacacccagtcggcacaggcagtgcctatgtatactttcttaaaaacatcccctaaagttaaagacttgtacgttataaggcaggttccgtttccagagaatcagaaaacattgtcatatctctaatcatactttgctgctagatttcatcatcactgatggatttacatttcatacacattctttcattctgtttttcttttttttctggctcatagtcggtgagcatccattaaggtaaaaaagtgtcctttaaaaaaaaaaaaacaactcccgtggcgacaactggtagacatcaccttaatcaaataatccaggtgagttcaggcgtggtggctcacacctgtaatcccagcactttgggaggccgaggcgggcgaataacttgaggccaggtgttaaagaccagcctggccaacatggcaaaaccccatctctactaaaagtacaaaaactagccgggtttggtagcaggcgcctgtaatcccagctatttaggaggctgcggcaggagaatcgcttgaacccaggaggcagaggttgcagtgagccgagatcatgctgctgtattccagcctgagtgacagggagagactctgtgtcaaaaaaaaaaaaaaaaaaaaaaaaaaaaaatccaggtgaacttgctgataccatgttgctttgctctaatgttgtaagaagagcacctcatctctgtggtttcttctagaaactcataactacagtctagtgatgagaaaaatacagacaaacccagattgagggacattctgcaaaatacttgaccagcactttccaaattttaaaattgcctttgcttttttggtgtaaaaacaaaatgcatcctttacaattcatctaatgatttccatcactactacacattgcaggcatgagtgcttttgtttttcagtttcactgatttttataaaacaatgtggacaaaaatgcaatttatatactataactgcataaacattaccattggaaaaaaacagaacagtgcctcagaaagggtagggctgactggcaagtggcatttgacatgctcattcctcgttgagagtgagtataccgaaagtgatttagagatatatgtatctgtcaaacttctttccatcaattcctgctaacttaagcaataaaggagttaatggaaaagaaatggagttccttgagaagttaaagagctgactatgcaggccaggcgcagggactcacgcctgtgatcccagcactggaagtccaaggcaggaggattgtttgagcccaggacttcaagacagcttgggcagtatagtgagaccccatctcttcaaaaaaaattaaaaagtagcagagcgtggtcgctcacgtctatagccctggctattcgggaggctgaggagggaggactgcttgatccacggaggaagaggttgcagtgatcacaccactgcattctagtaatccagactgggcaacagagcgagatcttgtctcaaaaaaaaaaaaggccgggcgcggtggcccacacccataatcccagcactttgggaggccgaggcgggtgcattacctgaagtcaggagttcaagaccagccttaccaacatggtgaaaccccgtctctactaaaactacaaaaattagctgggcatggtggcaggcgcctgtaatcccagctacttgggaggccgaggcaggagaatcacttgaacccgggaggcagaggttgcagtgagccgagattgcaccactgcactccagcctcggcaacagagtgagaccccatctcaaaaaaaaaaaaaaaaaagttaatcatgcagtttcaggaaagaaactgaaacccaggaagctccaggcatctgggggacaagggacaagaaactgatggatgctgtcctcaggcactgccatgggaataatgaagcgcctaccatttttcatccttgagttatttgcctccatattcagttccgtgagagaggctgtttgacgtaacacggagcagcagagaccactggttcctggaacagagagagtttatgttcacccaatacctcatgtacttcccaacatttcccagcctgccttaaagttagattgaggccatgtgactaattctggccagaacactaattcgcagaggagtgatgtgtgtcctttccaagatgggacagttacgagctggtgtgcctccttcatccttctattgccccattgcctatccctcggaggcatttccagctgacctagccatcctgacctctattgctggacttccagttcaggaggacaaggttcacaactgcccatcacagcgccggcacactgcaggtgcttggtaagtacgtgctgaatgaaggaattaattcctgcacaaataattcctaaaaccctgtggtgcccatcgcttacctgtgtctccccaaccagactgtgagcttcttgaatgcaggagctgggtctcactcaacttgccaggcctcatgcccagcgctgcattgacacagagtgatacccaacaaatgtttgtttaatgttggatgaagggaaagtgattggatggttgcatgcgtggatgtactggtgagttggagggcagttgcaccccagtcaataaactggtgtttgtttcagtatatatcttttgggatcaactatcatttccaggagaaactgcagcgtccaaggcagcatagccgtgaaaatccaagcagtcagtccctaaccacccttggagaagccaccaccacctcctctgcccagggcctgtgagcttgtgagcctgtgaggtccccccgccacacacaccacacaaccctagccctagagctctcagctggcctccccgccttgagaagagaaggttcttctcttctacagagaacttcacctctacagagaacattctctacagagaacattcacctctagggatatccagttaannnnnnnnnnnnnnnnnnnngatatccagttaatgctccagaatggtggcctccttgggctatgatggatggtaaatagatagaagatagatagtagatagatagatgatgccagatagatagatagatagatagatagatagatagatagatagtagatagatagaagatagatagtagatagtagatagaagatagatagatgatagatagtagatagtagccagatagtagacagatagtagatagaagatagatagtagaagatagatagatagtagatagaagatagatgatagatagtagatagatagtagacagatagtagacagatagtagatagaagatagatagatagtagaagatagatagatagtagataggagatagatgatagtagatagatagtagacagatagtagatagaagatagatagatgatagtagatagatggatagatgacagacagtagatagaagatagatagatagaagacagtagatagtagatagacagtagataatagaagatggatagatgatagtagatagatcgatagatagatgatagatagagagtagatagaagatcgatagataaatagatagaatatagtagatagaagataggtagatagatagaagacagtagatagatagtagaagatagatagatgatagtagatagatgatagatagtagagagaagatagataaatagatagaagatagatagatagatagaagatagatagtaaatagataatagacatatagccatgcattacttaacgatggggatatgttctgagaaatgtgttaggtgatttcatcattgtgtgaacaccgcggagtctgctaacacaattttaaatggtagcgcgtaccacacacctaggctatatggtctagcctgtcgctcccaggctgcaaacctgtgcaacacgttaccatgccgaatactataagcagttgtaacacaatgataatatctacacattgaaaaggtacaattaaaatatattgctaaaggcaaaaagtggtacacctaagtaaggcatttactgaaggccttggaaccagggatgccgatggtgtaatgaatggagctgcgggaccggaagtcgctgtgggtgtgtcagtgagtgcatggtgagggaatgtgagggcctaggccgtcactgtacacttttatgtgactggcagcacaaaattttacttagaccagcatcaccgcgaacatgtgagtaatgcattgtgctatgacatyatgacagctatgatgtcactaggcattaggactttttcagcttcattataattttatgggaccaccattgtacatgtggtccatcattgatcaaaatgtcattatgtggtgcatgactatagacagatatataaggagaaattaggggaattggctcacgtgattatggaggcggagaagtcccactacaggccgttcccactacaggctgtctgcaagctggagaccctgggatgccagtagcagcatggctcagtccaagtctgaaggctttggaaccacggatgccaatggtgtaattctcagtccaagaccaaaggcctgagaatacttccactggtcagagggccactggtatgggtcctggagtcccaaagccagagagccagggttctgatcaccaagagcaggaggaggagagtgtcccagctccaggacagagagaaagggaggaaatccttttctcccttttttcgttccaccaggacccacaatgattggatgatgcctgccacattgagggtggatgtttcccactcagcccactgactcacagcaatctcccctggaaacaccctcacagacacaaccagaaataatgctttaccagttctctcggtattcctcaatgcagtcaagttggcacttgaatgcattaatgatgaagtgttatataatataggtagaaaacaagtcacaccatgagaagcacatgatcccttttgttttttgttttttgagacggagtcttgctctgtcacccagcgagacatgccaccatgtggcatgatctcaactcactgcaacctccgcctcccgggttcatgccattctcctgcctcagcctccctagtagcttggactacaggcgcccgccaccatgcctggctaatcttttttattttgagtagagacagggtttcaccgtgttagccaggatggtctcgatctcctgacctcatgatccgcccgcctcggcctcccaaagtgctgggactacaggcgtgagccaccgcgctgggcccccttgtgtgttttttttttaagtgaagtatgtaaatcaatagaaatggcaaggaaagatctggaaagaaggatgcacacctagctgttgcttgagaaggagagtgggattgtacagcagggccacattgaggagtaaagaagtgggagccttaaactaagagagagagagagagagaaacagagagaggtgaaaccctgaa

SEQ ID NO: 93836 - DNA, 13692 bp, Homo sapiens
aagaatgctgggttatagataaggatggagtgttgggcagttccaagatgagcgaataggaacagctccagtctacagttcccagcataagcgacgcagaagacgggtgatttctgcatttccaactgaggtaccaggttcatctcactgggacttgtcagacagtgggtgcaggacagtgggtgcagcccactgagcatgagccgaagcagggcaaggcatcgcctcacccaggaagtgcaaggggtcagggaattccctttcctagccaagggaagctgtaacagacagcacctggaaaatcagatcacttccaccccaatactgcgcttttccaatggtcttagcaaacactacaccaggagattatatcccgcgcctggcttggagggtcccacgcccacagtgcctcgctttttgctagcacagcagtctgagatcgaactgcaaggtggcagcgaggctgggagaggggcgcccatcattgctgaggcttgagtaggtaaacaaagcagccaggaagcacgaactgggtggagcctaccgcagctcaaggaggcctgcctgcctctgtagactccaccactgggggcagggcatagctgaacaaaaggcagcagaaacctctgcagacttaaatgtccctgtctgacagctttgaagagagtagtggttctcccagcatggagtttgagatctgagaatggacagactgcctcctcaagtgggtccctgacccccgagtaccctaactgggaggcatcccccaggaggggcagactgacacctcgcacggctgggtacccctcggagacaaagcttccagaggaatgatcaggcagcaacatttgctgttcagcaatattccctgttctgcagcctccgctgctgatacccagacaaacagggtctggagtggagctccagcaaactccaacagacctgcagctgagggtcctgactgttagaaggaaaactaacaaacagaaaggacctccacaccaaaaccccatctgtacatcaccatcatcaaagaccaaatgtagataaaaccacaaagatggggagaaaccagagcagaaaagctaaaaattctaacaatcagagcgcctctcccgctccaaaggaacacacctccttgccagcaacagaacaaagctggacagagaatgactttgacgagttgagacaagaaggcttcagacaatcaaacttttcgaagctaaagcagaaagttcaaacccatcgcaaagaagctaaaaagtttgaaaaaagattagacgaatggctaactagaataaccagggtagagaagtccttaaatgacctgatggagctgaaaaccatggcatgagaactatgtgataaatgcacaagcctcagtagccaattcgatcaactggaagaaagggtatcagtgattgaagatcaaatgaatgaaatgaagcgagaagagaagtttagagaaaaaagagtaaaaagaaacaaacaaagcctccaagaaatatgagactatgtgaaaagaccaaatctacatctaatttgtgtacctgaaagtgatgaggagaatggaaccaagttggaaaatactctgcaggatattatccaggagaacttccccaacctagcaaggcaggccaacattcaaattcaggaaatacagagaacgccacaaagatactcctcgagaagagcaactccaagacacataattgtcagattcaccaaagctgaaatgaaggacaaaatgttaagggcagccagagagaaaggtcgggttacccacaaagggaagcccatcagactaacagctgatctcttggcagaaactccaatccagaaaagagtgggggccagtattcaacattcttaaagaaaagaattttcaacccagaatttcatatccagccaaactaagcttcgtaagtgaaggagaaataaaattctttacagacaagcaaatgctgagagattttgtcaccaccatgcctgccctacaagagctcctgaaggaagcactaaacctggaagggaacaaccggtaccagccactgcaaaaacatgccaaattgtaaagaccgtcgatgctaggaagaaacttcatcgactaatgagcaaaataaccagctaacatcataatgacaggatcaaattcacacataacaatattaaccttaaatgtaaatgggctgaatgctccaattaaaagacacagactggcaaattggataaagagtcaagacccatcagtgtgaccatcaggagacccattacacgtgcagagacacacacaggctcaaaacaaagggatggaggaagatctaccaagcaaatggaaaacaaaaaaaggcaggggttgcaatcctagtctctgataaaacagactttaaaccaacaaagatcaaaagagacaaagaaggccattacataaaggtaaagggatcaattcaacaagaagagctcactatcctaaatacatatgcacccaatacaggagcacccagattcataaagcaagtccttagagacctacaaagagacttaaactcccaccacaataataatgggagactttaacaccccactgtcaactttagacagatcaacgagacagaaagttaacaaggctatccaggaattgaactcagctctgcaccaagcagacctaatagacatctacagaagtctccaccccaaatcaacagaatatacattcttctcagcaccacatcgcacttattccaaaattgaccacataggtggaagtaaagcactcctcagcaaatgtaaaagaacagaaattacaacaaactgtctctcagaccacattgcagtcaaactagaactcaggattaagaaactcactcaaaaccactcaactacatggaaactgaacctgctcctgaatgactactgggtacataatgaaatgaaggcagaaataaagatgttctttgaaaccaatgagaacaaagaccagaatctctgggacacatttaaagcagtgtgtagagggaaatttatagcactaaatgcccacaaaagaaactccatcatcccagcccaaaaatctcgttaagctgacaagcaaattcagcaaagtctcaggatacaaaatcaatgtgcaaaaatcacaagtacaccaataaaagacagagagccaaatcatgagtgaactcccattcacaattgcttcaaagagaataaaatacctaggaatccaactcacaagggatgtgaaggacgtcttcaaggagaactaagtcctaactgtcaagttcaccttcctaacaaagttattccggatgtgatgtctccaccatcgtcctggtcccagagccccatcaggtgtgtcctcctgggcagcagcctcgcttctgacatctggtgccttcatgccaagtccaggcacagcacataacaagccttcggccactgtttgttgaatgaataaatgaatctttcaggtccgacaaggaaagcccaggcttttatcaggaaagctacaaaaatgcagaagtcacagtaaatcctgggagcaagagacgcctgaatgtcaagtgaggtcgctgtgttttgaggaagccacagccacgggtgagcatggagggagagacagcacacagggacggagcacaaacctctccccctccacgtgaccggcaggtttctgactgaatattggttagactcacactagaagtactcagtggtgctttggagccaccgctcacctcttttgattcctaggccaactcctgcttgacactgaaatgttgcgagaacactctaaagatgagccatggacttcctgcccagacttgatgctccttagacttttcctcggaggtggtgttgggtaccaaagatctggaatctcagcagcctccactggctggccctgggttcctgctgctgactcccagcttctggtttctgctgaggaaggctgcagggcagcacctttaggggaagccttgacttttccagatctgggctctctccagtgttttcctgaatgcccctaccagaagcctggctgtcgtctctgagcccttcctcatcctcctccctgtgtgaatcattccaactcctgccatttctgccccaaatgcacctccatacggctcatgtctcactttcttgacttcctccctctggtgaagccactgctgtctcatgggcctctgctaacccaggcggcttctttgtgaacccagagctaggcacagcctcaagccatgcagcccactggatgcagagtttagcaggcaagcaacgcctttgagcaaataagaaaaggttgccttttcctttggccagtctcagtttcgtgccatggctcatggcttggcaaccagagggaggcccagttttagctcccaccagagcctctgggccagctgctcttgtacagtgagcacctgcatccctgtactggaggccccgctcttgcctggatgtggcatgagccttgaggggtagctgcttccattcctacctcctcagatccattgtccacctgcagccagagtgatgcttgcgtgcgcgcrcacacacacacacacacacacacacacacacacctcctcccctctgtgcatatcaatgtcctccccttgctcttggaatagagtccaaactacctaacctagatgacgggcccagcgtggctgatcatcaataggttagctaatctttggaagggaagtttcccttcaatagcatgtaagttggtgtggaaaagggctttttctgttaggttttgcttttgcctatcttgtatatgttgcatccttgtaattgggccccttgagatttcagcaccataccatgttttagtgactgaaataatgaacattctgatcagaccgttgctggcttgcacatgttaaccacttgcttttggtccaatattccttgttcccacaacataatgataaactgctcatgcactgtttctttgttcagcaggaagacattccttcagggtcaggaaaagtttgcagaaggaatgaatgccttgaaggacactgtgaccagctgctgacactgagaagcctggttgcacaaggtgttatctcagactgaggaaacacagacttttcctctcaatccccctgaactcccccttcctcactctctagctgcataaaaacattctgctgctgcttctttgttgaactgaagttgagagatcttgctctcctgccttcttgctttggccaaatcgaatacaactttctctatctccaagcacccatgtgtcagtgtttgggatcagctccacgtcgggtacaagagcatgaatttgggcctccccaacatctgcagtgcaaaatatttaacaacgggtgtggcacagcctctgaccaacagccagaacacacacaagccacacacagccatgcctgtcaagccgaatgtcaaccttgctcatggctgaaatgaccccaggacacaggaagtgcatgacacacaactgttgactgaatcaatgaatgggtggagatgggggttggtgaggtgagtgcaaggaactgccaacaacagatgcttcgtggaccagggaaacctcagcgaggagaagcctagctgggaagggccttgttgccaagtgtggggactcggcttctggccaatggtgactgattgcagggtgaatggtacagttctcaggctcgtcgtatatgtgtacaaggaccagggtggatcgtatatgtggacaggcaccgagagtactaagtgtgccaggtggcagagagatgcacggggcctgaacaggcaagagaggtggcaggccttccagaagggcaaggaacccaggcggttccagaccctgagtctccccctccaggtcrttccctttgaccacaaagaggaatgcacactgggctccctgctgtgttacagcccagctctttgaccctagggttgatgattaccaaacattcaggagccaagcaatgaggcaggcagtctactttccaggggtgagcaagccccagacggtatctcctggatgccagtgagcggctgagagctgaagctccctggacactcaaggctcttgtggtgacaggtgaggggactgggtggaaggacagtgctctgagcatgcaccttccttgggatctggaggctgggctgttttttatgcttggctcttatgccacttcagcaacctaaaaacttacaataaagctggagggagcctttcctgaaacttgtgttggacagagaatttttgcgatgtatggtccctggagaaggacaaaagggttgcacgtgtggcctgcctgaggtaggtgccccctcaatgcacggagaagctgagagagccagaaaaaggaaacagaaaaaggaagagcggtgggtagttcatctaccagggctttatagaaggyatcttattcaatcttcaaaacaactctagaaggcaggttttcttctcccctgttctatagttgaagaaatggaggctcagagaggttaagtgacatgccyaaggtcacacagctagaaagggatggaaccagattccaatgcmggtctttctgaccctaccttctcccagtggcagaggcctgcttcctcatgggcaaacgcggaaagacacacccttragcaggtctccctgttcctgcaaggctgggagccatgcaggcactcacatgattttctctctcttccccagtctgacgtaaaggcgtgcagggaggcctagctctgtctcctggacttagagatttcagacacagaagtctgtccatggctccttgtcacatccgcaaataccaggagagcgaccgccagtgggttgtgggcttgctctcccgggggatggccgagcatgccccagccaccttccggcaattgctgaagctgcctcgaaccstcatactcttacttggggggcccctcgccctactcctggtctctggatcctggcttctagccctcgtgttcagcatcagcctcttccctgccctgtggttccttgccaaaaaaccctggacggagtatgtggacatgacattgtgcacagacatgtctgacattaccaaatcctacctgagtragcgtggctcctgcttctgggtggctgagtctgaagagaaggtggtgggcayggtaggagctctgcctgttgatgatcccaccttgagggagaagcggttgcagctgtttcatctctytgtggacagtgagcaccgtcgtcaggggatagcaaaagccctggtcaggactgtcctccagtttgcccgggaccagggctacagtgaagttatcctggacaccrgcamcatccagctctctgctatggscctctaccagagcwtgggcttcaagaagacgggccagtccttcttctrtgtgtgggccaggctrgtggmtcttcatacagttcatttcatctaycacctcccttctkctmaggyagggmgtctrtgatytctttctgtstgtattggtcagaatagaatccattcrgctgtagcagcaagcaatccccaacctytsactgcaatgacctttcaatgcaataaaagcttattgtccattcacatctgagtcccaygtgattgcttgtggggtagcttctgggtttctgcttcattcagtcttyttgattcccatctgtttcatttttctagtgccagcataatgttgcataagaacaaccaccaaatgaaacaaatatttatttagttcatgagtctgaagtcagcaattttgcctgagcttggctgggcagttcctctggtgtcagactgcattgtacaaatgcagtgggattggctgaaagactaggtcaatggtgctgtttcgttttcccacaggctacctcaggcatggtttcaaggaaattgcagaggagcaaaaacaaaagcagaaacaaacaaatgtgttttcaaacccctgcatgtgttgcatcttccccaaactcaaggagaggaacctgtctctgcagtgagaagggctgcaaagtcacatagcaaaagggtggaatgcagcctcgggagaagaactggggccagagacacaatcaatcccctctaaccacagggtctctgcagagggaagaaggtggcctcagaggggagtgtgggatttaccatgggctagacctggaagtagtataactcttccaggggatcataacagaatccctgagactgggtaatttataaggaaaagaggtgtatttggttcatggttttgcaggctgtacaaaaagcacagtgcaggcatctgcttctggtgagggcctcaggaatcttttactcatgttggaagctgaagggggagcagatgtgtcacatggcgagacagcacacaagagagatgctaggtgctttcaaacaaccagcttacatgtgaactaatagagccagaactcattcattatcatggacaaagcaccaacccattcatgaggaatccacccctatgaccaaaacacctcccactatgccccacctctaacattgggggtcatatttcaacatatgatttggagagaacaaacatctaaactatattggtctgccccttacccccaaatctcatgtcatctcacattgcaaaatgaaaccatcccttcctgatagttctccaatgtctcagcttgttccagcatcaactcagaagtccagaatccatagtttcatctgagcctcaaggcaaattccttccacctatgaggctgttatatcaaaaacaagttacatacttccaagatataattgtgttacaggtattgggtaggcattcccattccaaaagggagaagttggccaaaagaaagaggcaagaggccccacacatgtctgaaacccagcagggcaaacactaaatctgaaacttccaaaatcatcttccgtaactccatactggtgagtggagtggcctttcaaggccttgagcagccctgtctctatggctttgctgggtgcagcccacatggctgctctcacaggttgggattgaatgcctgtgggtcttccacgctgaggttgcaagctgctggtgactctacctttctgctgtctggagggcattggccccattcccacagctccactaggcaatgtcccagtggggactctgtatggggttccaaccctatgttttcccatggctctgtccttgtagaggttctctgtgggtttctgcccctgtggcaggcttctgtcagggcacccagactttttgatacatcctctgaaatctaggtggaagctcccaagcctccttcactcttgcgttctgcaagcctgcagacctaaaaccatatggaaggctgggcatggtggctcacacatgtaattccagtactctgggaggctgacacacgtggatcacctgaggtcaggagttgcagaccagcctgaccaacactgtgaaaccccatctctactaaaaatacaaaattagctgggcatgatggtgcatgcctgcaatcccagatacttgggatactgaggcagcagaatcgcttgaaccctggagtcagaggttgcagtgagtcaagatcgcaccgttacattccagactgggtgacatggcaagattgtctcaaaaaaagaaaaaaaaacaaccatatggaagctcccaaggcttagggcttgtaccctccaaagaagtggtctgagctgcaccgggggccctttgagccaaagctggagctggagaagctaggatgtgggaagtagcatcctgaggtgacatacagcaatggtgccctgggcctggtctctgaaaccattcagtcctcctaggcctgtgggcctgtgataggagaggccttctgaaatgcctctgaggccttttcccactgtcttgaatattagcacctggctcccttttagatatgctaatgtctctagcaaatagttgctcagcaggctgcttggattcctccttgtctatcacatggccaggctgcaagttttctaaatatttacaccctctttccattttaattataagtgctgttaaaagaaatccattagacaaattacatttcacagagtttaactgagcaagaaaaatgaataatttgcaaatcgggcagccctcagaatcacagcagatacagacagacaccagggatgctgtgctgtcaaagcaaatttgtggacagaaaaaggaaagtgacatacagaaaatggaagtgaggtacagaaacagccagattgtttacagcttggtgtttaccttatctgagcatgattcgaatagttggctgcctgtgagtggttgaaatatggccagtgggattggctgagactcagctattgctaaagaagcatcctcctaagttaagttttcagtctgcctacctactaactacgttacggttcgcccttaagaactcaaatatgggaatgtgaaggcgtcctcaagccagatttgagtttcatttatcaactccccccttttggtcagactctcaatttagagagatagaccgaaactttaggcattgatgccaccctctcactattgtaatttggctcagtatggaattcacaagtctttttagtctcagtatggagttcacaagtctttttttttttttttttttctgagtcaaagtctcgctttgtcaccaggctggagtgcagtggcatgatcttggcttactgtagctccgcctcctgggttcacgccattctcctgcctcagcctcccaagtagctgggactacaggtgcccatcaccacgctcagctaatttttctgtatatttttagtagagacggggtttcaccatgttagccaggatggtcttgatctcctgacctcatgatccgcccgccttggcctctaaaagtgtgggattacaggcgtgagcaaccatgcccagccagttcacaagtctttactggtgtcactatgaagttcacaagtcacagcttcacactaggtgaatgattctctatgttcttgctgacctagtcaaagtgagaccattcaattctcaatgtatggctgcatacaaaacatttaagacttgagaggatgcagcacactagggaactattattatgactatcaagagaataatatcaaaataccaagatgcactccttaacaagtgttcttattaaataaatgaaaccaacttaaaccagtcaaagttcaggcaacataggcagttcaacaacagtaaagtttaattggtcatagttcttgtttgaaatgtggtagcaattaaggatcatagttcactgtaaagtggcctgatttaaagatgtagccattttcattgttgctctggtaacacaagccatactaacctggacacctactagaagacatataaagactagaaacctttgggaaacccaagcttgccatccaccatttaggatgcctacaaaccaactgttagttgctcctgtaaacacaccatgttttcctcttgagagacttctttattgtatttggtgtcagtgtctaaggaaacagcagtatcagccacctttacattaagctttctgtagtaacaaaatcaggagagagataactgcagcattctattttgttcaacaccaaacacaggccccagcttgagtaaaaaggagatatgaagctgtatgatgttccattaactgtaacatctacctcttgtttttttttttttttttttttcttgagacagggtcttgctctgtcacccaggctggagtgcagtggggtgatctcagctcactgcaacctgtgactcctgggttcaagcaattctcctgcctcagcctcccaagtagctgggactacaggcacgtgccaccatgcctggctaattttttgtacttagtagagacagggtttcaccatggtgggcaggctggtctcgaactcctgacctcaggcgatccacctgccttggcctcccaaagtgctgggattacaggcatgagccattgcaccaggccacatctaccttttggagagtagtgtctacctgtctgaaacactgggatgtttgattggctataaaatccaagaccccacatatggattagctttagattccatacaattagtatcccactaccaccaagagtgagcccccaggaaccccactggaatctttcctcagtggaaactagcttatctttgtctatttcaaagctagtgctaatttcagttattgactattttggcctccaatcataagagctgttaggagaatttttaggtgaaactatttgaaaggcaggagtgagccagaccaaatagcaagatctgagccaacgaagaggcagaatgaaatatgcagattatccacagacccaaaataggtccttgggagttgaaaaacagggctacctagttgcatttgagcagggttcagttagatttgttcattaataaatctgcatagctgctgaacaaaatccattgagaaattgacctttttgtgcccctcttatagcatgttgtaagggtatataaaacatttggtaaaaagagaccctgttgaatttaatctggtgacattatacaagcaattacttgtactcacataggtaaatcccaaatcttgagtacatgatgcctgaaagcacaatatatcttttgcagtcatcatttggattggttttctatactttggtaatgatcaggttattaattgaaacagttaaggcagggtgtggtggctcacgcctgtaatcccagaactttgggaaaccaaggctggcagatcacttgaggccaggaggttcaagacaagcctggccagcatagcaaaaccctgtctctacaaaaaattcaaaaatcagctggatgcagtggtgcacgcctgtagtcccagctacttgggtggctgaggcaggagaatcccttgaacctgggaggtggaggctgcagtgagccaagatcaggccactgcactccaaccttggcaacagagtgagactgtctcaaaaaaagaagaaaaaaaaaaaaaggaaaagttaaagtgttctttttagtgagtgcaggaaagcaagtagcagtggtgttcagaatatcaaggatagctttccatccttcccttggaattttggggtgactctcattgggaacayggagaggcactggcattagtggaattgtttccttatatttttttggcaataaacaacaaacccaataatccacaaactctggttctgtgctacagcagatgctcaagctaaaggcatccactggttatggtcccatggatttttctgtagggaaaaagaaagaattagggcaacaggaaatgaggagaaaagaaaaaaatgtaaggctttcatgacggtacagaagtcttcatctgtgatcttgggaaagctgtccacaactagaatgtcatctgctctggagatttttccttagacagctttaccttaaagtctctagcagatgtacagttccaggagtctgaagaggtccttttgagttgtgaggtgtggacccaagtttcaaggccctgaagcttcactgcagtgtaggtgttgagaagaactcggcacagtcccttccaaagagttgtcaagagcagccttcctctgatgtcatttccagaagacagaatctccaggttctagactgtggaaggtttgattatcctcaattggtggatcttgaaaagcttcctttatctggtgaaagcacacttggtataatggccttgcagtacttactt

SEQ ID NO: 93837 - DNA, 12830 bp, Homo sapiens
ggaaaaacaacccttatctttatgataggaggtagatttatcacacagggcaaaagttaggttcctgccctcccatggagactgggagatagggacctggctgctctgatgataacgtttcaaagattgggatcccaggtccttcaggaacacagtcctgggttgcaaagctggcaagaggcttatttagctgtcaaaaagctttgcatgcccctcaaaggggcagaggaaggatttaaaatgacaagttttccaaacaaaatgctctaagaaaagggacagaggatacctcttcctttaacaagaagaattaagcctcttcattgtttttcgttttttttttttttttccctaacattgtttctgagagcattgccccatgactcctgagatgtgccaccagttctgccgagcctaacacagggtctttggagtgaaaagttctgtttttccttattgcttaaaaaattaaaatctcagcttgttagtattttgtataaatctgcacgttcccttcaagaaaaccttatctctgaggaagtgaggtgagaggtggttaaggcagctcccaggctgccttggtttgcccccgcccctcatataggcttccctggtcacccctcactgtcgcaaagtaagacctgaatatgaaagctttcacatgcagcccagatctacgcacctttgggtttgcacttcaggcactgtctgcagtaagtgctcagttccaggccagcttccagaagctccaagactcatccctttattcaggaattgaaaatgaactggaactgaagacttttaaactggaagacatttcagaaatgatcaaatttaatagttcccaaccttctgggatcgcagacacctttgaagatcggatgtagaaagtgagcccacaaatttgcacaccattgcaagtttaaggagccgctgtggtgcccacgaagcagcgcttcatgttttagttgagtaggctgcagctgagccctgtctcccgaggcagaggtctgagtttttaatgggaacaatagcacccatgtcacagcaggcaacagaagctcactggctacaccaagtctcatttagaaaactctgggcctggcgtgctgactcctgcctgtaatcccagcactttaggaggccgaggcaggcagatcacgaggtcaggagttcgagaccagcctaacaaacatggtgaaaccctgtatctactaaaaatacaaaaattagccgggcatggcggcgtgtacctgtagtcccagctacttgggagggtgaggcaggagaatcacttgactggcatgaatgttaaaataggcatcattagattattcagaatggactctgtgacaatcagtaacagattatgaacaagacttaaggccttgcaaggcaagaattaacacacaccctagaaaccacagagtctccttcagtggggtttaaattgacccaggatactgtggctgactttcctacctgactctgggacagcatcacgtggcagaggcagacccctctctctgaactgaagcattcttttgtaccaacttcacggtctttagacaaagctgaactctttcaaccaattgccaatcggaaaatctttgaatccacctgtgatctataatgccccctgctgcttcacaatatcccaccttgttaggcccagtcaatgtacaccttccatggattaatttatgatgttactccaattcctgtcccctcaaatgtagaaaacgacggccccagcacacgttttcaggacctcttgagatccccagaccgtggtcactcatattggctcagaagatacctctttcagatcatctaacagtttgatttttctgttaacaggcaccaccacaggccttggcacacctttcgctcagcttgggtttcccaaaccggctaccggcccccagccctccactcccaaccagcacactcttcatcgcaccagcaactccacctgtgctcatgtgggtgggcctctgttggctgccgatctgcacccgtttcccacccctcctgactgcagggcaccccctctgtgggcagtgctcactgtcactcagcccctcagcccctcagcccttgagctccctggggctctccatctctatggggtgctggcatccttcggccaggactcctttaatataacctggattctgctatgaaatgtacagtccccagaaagtgtgactgagtccccatgtaaaccttctctgtcacctggaatgtggggaatagcccccacctttctgctgttggtgagcaaggaagcagacagcttcaactgggctggcaaacacccgacatcctatgcagtgccagtcttggcaggaagctgatgccacccacagaatggcagaaaaaccaacaggtcaaacccactttcaggtcaccctgtctgtcttcctggagttggcagtttcatgggccattagatcacctctcttacttatgacaattttaggtggcttttcaacaagtgcaacataaaagtcctaactgtcaagttcaaccctcctaacaaagttattccggatgtgatgtctccaccatcatcctgttcccagagccccatcaggtgtgtcctcctgggcggcagcctcgcttccaacatctggtgccttcatgccaagtccaggcccggcacacctcaggtccttgggaactgtttgttgaatgaataaatgaatctttcaggtctgacaaggaaagcccaggcttttatcaggaaagctacaaaaatgcagaagtcacagtagatcctgggagcaagagacgcctgaatgtcaagtgaggtcgctgtgttttgaggaagccacagccacgggtgagcatggaggaagagacagcacacagggacggagcacaaacctctccccctccaagtgaccggcaggtttctgactctgaatattggtcagactcacactagaagtactcagtggtgctttgaagcagctgctcacctcttgtaattcctaggccaactcctgcttgacactgaactgttctgagaacactctaaagataagccatggacttcctgcccagacttgatgctccttagacttttcctcggaggtggtgttgggtaccaaagatctggaatctcagcagcctccactggctggccctgggttcctgctgctgactcccagcctctggtttctgctgaggaaggctgcagggcagcacctttaggggaagccttgacttttccagatctgggctctctccagtgttttcctgaatgcccctaccagaagcctggctgtcatctctgagcccttcctcatcctcctccctgtgtgaatcattccaactcctgccatttctgccccaagtgcacctccatgtggctcatgtctcacattcttgacttcctccctctgttgaagccactgctgtctcatgggcctctgctagcccaggcggcttctttgtgaacacagagctaggcacagcctcaagccatgcagtccactggatgcagagtttagcaggcaagcaatgccttcgagcaaataagaaaaggttgccttttcctttggccagtctcagtttcgtgccatggctcatggcttggcaacgggaggcccgattttagctcctaccagcccctctgggccagctgctcttgtacagtgagcacctgcatccctgcactgggggccctgctgttgcctggatgcggcacgagccttaaggggtagctgcttccattcccacctcctcagatccattgtccacctgcagccagagtgaagcgcgcgcgcgcacacacacacacacacacacacacacacacacacacacacacacacacacacacacacacacacacaccccttctcccctctgtgcatatcaatgtcctccccttgctcttggaatagagtccaaactacctaacctagatgacgggcccagcgtggctgatcaacaatgggttggctaatcttttagggaagtttcccttcaatagcatgtaagttggtgtggaaaagggctttttctgttaggttttgcttttgcctatcttgtatatgttgcatccttgtaattgggccccttgagatttcagcaccataccatgttttagtgactgaaataatgaacattctgatcagaccgttgctggcttgcacatgttaaccacttgcttttggtccaatattccttgttcccacaacataatgataaactgctcatgcactgtttctttgttcagcaggaagacattccttcagggtcaggaaaagtttgcagaaggaatgaatgccttgaaggacactgtgaccagctgctgacactgagaagcctggttgcacaaggtgttatctcagactgaggaaacacagacttttcctctcaatccccctgaactcccccttcctcactctctagctgcataaaaacattctgctgctgcttctttgttgaactgaagttgagagatcttcctctcctgccttcttgctttggccaaatcgaatacaactttctctatctccaagcacccatgtgtcagtgtttgggatcagctccacgtcgggtacaagagcttgaatttgggcctctccaacatctgcagtgcaaaatatttaacaacgggtgtggcacagcctctgaccaacagccagaacacacacaagccacacacagccatgcctgtcagccgaatgtcaaccttgctcatggctgaaatgacccccagacatgggaagtgcatcgcacacacctgttgactgaatcaatgaatgggtggaggtgggggttggtgaggtgagtgcaaagaactgccaacaatcgatgctttgtggaccagggaaacctcagcatggagaagcctagctgggaagggccttgttgccaagtgtggggactcggcttctggccaatggtgactgagtgcagggtgaatggcacagttctcaggctcgtggtatatgtgtacagggaccaaggtggatctcagagagtatcaagtgtgccaggtggcagaaagatgcccagggcctgaacaggcaagagaggtggcaggccttccagaagggcaaggaacccaggcggttccagaccctgagtttccccctccaggccattccctttgactataaaggggaatgcacactgggctccctgctgtgttacagcccagctctttgaccctagggttgatgattaccaaacattcaggagccaagcaatgaggcaggcagcctgctttccaggggtgagcaagccccagacggtatctcctggatgccagtgagcggctgacagctgaagctccctggacactcaaggctcttgtggtgacaggtgaggggactgggtggaaggacagtgctctgagcatgcaccttccttgggatctggaggctgggctgttttttatgcttggcacttatgccacctcagcaacctaaaaacttacaataaagctggagggagcctttcctgaaacttgtgcttggtcacaggatttctgcgatgtatggtccctggagaagcaccaaagggttgggcatgtggcctgcctgaggtaggtactctctcaatgcaccaagaagctgagagagccagaaaaaggaaacagagggaagagtggtgggtagttcatctatcagggctttatagaaggtattttattcaatcttcgaaacaactctagaaggcaggttttcttctcccctgttctatagatgaagaagtggaggctcagagaggttaagtgacatgcccaaggtcacacagctagaaaggcatggagccagattccaatgcaggtctttctcatgctaccttctcccagtggcagaggcctgcttcctcatgggcaaacgcggaaagacacacccttaagcaggtctccctgttcctgcaaggctgggagccatgcaggcactcacgtggtttcctctctcttccccaggcctggcgtaaaggcgtgcagggaggcctagctctgtttcctggactcagtgacttcagacacagaagtctgtccatggctccttatcacatccgcaaayaccaggagagcgaccgcaagtaggtcgtgggcttgctctccsgggggatggccgaacacgccccagccaccttccggcgattactgaagctgcctcgaaccctcatactcttacttgggggggcccttgccctactcctggtctctggctcctggattctggccctcgtgttcagcctcagcctccttcctgccctgtggttccttgccaaaaaaccctggacgcggtatgtagacatagcattgcgcacagacatgtctgacatcaccaaatcctacctgagtgagtgtggctcctgcttctgggtggstgartctgaagagaaggtgktgggcacagtaggagctctgcccrttgatgatcccaccttgagggagaagcggttgcagctgtttcatctctstgtggacaatgagcaccgtggtcaggggatagcaaaagccctggtcaggactgtcctccagtttgcccgggacyagggctacagtgaagttgtcctggacaccagcaacatccagctctctgccatgggcctctaccagagcttgggcttcaagaagacgggccagtccttcttccacgtgtgggccaggctggtggatcttcatacagttcatttcatctatcacctcccttctgctcargcagggcgtctatgatttctttccttctgtattggtcagaatagaatccattcggctgtagcagcaagcaatccccaacctctgactgcaatgacctttctgtgcaataaaagcttattgtccattaacatctgagtcccatgcgattgcctgtggggtagcttctgggtttctgcttcattcagtctttttgattcccatctgtttcatttttctagtgccaggataatgttgcataagaacaatcataaaatgaaatcaatatttatttagctcatgagtctgaagtcagcaattttgcctgagcttggctgggcagttcctctggtctcagactgcattgtgcaaatgcagtgggattggctgaaagattagctcaatggtgctttttcattttccctcaggctagctcaggcatggtttcaaggaaattgcagaggagcaaaaacaaaagcagaagcaaacaaacgtgttttcaaactcctgcatgcgtcgcatcttccccaaattcaaggagagaggaacctgcctctgtaatgatcatgaagggctgcaaagtcacatagcaaaagggtggaatgcagcctcgggagaagaattggggccagagacacaaccaatccactctaactccagggtctctgcagagggaagaaggtggcctcagaggggagtgtgggatttaccatggtctagacctggaagtagtataactcttccaggggatcataacagaatacctgagactgggtaatttataaggaaaagaggtgtatttggttcatggttttgcaggctgtacaaaaagcacagtgcaggcatctgcttctggtgagggcctcaggaatctttcacttatggtggaagctgaagggggagcaggtgtgtcacacggcgagacagcacacaagaaagatgctaggtgctttcaaacaaccagcttacatgtgaactaacagagccagaactcattcattaccatggacagagcaccaacccattcatgaggaatccacccctatgagcgaaacacctcccactaggccctacctctaacattgggggtcatatttcaacatgtgatttggagagaacaaacatctaaactatatcagtctgcctcttaccccaaaatctcatgtcatctcacattgcaaaatgcaaccatcccttcctgatagtttcccaatgtctcagcttgttccagcatcaactcaaaagtccagaatccatagtttcatctgagcctcaaggcaaatgccttccacccatgaggctgttatatcaaaaacaagttacatacttccaagatacaactgtgttacaggtattgggtaggcattcccattccaaaagcgagaaattggccaaaagaaagaggcaacaggccccacacatgtctgaaacccagcagggcaaacactaaatctgaaacttccaaaatcatcttccttaactccatactggtgagaggagtgggctttcaaggccttgagcagccctgtctctatggctttgctgggtgcagcccacatggctgctctcacaggttgggattgagcctgtgggtcttccatgctgaggttgcaagctgctggcgactctacctttctggtgtctggaaggcattggccccattcccacagctccactaggcaatgtcccagtgaggaccctgtatgggggttccaaccctatgttttcccatggctctgccctagtagaggttctctgtggggtctccgccctgtgcaggcttctgcctgggcacccaggctttttgatacatcttcagaaatttaggtggaagctcccaagcctccttcactcttgcattctgcaagcctgcagacctaaaaccatatggaaggctgggcatggtggctcacacatgtaattccagcactttgggaggctgaggcaggtggatcacctgaggtcaggagttggagaccagcctgaccaacattgtgaaaccccgtatctactgaaaatacaaaattagctgggcatgatggcacatgcctgcaatcccagatacttgggatactgaggcaggagaatcacttgaacctttgaggcagaggttgcagtgagctgagatcgtgctgttgcattccagcctggttgacaggacaagactctgtctcaaaaaaaaaagacaaaaaaaaaaacatatggaagctgctaaggcttagggcttgtaccctccaaagcagtggtctgcgcttcacctggggccctttgagccaaggctggagctggagaagctgggatgtgggaagtagcatcctgaggtgacatagggcaatggtgtcctgggcctggtctctgaaaccattcagtcctcctaggcctgtgggcctgtgataggaggggccttctgaaatgcctctgaggccttttcccactgtcttgaatattagcacctggctcccttttagacatgctaatgtctccagcaagtagttgctcagcaggctgcttggattcctccttgtctaccacatggccaggctgcaagttttataaatatttacacccgctctccattttaattataagttctgttaaaagaaatccattagacaaattaaatttcacagagtaattgagcaagaaaaataaatattttgcaagttgggcagccctcagaattacagcagatacagacagacaccagggatgctgtgttgtcaaagcaaatttgtggacagaaaaaggaaagtgacatacagaaaatggaagtgaggtacagaaacagccagattggttacagcttggtgtttgccttatctgggcatgattccaacagtcggctgcctgtgagtggttgaagtatggccaatgggattggctgagactcagctattgctaaagaagcatcctcctaagttaggttttcagtctgcctgcctactagttacattacggttcacccttaagaactcaagcatggcaatatgaaggcttcctcaggccggatttgagtttcatttatcaactcccctctctttgtcagactctcaatttagagagattgatcaaaagtttaggcattgatgccactctcccactattgtaaattggctcagtatggaattcacaagtccttttagtctcagtatggagttcacaagtctttattggtgtcactatgaagttcacaagtcacaacttcacactaggtaaatgattctttatgttcttgctgacctagttgaagtgagaccattcaattctcaatgtatggctgcatacaaaacatttatgacttgagaggatgcagcacaccagggaactattattatgactatcaagagaataatatcaaaataccaaggtgcaccccttaacaagagttcttatgaaataaatgaaaccaacttaaaccagtcaaagttcaggcaacataggcagttcaacaatagtaaagtttaattggtcatagttcttgtttgaaatgtgatagcaattaaggaccatagttcactgtaaagtggcctgatttaaagacgtagccattttcattgttactctggtaacacaggccatactaacctgggcacctactagaagacatataaagactagaaacctttgggaaacccaagcttgccatccaccatttaggatgcctacaaaccaactgttagttgctcctgtaaacacaccatgttttcctcttgagagacttctttattgtatttggtgtcagtgtctaaggaaacagcagtatcagccacctttacattaagctttctgtagtaacaaaatcagtagagagaaaattgcagcattccattttgttcaataccaaacataggccccagcttgagtaaaaaggagatatgaagctgcatgatgttccattaactgtaacatctacctcgtttattttatttatttatttatttatttatttatttatttatttatttttttgtgagaaagggtctcgctctgttaaccaggctagagtgtagtggggtgatctcagctcactgcaacctctgtcttctgggttcaagcaattctcctgcctcagtctcccaagtagctgggactacaggcacacgccaccatgcctggctaattttttgtacttaggagagatggggtttcaccatggtgggcaggctggtctcgaactcttgacctcaggtgatccacctgccttagcctcccaaagtgctggaattacaggcatgagccactgcaccaggccacatctaccttttggagagtagcttctacctgtctggaacattgggatgtctgattggctataaaatccaagaccccaaatatggattagcttcagattccatacaactagtatcccaccaccaccaagagtgagtccccaggaaccccactggaatctttcctcagtggaaactagcttatctttgtctatttcaaagctagtgctaatttcagttattgtctattttggcctccaatcataagagctgttaggagaatttttaggtgaaactatttgaaaggcagaagtgagccagaccaaacagcaaggtctgagtcaacgaggaggcagaatgaaatgcgcagattatccacagacccagtataggcccttgggagttgaaaaacagggccacatagttgcatttgagcaggggtcagttagatttgttcattaataaacctacacagctcctgaacaaaatccactgggaaattgacctttttgtgctcgccctgtagtatgttgtaagggtgtataacacatttagtaaaaagagaccctgttgaatttaatctggtgatattatacaagcaattacttgtactcacataggtaattcccgtaacttgagtgcatgatgcctgaaagcacaatatatcttttgcaggcatcacttggactggttttctatattttggtattgatcaggttattaattgaaacagttaaggccaggcatggtggctcacgcctgtaatcccagaactttgggagaccgaggctggtggatcacttgaggcaaggaggttcgagaccagcctggccaacatagcaaaatctagtctctactaaaaattcaaaaatcagctggatgcggtggtgcatgcctagagtcccagctacttgggtggctgaggcaggagaattgcttgaaccttggaggtggaggctgtagtgagccaagataaggccactgcactccaacctaggcaacagagtgagactgcctcagaaaaaaaaaaaaaaaggaaaagttaaagtgttgcttttagtgagtgcaggaaaacaagtagcaatggtgttcagaatatcaaggatagctttctatccttcccttggaattttggggtgactctcattggcaacatggagaggcattggcattagcggaattgtttccttatttttttggcaataaaaacaaacccaataagccacaaactctggttctgtgctagagcatatgctcaagctaaagccatccactgattatcgtcccatggatttttctgtagggaaaaagaaagaattagggcaacaggaaatgcggagaaaagaaaaaatgtaaggctttcatgatgatacagaagtcttgatctgtgatcttgggaaagctgtccacagctagaatgcccgctgctctggagagatatttccttagacagctttaccttaaagtctccagcaggtgtacagttccaggagtctgaagaggcccttctgagttgtgaggtgtggacccaagtttcaaggccctgaagcttcactgcagtgtaggtgttgagaagatctcagcacggtcccttccaaagagttgtcaagagcagcctttctctgatgtcatttccagaagacacaatctccaggttctagactgtggaaggtttgattatcctcagttggtggatcttgaaaagcttcctttatctggtgaaagtacactttggtataatggccttgcagtacttactcatatcagaatttaggagacagaaagatgcatgaggtttcactattggggcataggccttctagtgactatttcataagggatccacttctgttttttagtgagagtggatctgattgtcattaagtccaatgatagtacctttggccaaggcaacccaactg

SEQ ID NO: 93838 - DNA, 41984 bp, Homo sapiens
cttccacaatggttgaactaatttacagtcccaacaacagtgtaaaagtgttcctatttctccatatcctctccagcacctgttgtttcctgactttttaatgatcaccattctaactgttgcgagatggtatctcattgtggttttgatttgcatttctctgatgggcagtgatgatgagcattttttcatgtgtctgttggctgcataaatgtcttcttttgggaagtgtctgttcatatccattgcctagttttgatggggttgtttgatttatttcttgtaaatttgtttacgttcgttgtagattctggatattagccctttgtcagatgggtagattgtaaaaattttctcccattctgtaggttgcctgttcactctgatggtggtttcttttgctctgcagaagctctttggtttaattagatcccatttgtctattttgtcttttgttgttattgcttttggtgttttagtcatgaagtccttgcccatgcccatgtcctgaatggtattgcctaggttttcttctagagtttttatggtggtaagtctgacatttaagtctttaatccatcttgaattaatttttgtataagctgtaaggaagggatccagtttcagctttctatatatgtctagccagttttcccagtaccatttattaaatagggaatcctttccccatttcttgtttttatcaggtttgtcaaaggtcagatggttgtagatgtgtggcattatttctgagggctctgttctgttccattggtctatatctctgttttggttaccagtaccatgctattttggttactgtagccttgtagtatagtttgaagtcaggtagcgtgatgcctccagctttgttcttttggcttaggattgtcttggcaatgcgggctcttttttgattccatatgaactttaaagtaggtttttccaattctacgaagaaagtcgttggtagcttgatggggatggtattgaatctataaattaccttgggcagtatggccattttcacaatattgattcttcctatccatgagcatggaatgttcttccatttgtttgtgtcctcttctatttcattgagcagtggtttgtagttccccttgaagaggtccttcacatcccttgtaagttggattcctaggtattttattctctttgaagcaattgtgaatgggagttcgctcatgatttggctctctgtttgtctgttattggtgtataggaacgcttgtgatttttgcacattgattttgtatcctgagactttgctgaagttgcttatcagcttaaggagatttggggctgaggcaatggagttttctaaatttacaatcatgtcatctgcaaacagggacaatttgacttcctcttttcctaattgaataccctttatttctttctactgcctgattgccctggccagaacttccaacactgtgttgaataggagtggtgagagggcatctctgtcttgtgccagttttcaaagggaatgcttccagtttttgcccattcagtatgatattggctgtgtgtttgccataaacagctcttattattttgagatatgtcccatcaatacctagtttattgagagtttttaacatgaagggctgttgaattttgttgaaggccttttctgcatatattgagataatcatgtggtttttgtctttggttctgtgtatatgatggattacatttattgatttgcatatgttgaaccagccttgcatcccagggatgaagccaatgtgatcatggtggataagctttttgatgtgctgctggattcagttttccagtattttactgaggatttttgcatcaatgttcatcagggatattggtctaaaattctctttttttgttgtgtctctgccaggcctaggtatcaggatgatgctggccttgtaaaatgagttagggaggattccctctttttctgttgattggaatagtttcagaaggaatggtaccaggtcctctttgtacctctgatagaattcaactgtgaatctgtctggtcctggactttttttggttgataggctattaattattgcctcattttcagagcctgttattggtctattcaaggattcaacttcttcctggtttagtcttgggagggtgtatgtgtccaggaatttatccatctcttctagattttctagtttatttacatagaggtgtttatagtattctccgatggtagtttgtatttctgtgggatcggtggtgatatgccctttatcattttttattgcatctatttgattcttctctcttttcttctttattagtcttgctagcggtctatcaattttgctgatcttttcaaaaaaccagctcctggattcattgatttttggaagggttttttgtgtctctatctccttcagttctgctctgatcttagttatttcttgccttctgctagcttttgaatgtatttgctgttgcttctctagtttttttaactgtgacattaggatgtcaattttagatctttcctgctttctcttgtgggcatttagtgctataaatttccctctacacactactttaaatgtgtcccagagattctggtatgttgtgtctttgttctcattggtttcaaagaacatctttatttctgccttcatttcgttatgtacccagtagtctttcagaagcaggttgttcagtttccatgtagttgagcggttttgagtgagcttcttaatcctgagttctaattgggttgcactgtggtctgagagacagtttgttatcatttctgttcttttacatttgctaaggagtgctttacttccacctatgtggtcaattttggaataagtgcgatgtggtgctgagaagactgtatattctgttgatttggggtggagagttctatagatgtctattaggtctgcttggtgcagagctgagttcaattcctggatatccttgttaactttctgtctcgttgatctgtctaatgttgacagtggggtgttaaattctccaattattattgtgtggaagtctaagtctctttgtaggtctctaaggacttgctttatgaatctgggtgctcctgtattgggtgcatatgtatttaggatagttagctcttcttgtttaattgattcttttaccatcatgtaatggccttctttgtctcttttgatctttgttggtttaaagtttgttttatcagagactaggattgcaacccctgcctttttttgttttccatttgcttggtagctcttcctccatgcctttattttgagcctatatgtgtctgtgcacatgagatgggtctcctgaatacagcatactgatgggtcttgactctttatccaatttgccagtctgtgtctttcaattggagcatttaggccatttacatttaaggctaatattgttatgtgtgaatttgatcctgtcattatgatattagctggttattttgctcgctagttgatggagtttcttcctagcattgatgttctttacaatttggcatacgtttgcagtggctggtaccggttgttcctttccatatttagtgcttccttcaggagctcttgtgagacaggcctggtggtgagaaaatctctcagcatttgtttgtctgtaaaggattttatttctccttcacttatgaagcttagtttggctggatatgaaattctaggttgaaaattcttttctttaagaatgttgaatattggcccccactcctttctggcttgtagagtttctgctgagagatcagttgttagtctgatgggcttccctttgtgggtaacctgacctttctgtctggctgcccttaagattttttccttcatttcagctttggtgaatctgacaattatgtgtcttggagttgcttttctcgaggagtatctttgtggcattctctgtatttcctgaatttgaatgttggcctgccttgctaggctggggaagttctcctgggtaatatcctgcagagtgttttccaacttggttccattctcctcatcactttcaggtacaccaatcagacatagatttggtcttttcacatagtcccatatttcttggaggctttgttcatttctttttactcttttttctctaaacttctcacttcatttcattcatttgatcttcaatcactgattctctttcttccacttgattgaatcagctactgaagcttgggcatctctcacatagttcacgtgccatggtttttagctccatcaggtcatttaaggtcttctctatgctgtttattctagttagccattcatctaatcttttttcaaggtttttagcttctttgcaatgggttcgaacatcctccttttgctcagagaagtttgttattaccagtcatctgatgcttacttctgtcaactcgtcaaagtcattctccatccagctttgttccattgctggaaagcagctttgttgctttggaggggaagaggtgctctgatttttagaattttcagctgttctgctctggtttctccccatgtttgtggttttatctacctttggtctttgacgatggtgatgtacagatggggttttggtgcggaggtcctttctgtttgttagttttccttctaacagtcaggaccctcagctgcaggtctgttggagtttgctggagctccactcctgaccctgttcacctgcgtatcaccagcggaggctgcagtacagcaaatattgcagtacagcaaatgttgcagcctgatccttcctctggaagctttgtctcagaggggcacccagctgtatgaggtgtcaagttgtcccctaatgggagatgtctcccagttagggtactcgggtgtcagggacccacttgaagaggcagtctgtccgttctcagatggcaaactccatgctgggagaaccactactcccttcaaagctgtcagacagggatgtttaagactgcagaagtttctgctgccttttgttcagctatgccctgccctagaggtggagtctacagaggcaggcaggccttgttgagctgtggtgggctccacccaattcatgctttccggctgctttgtttacctactcaagcctcagcactggcggacacccctcccccagcctcgctgccaccttgcagtttgatctcagactactgtgctagcagtgagtgaggctctgtgggcatgggaccctccaagccaggcgtggggtataatctcctggtgtgccgtttgcttagactgttggaaaggtacagtgttagggtatgagtgtcctgattttccaagtaccatctgtcacggcttcccttggctagtaaagggaattcccctaccacttgcacttcccggatgaggtgatgccccaccctgcttcggctcacactccatgggctgcacccactgtccaacaagccccattgagatgaacctcgtacctcggttggaaatgcagaaatgacctatcttctgcatccctcatgctgtgagctgtagactggagctattcctattcagctatcttggaaccctccggtggttttgaagttcatcactttttttagctatctccaggcctccttatctcacatgaaaattatatgcaagtgtcacttcagaatttccttctgaagatgcatcagactaatgtttggctagcattctcttcagagtttttccaggcccagtgaaaatagccaggctttttttgtcttaccaccttacaacaaacagcttaagtcctatccaactactacattctcccaacacagatacaaggcagcatgttcacattatctcaagcttcctccaaatacatctcaacagttagaattggattagaaagaggacttgttggcttgcttatcctgtgggtaactgtgacattgactgcaggtaataataacaagatctcttttatttttctaggtggcaaaccatgtgatttcttctgactctatttcctcttctgccagtagtttcctgagctcgaactctactttttgcaacaagcagaatgtacacatgttaaacaagggcacacaagcaggtaattacttgaatctgaactttttcattgaaatacattgaaatggctcttaaacatataagatactcaacctcaatcatartaaaggacatgaagttaaaactatatccaactgccaattttcatcttatcagattggcgtraattcaagtgtgatggcaagtttgtgggcaagagtgtaggraagtgtgttcccttgtatattccagtgggagtagaagttggtttactgtgaaagacaatttgacaggtcctgtcaaaattactttcactcagcatttttacctttgaaatgtctgctatagatatactatgaatatgtggattttaacctatagatatacttgcatatgtgcaaaatagtgtacaaaattaaccactgaaacattgttttttatagcagaagattaaaatgaatttaggtattcctcaatagctgaatgattacataaattattgtatatctggataatgaatgaaattctacatagaatgaggaagctctctstttactaacgtggaaagatctccaaggcatataactgattttaagaaaaggtacagaacagtgtatrgcatactacaatatgagtttttttaaataaaagaaataaaggagggaagagaattgcttaaatgtgcaaaatgaattctctggaaccatatggggttgtgaacagagtaaatggagaccagaagtgggaaggaggatttttagctattgcctttctatacttttggtttcataaaataaaaataaataaactttcttgatttgtttcttcccctcaaatcctgtctttacttctgtcaacctcttccatacctgggtgactaccaaaaggactctaagtatttattgtctttctgccttgggatccaggtggaaattctttaccctttgaacccatattcattcttctttccctctcatacctaaaatgacttacaaataaaaccctttcttttttcttctccctctttttccctcctactctcccctgtccttccttcttttcctctctcttcccatcactccatcccacacaaagggattgtatttttgaaacattaaaaaggttcacatactcacttgaataaacctgtcaactcagcctcaaggttactcccagagacacctgtgatccttcccctcaggtaacttggagattgtgaacggtgccgaaaaacacactcgagccaactccaagttccagcgaggctaaattggaagaggacagtgatgtgacttcttggtcagaagaaaaacatgaagagaaaatgctctttaccagttatcctgaggacagaaagttaaaaaagaacaagaagaatkcccatgaaggtcagtttctcattccagatcttgtagtagagaaactagtgaatttcaagtcccctgcaatgctgactctgtgtttccaagtgattctatgtgaccyccacctacccccagtcaccaccttgtcagattttcgaagtccagcatggcagttacacagtcatccctgcagtgaaaccaaactcaagggcaccctgtggccgctgacagctgagacccctgagagcctgtattatatgcatctccttgatgaaagccaggtggggctgtaaaaagtgaaaattctgttttacttctaaaaactatttcctgtaggagtttcctggtttgttcctttggaaaatgtggagtctagataaaaagaaggaaaacatgctcaagactcatgaccctggcatctcccggttggaaccagtaaccaagaccaagccgtggagggagccactgtgggagcggarctggcaggggcagcacctggacagtcggggctacctggcaggcccaggcagagaggatggcagaaacccactgaagctgtttgtgagagcaaccctgcaggtgcagtgacgtttacttaactttagccctacrtgtagggagaagaagggtaaggcgcagagaagctggctctgtgacttggcgagctgaggtgtaggcctgagacgctcttttccagcacctccgcagttcacctgttttcacacgtgagractgagtttctcatcatctgtcaaaggctgccttactcttagccatagatggtgcatcactgtcaggatctggagacaagggcacaggagggaggatttgtggctctgctcattgggtttgtgggtccctgtgtgtggagggcccagaggcctgatgcttgtgcagcctcatgcatgttcctccatgtccgcagctcctgtttctgctccatgtcggatttaaaggaaaccaagtctcttctgatgtgtccctctggggataaaggaaaagttattaatgatgtatttgtttgaatagatctttaaaatagcagcatgggcagagctgtattgcgttgatgtttcagagagttgtaatcgccatagtcttagttcctggcctatgctgaaggcatgtctttgatccctgtgggttccaagctgcagctctccgccatagagaggtgtcagaggtttcttcaactctaggtattttctcggcatttgaatcaggcttccccagacctcttgggtacgtggtgtgtttccagccatatggagagtagattgcatcattaatctgaggctgggtattttctctctctctctcttttttttttttttttttaaggaatcgcttcagtttcacagacctgacttcatctcccacattggggagcggataaagcgtctgaagttaatagtccaggagagaaagctgcagagcatgttaaagagcgagcgggatgcgctattcgacattgacagggaacggcagggccaccagaatcgcatgcgcccactacccaagagaggtacgccctgcccgttcactttcctgtgagtggaatagagaaggcaaggtctgctgctgtgctgcagagccctgctaaaggccagcccaggccagttacctgggcagacagcaaccttttgcttgccaagactcaaaccttcttagctaacagaacctccccaccttagccgtcagcacattcatgatccaagtaagcccagttactctagccctgtcactgcatcttaaaccagctctgtctgtgagcaagttagttccaaaagtatattgatttttcctgaaaagatggggctgattccaggcttgcctacctcttaggatggtaataatgataataataaacacatagtccttacatcttgcccaggcactgttcacattagcgcttacagcactctcagtaggtactattaatatatctactttatagtgagaaaactgaatcaaagggagattaactacctctcccaaggtgacatactcaggtgtgctgctctggagtctgcattcttaacaattatggtaagcagatcttgataaaataatgaaagctgtgaaaactacaaagtactatctaattctttcatcaagccttacctggaaactggccagttttttaattcaaagcctagtctttgctacagagtgttaggtccttagggccttaggctgctgtcctgttaccctagtctaaccctggcttgccttggtcattgctccccactcagtcttgccagctcagggtaggggcaccaagtcctagcagctccctctcccagctcttgcaccacaccctctgggttaagtcactgtccactgaaaaccctttcttctcttccttagtcttcctggctgtccagaagaacaagcctatcagcaagaaggaaatgattcagaggtccaaacggtaagaccaagaaaacaagagtttgtgtacaagtgttaaccaggccaccaagtggtcaggagctctggcttgcacccagaataaaggcattatgctcaaatttaaacattatgagaaagttgtgagagtcatttctcacttatggcactgaaaaaaaaagtagcacatcatggtatgaatgactcatatgcaaaagatgaaaaacttctcattaatttgcatatcttargctcctctttattaacctaaatgtaaataaagaatattttaggccaggtgcggtggctcacgcctgtaatcccagcactttgggaggtcaaggtggataaatcacttgaggtcaggagttcgagaccagcctggccaacatggtgaaaccccgtctctactaaaaatacaaaaagtagccgggcgtggtggtgcacgcctgtaatcccaaccactcagaaagctgagccaggaggatcctttgaacctgggaggcagaggttgcagtgagcttagatggcactactacactccagtctgggtgacagagcgagactccatctcaaaaaaaaaagattattttaaaataaaattaaatatgtatttgggttattataccttttatcttagcaatcccatttcttggaattgatcccatagggtgagaaagaacagtgttctccagaacatattaagttaaacttttttaaaaaattaaattttcgaagtatgtcaacactgtttccatttgtggtctttaaaagtaagtatttgtgcctatgtagacgtgtatacttttatatgcatagaatatttctggaagacagaaaaacctgataatactgattgcctttggaaaggagaactgatgtaggatgtagtagattttttgactttttgaatgttgtgtcatgaggaacgaacattagttactcataaattaattcatttgagtgttggatgtggtggtacatttctgtaatcctacctactcaggagtcttaggtgagagaatctcttaagcccaggaatttgagactgcagtgagctatgatcacaccattacgctctggcctgggtaacagactgagactctgtatctaaaaaataataaataatattttaaaaaattaattcatttcagatattgatatattgatcatgggaatgccagagaataagttaaggttgacttttttaggtgttcattagagacttgctttaatgagaatagtttcttagttggcataatgcttctgaagtaawggtactttaaaacagtttatcttacggactttaagcattcctcttgaaatcttgtttttactctttctagtcagtctttataggcaatccaaagggatgctttggatgctttagtccagtggttctcagagagtggtctgtggagtcctggaagtcgctgagaccctttcaggcaatttgcaaggtcaaaactaatttcagaatgacaccaggatgttctgtgccttttttgctgtgttggctatttgcactgatgatgcaagagtactgggagaggagtaaaaccattggtgtcttaccactattcaagacggtggcaccaaaccgtactagtctaataggcattgtatcctgcacagcctcccgccaggagtgtgatggaagaacaaggaagcagtgtaaatggaggtamacgggaagcacttcctttgcaccgtgaaagatgatgactgtttcaaggaaaagcacttatgccatggtttgtgtcgtgagctgaaccagctgcctttgtcatggaacatgacttttaattgaaagagtaactgacagaaaaccaattattctgacttgtgtttagcagacattttcttgaaaatgaagaagtgactctctgacttcaggaaaatgtctgacagtatctgttgccaaagaaaatgtgagttttcaagccaacaatagaattctagaaaacttgtattcaccaccatgggcttgatgacatcttagtacttagacctttctgacgagatagcagtgacattaacaaatgtgacgtttttcatgttatctaaatacatttgtcaacatttggaagatctgcacaactccctggaccaggattttccaaatgattgttgctttttgttacaaaatcagggaatagatagaagattcaaatagtacaagatagactgatggatttttatgtaacagaataggaaaagtttgctgacatgctttcagattccaccttgcaactaatttttaagaaactaccacttgtcagccaggcacagtggctcacgcctcataaaatgagttggaatgaagtttttctttcttattctctagaagaatgtaatgtaatttattgcttaaataattaggagaattcaccagtgaaacccatctgggcctggattttcttttgtgggattcatttttttcaataactattcagatttcagtttttcttttatgccaaggtttagtaagttgtgttttttacgtaatttgttcatttcctagaaatttacaaattgatgatccaatgttataatatccttttgttatctttttttttttttttttgagacggagtctcgctctgtcgccctcaggctggagtgcagtggcacgacctcggatcactgaaagctccacctcccaggttcacaccatcctcctgcctcagcctccccagtaggtgggactacagacatccgccaccacgtctgactaattttttgtatgtttagtggagacagggtttcactgtgttagtcaggatgttctcgatctcctgacctcgtgatcagccctcttcggcctcccaaagtgctgggtttacaggcatgagccccygcacctggccctttgttatctttttaatgtctggacgttctaggatctgtagtgatgttccgtttttattcctgatattatttttgcctcctgtcatttttacctgatcactctttccaaggggtatataaatttcactagtattgtcaaataacccactttgggttttattgatttttctctatcgtatattggtcttatattgattttttgttgtttattttggggccgtagcaggagccacagccagctccacatagttcagagggcctggcaagtatggaggaagacccttgctttcccctggaggtgctgagagtttaattcccgaggaagtaaggggattatttccctgtattggcaaaggttctagtttttgagtagaactagaggacctcacttctcttgaaggagaagtagagaggctcctcctcattcccttccctacaagtccccacgtgactgattcttcctctccaggggcttctagaattagcaacattgttccctttgatcctttggctgattacatatcctgcatttcttctgtagggctgggtgttgatagagggccataagacattatacataaggtattttatcccatttaccttgtttcttacaaaataagtcccagttggagaattgtagtattaatgtatgtaagtaactcatgttcagaccatctctcttgattccgtagggaacactggggccayatggtattacagtaatatatcatttgctttttggtcatggatatgggtatccaaatagtttccagtgctggaggaggcactgtaacgggctctcctccagtattgagacctggttccccatattctagggtctttgcccagaaggctgattccaccctccaagaagcttccactggggattagtgatgacacaaatcctgtaactcttagcctgtaggatatttctggtcctttcagcttgctgctacacgcaggccactatggagtggaggtgctgggaagctaggagaggacaataggggttgcctctccctggatcatgttcagtctgggtagcttccctggaaatctcatggagattccacagtagttccggatccagcttgagtggtgggaggtatgtaaatcaatcaagtaagcaaggtgttctttctggagagggtgcacactctgctcatgtaaagtctacatcactgtattttggttccaggaattcccacccaaactgccccattctaaattaggcctcttcaaatcaataacagttcttctgtgactgctggaawatggaagcccaatattttagggattaccacagactaaggagaagggaatccagacttcacatgcattcaggccacaaagaaacacaagtattggcaaaagtgacaagcattcagcctacagatataccagacagggacaaagtcttaaagatgagagtcctcgtctttatattagggcttcccctgttaaaatggatggagacatctctcaactcctagacctgaaggggagtcctgcccattcccaacaatcctggatcccttgagctaggtcctaaacctgacaacccagagtcctaataatcaaaaccaaaaccactcttttagtcagttcacagaaccaccaccacttactgcctcaaaattgcaccaaatgaaaggtccaagcagccacttctgctttcctggtgggctggggggatggggttggcatgcctgagscccttcaccaatctccctcttggcaacttaacccactcatgcttcctcagactgctgcttcgcctgtaagcagcctataagggaggtcgagtcagggctcagtccatagtcccatctggatcaaccagatttgtttcccaggccctcccaccccactgcctccaaaaaaaaagcggggtttgtttgcctggtgagtaacaaaagtcgctgagaacacagaytttgatcaataggagttttattacttgtcacaagtaggaagagctctgggaatattcgtcaaagcagtgtctcctaagagaaaatgacaggaaggctttatagagtgatcgagaggggagaaggtgcatcatcacatgaagaggaggggtcccagtgacacagatggagggagtcatcgtgccaccacataggacgcatgctatggtaatgaaactatagctctcccagggtgcaggatttagcattgtaatgaggaaagttcactgtaagtgagttcatctataagttgctggggtctgtcaggagcaggttccaactgactaggtgaccacatttcacacagggtttgagacaaaaccgtctgcaaggcagaaggctgtaaaacgggctaattgctcaaattcattaaattccttcactccctgggggcccgccctgtcttgtctatatagccagtccttaggaagtgaggccaagctgaactgttgacmcagtctatgtctttacragtctgggagctgggtgattttacctctgatgctagacttatttttactggttttgaagccttgcttacagccctttcccagtttctcacgaaatactcatgaaaggggatggtggggagtgggcatggggaaaagggaatgatattaaaattaaagctaacatcattggcctctagggggcactcatggctcatctccatagcccttggctcttgcagctgcccaagatgagagtcctgatctaaggaaactccaccaccaccaaggctggggtggtggcaatgggggcattattttccaaacctgactaggctacattttaaggggatcatagtcacagagaacatagatgtggactattaatttyctttgcctgagcagccgtagccctatgtgctcctctccagcctttcagggagctatgatgggccaaaaaatgctcagtagcccaagccatctcctccatagacactggagtaaaatctctgcctatgggtgtgtgtgtcttgtcttactctatcctggatttgtttcctccaatgctggtggctttactttagatagtctgattgttgcagagatgagacccaaggctccactctggagaaaatagagccctcttgagaggtcagcccaacttgctagacttctgcatggggcttggggttcaatgttccagcctgtccccaaaaagtcatggccaaattcacatattcctttgatccctgatggtgtctcatcacacagttcgtctggcctcaccattgctccactaagtccaggaacctcaaggaactatgagacaggtagggctagacttaacaaaatggctatcacagtcttcatttcatgagacagaggtgaactgagaaaaggtggaaggtgcttcagagacttctctgtattcatccctaacttaggcagagagccttggccacacaggaaactggggaagacccctctcttactcaggagtcccccacactggtgccatcttatgacaggcaggcatcagcttcagagccagtcaaacagttaggaatagcaaacattgctccagaatttgttggggttttttttcccctgaatttgatagtaagctccacataggcaagaatgacaaccatcttgttctccttgtttctctggagtctaacacaacatgtagcacgtggttggcccaataagaatttgtcgaatgggggccagatgtggtggctcatgcctgtaatcccagcactttgggaggctgaggtgggagagtcgtttgaggcctggagttcaagatcaacctgttcaacatagtgagacccctatcttctttttttttttttttttttaaagtggagtttgttgaatggcacacagaaaataaacaatccaaatgacagatcagaggtgctggaaaagaccagggagatctaatcgttaaatcasgtcatctaaatattaagaggagacatttggacatctgatagaatttggcattgaataagtgataaatacacagaaaactgaacaacggcaaaaagaaaagtatcagttctaagggaaaagatacaaatcaaaagccttcaggaaaggataagtcatcatggcttactgtatagcttagcttaaaataacacagaatagtgaagtagcccaaagggccatctaaccacactgggaagctgagcaggggaggagtgcgtatatgcatggaggagacttgtcttcaccctcctcagcagctgacagcaggcaggctagacctggacaatggagcaggagtcacacagcctgtgaaagaagtgctggggaatgtaggggctgctgtttcacatgacagagccattgaaccctggctgtttataatagttacatacataattttaatagaaataaaaaccaaaaagaaaaaagacttaaacatgaaaggcaaaaccattacaatttttagaggaaaatataagagagtaagaacagaaaaatgtcttaaggcacaaagtgctaaccataaagaaaaagattgataaattcatcttgataaattttttgtttatcaaaaggcaccataaagacagtgaaaagacaaggcacaaaatgggagaagataattgcagcacatctgaccagcaaagaatttgtatccagaatatataaagaacttctatgagtcggttttttaaaaacacaatttatatttaagtctctttaaaacaaatagacaattcatagaaatatggtgatatggtttggctgtgtccccacccaaatctcatcttgaattgtagcttccataatttccacatgttgtgggagggacccagtgggaggtaattgaatcatgggggcagatttttcccatgttcttgtgttagtgaataagtctcatgagagctgatggttttataaagagcagtgcccctgcacaccctctcttgcctaccaccacataagatgtgcctttgctcctccttcacgttctgctgtgattggtccgcayccaaatgtcatcttgaattgtagctcccataatcctcatgtgttgtgggagggacctggtgggaggtaattgaatcatgggggcagatttttcccattttcttgtgatagtgaataagtctcatgagagctgagggttttataaaaggcagttcccttgcacaagctttcttgcctaccrtcatgtaagatatgcctttttcattataagttacccagtcttggatatttcttcacagtggtatgaaaatggactaatacacatgggctaaactcatgagcaggcaactttatagaaaaacacaaatagcccataaacayaaaatgtagattgagttcattattaattagggtaatgcatgttatggatagaataaaatacctttttacattcactggattggcacaaagttttgtctttgtgccactctaaatgttgacagggatgttgatcaactggaattcacacactgcttgaggaagcttgcattcactctataattcagcattctgaaaagtgctcaccaataatcagcccaggaaggttcacaaggacatcttcaccaaatatgtcctttcaccctagcaaagaactagaaacaactcaagtgtcttttgacaagagaatgagtaaatggcaagtggtatgtcacgcaaaagaattctagacagaagagaaaattaaggaacatcaaacttagtgaatctttgagacgatgttgagtaggaaaaaaaattcagaagaatatattgtatgatacttttatcataaggtttaaaagcaagccaaggtaaacatgtgcagggacacctagggacccatgtcattttaggatcaaacagatagatggacagatgatagatagacagacagatggatttttttaactcaaaatagtggttacatccttagggagctgggattggagaagagacacttagctttgaaagtattgtcaaatatagtgacctttctagttcatttgggtgctgggttcaggggtattcattttattatgcaccataatttatgtgagacattttattatatcaaatattttctaatcttacagtaagcagtttggtaaacagattcataactgcatataatgtgtaggtcttgtgaacaatgctgctgtgaatatcaggacccaactgcacttgtctctcactgccttttgtaagcctgctcaattggggagttcttccccttatactggagatgagaactcaggtaatgcctcgactgttcggatcactgtcaggggattacatgttctaccgtgctgacttttcactgaaagcccagtctccactcaataagtaaaagtgtaataatcgaaactcccaayttgagttccacttaaaatcttctctcttcccctgccagacctctctgcaccatctaggggagcatagtcccctctgtccctgcctgacagggctctcctcctcagcagcacagggaggtgtctgacccatctgtgtgtgtgtgtctatgtggtggggatggggaccatagcttggcatcctgccctctcaccctggcagttcattgtctcaagctgactttcttgggtgttttcatggcttcttctgaggcctccctctggaatattggatcgtamctccagcaatgcaagcaataggttttcctccagcttctggtcctcctcctcctcctcctcctccccaaacctggtttctagcagtcactccactgagactcagagtcttcttggcccagtgccagcctcttgcatgtcccaaaccttgtcctcaggaaacacttatgcatcctatgctggggtgaactcttaagagtgcaggatcacctcatggccacagcctagctaggccctgaaacccacactctgggtttgtcagacgtgagtcagccccaggccactgaacctctcccactgcagggaatccctgtcaagtggtgaaagccagcatctagacctggagtcacaggcacctgtagcataactcctcctgaaatggaggtttttctttagagattggtccatatcccttatccctggacttctgagaagggtggacaacctgtggactggacttgagtctggaatttagagaagtgtccatagtagggctgccagatgaggcaaacacaaatacaggatgcccaattaaatttgaatttcagataaatgatttttaatgtttgattctgtcccatgctaaaaattgcccactgtttatgataagtttaaatttattggtccattctgtactttatcaaggacacacgcaggaggaacagtagcacaaaggcttcccggtgccttgtgggtgaaagaaaggcttccagggaaaggagagaaacacccagggatcccggtgacgtcgggaagcagcacccagaccatgtaaggacaccgcctgcagggggagactcaaggcctgggaaggttttctaatctgtgccttgagtcgggtggggggattttctgggaaaggaaaaccagacacagtaggacaaatattgtatagtttcacttatatgaaattgtcagaataggcaagttcgtagagacagaatgtagaacagggctttccgggggctggaggagaagacaaggagttcttgcctagtgggtacagagtttctgtttgaaatgatgaaaaacttctggaaatagattgtggtgacagttacacaccattgtgaacataattagtaccactgaactgtacacgttaaaatggttagttgtatgttwtatgtattttgccataataaaaactagggggaaaaaaaggaaggggagattgtctcaggctggctgactttccctgcatgtaygcacatcttcacatgtgcacacatgtaaaacaaaaatgaagcaaaaaaagaaattctaatttaaccagtaagcaatatgtaaaaggaaatctgaatgtcattacaattttaccaggttcagaataaaataccatccttcaaaatgaacaaattacttattagccgaagaaaggtgaaaggaagtttggaattaacagtctagattttctcactgattggtccaagtcactgacctctaaaattatcttrgatcatgccctccctccttcctactttctggaaaacaatcagtctcctaccctatgcttgcccaaagagtttcccatacaaatcacaaatctgcacttgccattccctggaagcccttacattcccaaggcctggcctcatccactgccactgcccatggccccagtccaggcaaagcaatcactccctctccctctctgtcattcctttcttttcctttcactctctttctaccctcctcttccccactctctgtttcctctctctctctctatctctctctccccaccatctcctctctctgtctccccccgccttctctctctgtctctgtctctctgtttctctgtgtctctctctctgtctctctctttgtctctctctctgtctctctctcacacacacacacacacacacacacgcacacacacacacagccagcaacattctacctctgccagagttccaggttgaataggtgtggactttgactttcagattcctctggcaagtgtcaacatcagtcctgttgctccctggcagaggaggacttggagtcaccttggccaagaagctgtctggaggtcacagtggcaccgcccatcggccccttggctgaggctagatgagggcagattcagcacagcagcaactctccccataaaaaaaatccctcagtgtcttagttctctgacccttgtactccttgtgagttttagagccacatgaactcttcttttttcccaatgcttggagacaaaatttacataacctacagttagccattttcaagtgtacagttccctgccatttggtacattcacagtgttttgcaagcaacacccatatcaagccccaaaacattttcattacccaggaaggaaacctgtcgtcatggaaccgtcactcctcacatccccttcccctcaaaccctggcaaccccaaaccgttcttgacagcctcctttggcatttcttcattttggtgtcagatctcacagcagaatttcttacctattatatccagtgcctcagtgtgaagttccagtttaacttcctgttacctcgagcccactatcttgccccaataataccctcccccaattcacaaacacagacrcattccctcctacagctttgggcctcctatctgagtccttcaggaaagaagagcttgtaactcccttagcagtgagtgtagacttggtccaaggaagatgagcaccagtcagggcagctggcccctcctctctccctggtcttcagcaaatcagcactgcccatcgatgcccaggcaatgggagcgtcgaccagcagaggacacacctgaatttctctgcctcatgggagggcggccactgtgttgcatttaggaagaagctgtgcaagattcatactgttttgctaatgttaatcttgtgggcataataaacgtcgtacccacacttaactttcgagatcagacaagattgggtgtgttcagggtggtatggccgtagaccccacacttatttttaacacacttctaggcaaggctgctgcactggtctggggatcacactttgagtagcaaaggactaaattgcaataactgccagggggggagaaaaaaaaacaggatgaactgcttcctcctggctcagcagctagggagtcactgaactaacaaggggatggggtggggataagaatgttccaggcaaaaggaacaacatgcccaaaggcctcaagcagaaagagagcttcaggtattgaagaagtagaagtagctctgtgtggctggggagtgggcataagatggagcagaagaatgccaagtcctattcctgggtctgaatttccaggagcagaagccctgtcccctctagaaggtggatatagtctggatatttgtcttcttcaaatctcatgttgaaatgtgacccccagtgttggaggttggacctagtaggaggtgtttaggtcataagaagtggatccctcccgaatggtttggtgccctcctcatgactgagttgttactctattagttcgtgtgagagctggttgtttaaaaaagcctggcatctctctggttccctctcttgccatgtgacacaactgctcccccttcacccttccccatgagtaaaagcttcctgaggccctcaccagaggcatatgccagccctgtgattcttgtacagcctgaaaaactgtgagtcaaataaacatcttttcattataaattacctagtctcagatatttctttatagcaacgcaaaatagactatcacagaaagtcggtaccgaggagtagggcgttgctataaagatatctgaaaatgtggaagtggctttggaactgggtatgaggcagcggttggaagagtctggagggcccagaagacagaaagatgagaaaaggtttggaccttcttagagatttgtaatgtcgttgtaaccaaaatgtggacagaaatatgtacagtaaaggccagcctgatgaggtctcagatggaaatgaggaagttatggggaactggagcaaaggtcacccttgttaagccctagcaaagaacttggctgcattgtatctatgtcctagggctttgtggaaggctgaacttaagagtaatgacttagggtatctggtagaagaaatgtctaagcagcaaagcattcaagaaatggcctggctgcttctaatagcctatgatcagatattggagcaaaggactgacttaaatttggaactattaaatcaaactaaaatctggcctgagaaagcctcctcactcccatacttgagtccttaaggatgaaccataacctaactttgtaggtaggmcractgaaaacctaacttagaaggatgcttctgtagcaatagctgagcgtcagccaatcgcagcagccatgcttcagtgactcacaggcagcctattgttcaaaccatgttcaaataaggcaaacaccatgctgtaaccaatttggctatttctgtacctcacttcggctttctgcgtgtcactttactttttctattcataaggttttttccgaccacatagcatctctggtgttgctctgaatctgctgtgattctagggactgcctgatttgtgaattgtctttttttttttcttcaaaattaaattctgttaaatttagtttgtctaaggtttttcttttaccagatctggtgttggaagtgcaatttgaagtaaaactctggtgacctccaggaacaccaggtgaccaggccagttgtgctcactgatctcttgattgtaactggaggttgtagatgcgttttctcttggattcagagctccactaatgtgtattctaattgaagctctccaactttactggagcgatattaaagtggactgggttcaggatcaaatttgaatcaataattaactggattaggttccgttagagcctcagacctatactaggcactttttttttttttttttttttgataatgggtttgtctcaatccaaagattctgggactctaccttctgggactccatctaatttgatatgtaaaattatggayccagaatatgtgcatttttagaaaaatagattaaccttactagagaaaagatggccacaatggggaagttttaatttgtataaaattgtttatttgcawggcatattagaaaaagggggtcaaaaccccacaaaaacagtgggatatagtctttcattggtacatggaagcctctaaaagacaaaatgaatgaaaacttgcctccttaaaagattcttygcaaaagcaagtgaacagcttaagtaacaggctaaggacatgatgaaagagaactgtactctgactgaactaaccccaactgattcttctctttatgcatctctacctacgtactctgagtctactaacctttttactaaattgacctttcactctcaagatgatgaaaaaagaggaattagatgtacgcctcacaaaggaagaccttctgattatccaggcctgcctgctataaccactttcactccatggtctaaaactgagcttagagctattgtagaagacttccctgatctaggagagaatcctcaaaaattgactgaggagtgtagaatcctcataggagattatgatccaggactccctgacaaaggttcatataaatttattcatatgatatggaggcctggtgaagctcaaaaatggatggcagcagcagaatggaacaaaccggaggaagatattaaagactctgcccctactgcccgcccccacaaaacttcctcatgagaaggcccaacaggagctagaaatattgctgcaaatcccagcctgggcaacatggcaaaaccctgtctatacgaaaaatacagaaagttagctgggcatgatggcacacgcctgtagacccagctacttatgaggctgaagtgggaggatcacctgagcctgggagcttgaggctactgtgagccatgactgtgccactgcactctagcctgggtagcagagcgagaccccatctcaaaagaaaagaaggaaaaaaaaattgctgaaaatcttttaaattcaagtgctaaaatttttccgcaaaagttgattggtacatcatacaatattgtaaaccaaaaaaagaatgaaccagtgtcagattacagaacttgcttagaaataatgtgaaacattctgggctcagagtaccarcaaggagtatttcctgcagggactgaaatggtattaactactctatttataaakggacttcatcctgaacttagaaatttaattagaaaacrtaaactcggatgggaagttacagccatgactgaattggtggctctagctgaacattttgagaggactgtagagcaagaaaaaacccaaaaggctaacaagcttatgactcttcaattacaacagttacaggggccaagaccaaagggatcttctcattctcattttaaatcacaaccaagaggtattagaccaagaaattcttcaccctaagatgtctgccttattgcaaacaaccaggacagtggaatagggattgtgcccttttataccagcccaccaatgaccctccctttaggccagcctgtttcaccactagagggagcacaagagaccttagctctcctgaagataatcagcattgaagcggctctgagggatttcccagtatattgctcctcataacacccttaaaagaatatggagaaacagaggttacaataactggggactcatgtatagtcttggtggataccagagctaccttatctgccactaccataaaacacactttcataagccaacagatccctcagagttaaaaaggctatttctgtggttggggtttcaaatcaaattcaagaggttcccatatctgaacccgtccaattgactttggggcacttttcagaaaatcacacttttttactgtatgatagtgctccagtaaatttgctagagggagatttactttcaaagctgaaagggcatagaagactacctattgggtacattgtacactgcttgggaaatgggcacactaaaatctcagaactcaccagtaaagaacttgtccatgtaaccaaaaaccacctgtactcccaaaacaattgaaattgtttaaattaaaaaatttttaaaagtggggaggatgtaaaattttccttagaaggagtaagaatcagtttcctgattctcctgaaccagaattgttatgctctctataggcagaaattaataagattgaaactcaggcctgtaatgcctgatcttccaaaaatacatgaatgtttatgggtctcttcctcaactgacacaggaagaatttaaagtgtggaacttataaaagtccaaatagaccactctaaacttttgcctaaattacccaatatccactaaaactagaagcaattcaagggctctcgccaattatagaagatttaattaaacagggacttataattctatgcaccagccgttgtaacactccaatcctactggttaaaaaaaaaatggatgaggttgaagatttattcaagatttatgggcagttaacaaaattgtagtagcaaggtttcctatagtcccaaatcctaatactttattatccagtatacatgctgattcttaagtggttcacaatattagatctctgctcagcctctttttgcaatccaattcgtaaagagagtcaatgcttatttgccttcacttggaaaaatcagcagtacccctagactgtgatgccgcaagggtttaccgaagccccttcgtatttttcccaggccttgcatcaggacttaatgacattatagtttccttaaaattctactctcattcggtacatagatgacttactatatgctctcccactaaagagtgctctgaaatggactcagtttaccttttacagcaactcacacatcaaggtcagaaagcttcaatagaaaaacttcagttttcaaggggaaaaagtccattatttgggacatgacttgaagggatttccctctcacctaaaaagttaaaaactattcaaaattttccttggcctgcaaccaaaagataattaaatagttttcttggacttgcaggatatgtttttagacttgcagratataaaattcctgggttctgaatttttccttaatagcctcaccatttcatgagctccctaaaaaatgctgtaccagagcctttatcttgggatgatagttacgagcaggcttttagctaaataaaattgaccttataacagcctccagctttaggacttccaaattgcactaaactgtttacctaattggctcatgaaagtaataatcaggcatttaggagttcttacccaggaacatggggagaaacataggcccattgcatattatagcctgcaattagacccagtagctaaggtatatcctaactatttaaaagcagtagcagcagcaaccaggatgaaagaagcttcagctgatctggttttaggaaatgaatttaatttggaagtcccacatgctaaattccacccaaacccagcattttttagtaagtagactaacatgaaatactctgtctccttctaatctctctctaaaacactgcaatttacttaaccatgccactgtattactgctgcctgatgatggtgaagaccacaattgcataagtgtagcatcagaaatagtggcccctcatgttaatttacaagttagtcstttggacaatcctgagttaatacttttgttgatgggtcctatgccaaaagctcagaaggaaaatatcagctaggatatgctgttaccaaaatgagttaatagagaagggaccccttcctctattagtcagctctattagtctaagctctataagtcagcttaactcttgaagatttttgccctcacccaagcttgtcgtatagctaaagacaaatcagtaagtatttagacagatagtagatacgctttaggagtagtacatgattttggcatgatagggaaactctaagggtttctcacttctagtgggatcaccatcaaaaatggactccagttagataaactcctagtttgctgttaktgatcgaagctcatacctgcagaactgaacctgaatatcaagggaatgcttagcagatatttatgctaaatcagctagtactgaaactgttcagatatgcaacctgaatgaacttcataagattaatccaatccaactaccttacaatgacctatttaataaasartgcaatgcacctcatttggaaaaacaaaactggtatctaaaaggatataaattcaatgttaagtgcagactcacagagggcctagatggctgcctggtctttcctgagtctttgaagcttctattttcaaaagctctgtactccacaactcatcatggaacagaaaaatacgtccaaattgtgaaaaaatacttgtgggatgattgttccaaaattgctagaatatatatatatatatatatatatgtatatatattttgagacggagtctcactctgtcacccaggctggagtgcaagggcgcgatctcaactcactgcacactccacctccctggttcaagtgattctcctgcatcagcctcccgagtagctgggactacaggtgtgtgccaccatgcccgactaatttttttttatttttagtagagatggggtttcaccatgttagctaggatagtctggatatcctgaccttgtgatccacctgcctcggcctcccaatatgctaggcttacaggcattatccactgcacccagcctgctagaatattttataaccaatgttggcttgtcaaacccatagtcctggaaaaacaaaagattcaggtggtgtattgtattttcaccacctaatggatcatttgaacaattatagatagacttcattcagttgccaccttcaatgggggtctcagtatgttcttgtaatagtttccatgttttctggttgggtagaggccttcctgtgtaggaaagctgatgctgtgacagtagctaagaaattattagaaaatgtgtttyctttatggagcatccctggaaaaatccccagcaataggggaattcattttattaggcaggttataaagcagttaaacaaggtgttatggacacaatggcactaccattgtccctatcgccctcagtcttctgaaaaggttgaaagaacaaatggcatattaaaactgaaattggcaaagttaactgaatcagttgggttgccttggccaaaggtactatcattggacttaatgacaatcagatccactctcactaaaaaacagaagtggatcccttatgaaatagtcactagaaggcctatgccccaatagtgaaacctcatgcatctttctgtctcctaaattctgatatgagtaagtactgcaaggccattataccaaagtgtactttcaccagataaaggaagcttttcaagatccaccaactgaggataatcaaaccttccacagtctagaacctggagattgtgtcttctggaaatgacatcagagaaaggctgctcttgacaactctttggaagggaccgtgctgagatcttctcaacacctacactgcagtgaagcttcagggccttgaaacttgggtccacacctcacaactcagaagggcctcttcagactcctggaactgtacacctgctggagactttaaggtaaagctgtctaaggaaatatctctccagagcagcgggcattctagctgtggacagctttcccaagatcacagatcaagacttctgtatcatcatgaaagccttacattttttcttttctccgcatttcctgttgccctaattctttctttttccctacagaaaaatccatgggacgataatcagtggatggctttagcttgagcatatgctctagcacagaaccagagtttgtggcttattgggtttgtttttattgccaaaaaaataaggaaacaattccgctaatgccaatgcctctccatgttgccaatgagagtcaccccaaaattccaagggaaggatagaaagctatccttgatattctgaacaccaytgctacttgttttcctgcactcactaaaagcaacactttaacttttcctttttttttttttttctgaggcagtctcactctgttgcctaggttggagtgcagtggccttatcttggctcactacagcctccacctccaaggttcaagcaattctcctgcctcagccacccaagtagctgggactctaggcatgcaccaccgcatccagctgatttttgaatttttagtagagactagattttgctatgttggccaggctggtctcgaacctccttgcctcaagtgatccaccagcctcggtctcccaaagttctgggattacaggcgtgagccaccatgcctggccttaactgtttcarttaataacctgatcaataccaaaatatagaaaaccagtccaagtgatgcctgcaaaagatatattgtgctttcaggcatcatgcactcaagttacgggaattacctatgtgagtacaagtaattgcttgtataatatcaccagattaaattcaacagggtctctttttactaaatgtgttatacacccttacaacatactacagggcgagcacaaaaaggtcaatttcccagtggattttgttcaggagctgtgtaggtttattaatgaacaaatctaactgacccctgctcaaatgcaactatgtggccctgtttttcaactcccaagggcctatactgggtctgtggataatctgcgcatttcattctgcctcctcgttgactcagaccttgctgtttggtctggctcacttctgcctttcaaatagtttcacctaaaaattctcctaacagctcttatgattggaggccaaaatagacaataactgaaattagcactagctttgaaatagacaaagataagctagtttccactgaggaaagattccagtggggttcctggggactcactcttggtggtggtgggatactagttgtatggaatctgaagctaatccatatttggggtcttggattttatagccaatcagacatcccaatgttccagacaggtagaagctactctccaaaaggtagatgtggcctggtgcagtggctcatgcctgtaattccagcactttgggaggctaaggcaggtggatcacctgaggtcaagagttcgagaccagcctgcccaccatggtgaaaccccatctctcctaagtacaaaaaattagccaggcatggtggcgtgtgcctgtagtcccagctacttgggagactgaggcaggagaattgcttgaacccagaagacagaggttgcagtgagctgagatcaccccactacactctagcctggktaacagagcgagaccctttctcacaaaaaaataaataaataaataaataaataaataaataaataaataaaataaacgaggtagatgttacagttaatggaacatcatgcagcttcatatctcctttttactcaagctggggcctatgtttggtattgaacaaaatggaatgctgcaattttctctctactgattttgttactacagaaagcttaatgtaaaggtggctgatactgctgtttccttagacactgacaccaaatacaataaagaagtctctcaagaggaaaacatggtgtgtttacaggagcaactaacagttggtttgtaggcatcctaaatggtggatggcaagcttgggtttcccaaaggtttctagtctttataygtcttctagtaggtgcccaggttagtatggcctgtgttaccagagtaacaatgaaaatggctacgtctttaaatcaggccactttacagtgaactatggtccttaattgctatcacatttcaaacaagaactatgaccaattaaactttactattgttgaactgcctatgttgcctgaactttgactggtttaagttggtttcatttatttcataagaactcttgttaaggggtgcaccttkgtattttgatattattctcttgatagtcataataatagttccctggtgtgctgcatcctctcaagtcataaatgttttgtatgcagccatacattgagaattgaatggtctcacttcaactaggtcagcaagaacataaagaatcatttacctagtgtgaagttgtgacttgtgaacttcatagtgacaccaataaagacttgtgaactccatactgagactaaaaggacttgtgaattccatactgagccaatttacaatagtgggagagtggcatcaatgcctaaacttttgatcaatctctctaaattgagagtctgacaaagagaggggagttgataaatgaaactcaaatccggcctgaggaagccttcatattgccatgcttgagttcttaagggtgaaccgtaatgtaactagtaggcaggcagactgaaaacctaacttaggaggatgcttctttagcaatagctgagtctcagccaatcccattggccatacttcaaccactcacaggcagccgactgttggaatcatgcccagataaggcaaacaccaagctgtaaccaatctggctgtttctgtacctcacttccattttctgtatgtcactttcctttttctgtccacaaatttgctttgacaacacagcatccctggtgtctgtctgtatctgctgtaattctgagggctgcccaacttgcaaaatatttatttttcttgctcaattactctgtgaaatttaatttgtctaatggatttcttttaacagaacttataattaaaatggagagcgggtgtaaatatttataaaacttgcagcctggccatgtggtagacaaggaggaatccaagcagcctgctgagcaactacttgctggagacattagcatgtctaaaagggagccaggtgctaatattcaagacagtgggaaaaggcctcagaggcatttcagaaggcccctcctatcacaggcccacaggcctaggaggactgaatggtttcagagaccaggcccaggacaccattgccctatgtcacctcaggatgctacttcccacatcccagcttctccagctccagccttggctcaaagggccccaggtgaagcgcagaccactgctttggagggtacaagccctaagccttagcagcttccatatgtttttttttttgtcttttttttttgagacagagtcttgtcctgtcamccaggctggaatgcaacagcacgatctcagctcactgcaacctctgcctcaaaggttcaagtgattctcctgcctcagtatcccaagtatctgggattgcaggcatgtgccatcatgcccagctaattttgtattttcagtagatacggggtttcacaatgttggtcaggctggtctccaactcctgacctcaggtgatccacctgcctcagcctcccaaagtgctggaattacatgtgtgagccaccatgcccagccttccatatggttttaggtctgcaggcttgcagaatgcaagagtgaaggaggcttgggagcttccacctaaatttctgaagatgtatcaaaaagcctgggtgcccaggcagaagcctgcacagggcggagaccccacagagaacctctactagggcagagccatgggaaaacatagggttggaacccccatacagggtcctcactgggacattgcctagtggagctgtgggaatggggccaatgccttccagacaccagaaaggtagagtcgccagcagcttgcaacctcagcatggaagacccacaggctcaatcccaacctgtgagagcagccatgtgggctgcacccagcaaagccatagagacagggctgctcaaggccttgaaagcccactcctctcaccagtatggagttaaggaagatgattttggaagtttcagatttagtgtttgccctgctgggtttcagacatgtgtggggcctgttgcctctttcttttggccaatttctcgcttttggaatgggaatgcctacccaatacctgtaacacagttgtatcttggaagtatgtaacttgtttttgatataacagcctcatgggtggaaggcatttgccttgaggctcagatgaaactatggattctggacttttgagttgatgctggaacaagctgagacattgggaaactatcaggaagggatggttgcattttgcaatgtgagatgacatgagattttggggtaagaggcagactgatatagtttagatgtttgttctctccaaatcacatgttgaaatatgacccccaatgttagaggtagggcctagtgggaggtgtttcgctcataggggtggattcctcatgaatgggttggtgctctgtccatggtaatgaatgagttctggcyctgttagttcacatgtaagctggttgtttgaaagcacctagcatctttcttgtgtgctgtctcgccgtgtgacacacctgctcccccttcagcttccaccataagtgaaagattcctgaggccctcaccagaagcagatgcctgcactgtgctttttgtacagcctgcaaaaccatgaaccaaatacacctcttttccttataaattacccagtctcaggtattctgttatgatcccctggaagagttatactacttccaggtctagaccatggtaaatcccacactcccctctgaggccaccttcttccctctgcagagaccctggagttagagtggattggttgtgtctctggccccaattcttctcccgaggctgcattccacccttttgctatgtgactttgcagcccttcatgatcattacagaggcaggttcctctctccttgaatttggggaagatgcgacgcatgcaggagtttgaaaacacgtttgtttgcttctgcttttgtttttgctcctctgcaatttccttgaaaccatgcctgagctagcctgagggaaaatgaaaaagcaccattgagctaatctttcagccaatcccactgcatttgcacaatgcagtctgagaccagaggaactgcccagccaagctcaggcaaaattgctgacttcagactcatgagctaaataaatattgatttcattttatgattgttcttatgcaacattatcctggcactagaaaaatgaaacagatgggaatcaaaaagactgaatgaagcagaaacccagaagctaccccacaggcaatcgcatgggactcagatgttaatggacaataagcttttattgcacagaaaggtcattgcagtcagaggttggggattgcttgctgctacagccgaatggattctattctgaccaatacagaaggaaagaaatcatagacgccctgcytgagcagaagggaggtgatagatgaaatgaactgtatgaagatccaccagcctggcccacacgtggaagaaggactggcccgtcttcttgaagcccaagctctggtagaggcccatggcagagagctggatgttgctggtgtccaggacaacttcactgtagccctrgtcccgggcaaactggaggacagtcctgaccagggcttttgctatcccctgaccacggtgctcattgtccacasagagatgaaacagctgcaaccgcttctccctcaaggtgggatcatcaaygggcagagctcctactgtgcccamcaccttctcttcagaytcasccacccagaagcaggagccacactcactcaggtaggatttggtgatgtcagacatgtctgtgcgcaatgctatgtctacataccgcgtccagggttttttggcaaggaaccacagggcaggaaggaggctgaggctgaacacgagggccagaatccaggagccagagaccaggagtagggcaagggcccccccaagtaagagtatgagggttcgaggcagcttcagtaatcgccggaaggtggctggggcgtgttcggccatcccccsggagagcaagcccacgacctacttgcggtcgctctcctggtrtttgcggatgtgataaggagccatggacagacttctgtgtctgaagtcactgagtccaggaaacagagctaggcctccctgcacgcctttacgccaggcctggggaagagagaggaaaccacgtgagtgcctgcatggctcccagccttgcaggaacagggagacctgcttaagggtgtgtctttccgcgtttgcccatgaggaagcaggcctctgccactgggagaaggtagcatgagaaagacctgcattggaatctggctccatgcctttctagctgtgtgaccttgggcatgtcacttaacctctctgagcctccacttcttcatctatagaacaggggagaagaaaacctgccttctagagttgtttcgaagattgaataaaataccttctataaagccctgatagatgaactacccaccactcttccctctgtttcctttttctggctctctcagcttcttggtgcattgagagagtacctacctcaggcaggccacatgcccaaccctttggtgcttctccagggaccatacatcgcagaaatcctgtgwccaagcacaagtttcaggaaaggctccctccagctttattgtaagtttttaggttgctgaggtggcataagtgccaagcataaaaaacagcccagcctccagatcccaaggaaggtgcatgctcagagcactgtccttccacccagtcccctcacctgtcaccacaagagccttgagtgtccagggagcttcagctgtcagccgctcactggcatccaggagataccgtctggggcttgctcacccctggaaagcaggctgcctgcctcattgcttggctcctgaatgtttggtaatcatcaaccctagggtcaaagagctgggctgtaacacagcagggagcccagtgtgcattcccctttatagtcaaagggaatggcctggagggggaaactcagggtctggaaccgcctgggttccttgcccttctggaaggcctgccacctctcttgcctgttcaggccctgggcatctttctgccacctggcacacttgatactctctgagatccaccttggtccctgtacacatataccacgagcctgagaactgtgccattcaccctgcactcagtcaccattggccagaagccgartccccacacttggcaacaaggcccttcccagctaggcttctccatgctgaggtttccctggtccacaaagcatcgattgttggcagttctttgcactcacctcaccaacccccacctccacccattcattgattcagtcaacaggtgtgtgcgatgcacttcccatgtctgggggtcatttcagccatgagcaaggttgacattcggctgacaggcatggctgtgtgtggcttgtgtgtgttctggctgttggtcagaggctgtgccacacccgttgttaaatattttgcactgcagatgttggagaggcccaaattcaagctcttgtacccgacgtggagctgatcccaaacactgacacatgggtgcttggagatagagaaagttgtattcgatttggccaaagcaagaaggcaggagaggaagatctctcaacttcagttcaacaaagaagcagcagcagaatgtttttatgcagctagagagtgaggaagggggagttcagggggattgagaggaaaagtctgtgtttcctcagtctgagataacaccttgtgcaaccaggcttctcagtgtcagcagctggtcacagtgtccttcaaggcattcattccttctgcaaacttttcctgaccctgaaggaatgtcttcctgctgaacaaagaaacagtgcatgagcagtttatcattatgttgtgggaacaaggaatattggaccaaaagcaagtggttaacatgtgcaagccagcaacggtctgatcagaatgttcattatttcagtcactaaaacatggtatggtgctgaaatctcaaggggcccaattacaaggatgcaacatatacaagataggcaaaagcaaaacctaacagaaaaagcccttttccacaccaacttacatgctattgaagggaaacttccctaaaagattagccaacccattgttgatcagccacgctgggcccgtcatctaggttaggtagtttggactctattccaagagcaaggggaggacattgatatgcacagaggggagaaggggtgtgtgtgtgtgtgtgtgtgtgtgtgtgtgtgtgtgtgtgtgtgtgtgtgtgtgtgtgtgtgtgtgtgcgcgcgcgcgcttcactctggctgcaggtggacaatggatctgaggaggtgggaatggaagcagctaccccttaaggctcgtgccgcatccaggcaacagcagggcccccagtgcagggatgcaggtgctcactgtacaagagcagctggcccagaggggctggtaggagctaaaatcgggcctcccgttgccaagccatgagccatggcacgaaactgagactggccaaaggaaaaggcaaccttttcttatttgctcgaaggcattgcttgcctgctaaactctgcatccagtggactgcatggcttgaggctgtgcctagctctgtgttcacaaagaagccgcctgggctagcagaggcccatgagacagcagtggcttcaacagagggaggaagtcaagaatgtgagacatgagccacatggaggtgcacttggggcagaaatggcaggagttggaatgattcacacagggaggaggatgaggaagggctcagagatgacagccaggcttctggtaggggcattcaggaaaacactggagagagcccagatctggaaaagtcaaggcttcccctaaaggtgctgccctgcagccttcctcagcagaaaccagaggctgggagtcagcagcaggaacccagggccagccagtggaggctgctgagattccagatctttggtacccaacaccacctccgaggaaaagtctaaggagcatcaagtctgggcaggaagtccatggcttatctttagagtgttctcagaacagttcagtgtcaagcaggagttggcctaggaattacaagaggtgagcagctgcttcaaagcaccactgagtacttctagtgtgagtctgaccaatattcagagtcagaaacctgccggtcacttggagggggagaggtttgtgctccgtccctgtgtgctgtctcttcctccatgctcacccgtggctgtggcttcctcaaaacacagcgacctcacttgacattcaggcgtctcttgctcccaggatctactgtgacttctgcatttttgtagctttcctgataaaagcctgggctttccttgtcagacctgaaagattcatttattcattcaacaaacagttcccaaggacctgaggtgtgccgggcctggacttggcatgaaggcaccagatgttggaagcgaggctgccgcccaggaggacacacctgatggggctctgggaacaggatgatggtggagacatcacatccggaataactttgttaggagggttgaacttgacagttaggacttttatgttgcacttgttgaaaagccacctaaaattgtcataagtaagagaggtgatctaatggcccatgaaactgccaactccaggaagacagacagggtgacctgaaagtgggtttgacctgttggtttttctgccattctgtgggtggcatcagcttcctgccaagactggcactgcataggatgtcgggtgtttgccagcccagttgaagctgtctgcttccttgctcaccaacagcagaaaggtgggggctattccccacattccaggtgacagagaaggtttacatggggactcagtcacactttctggggactgtacatttcatagcagaatccaggttatattaaaggagtcctggccgaaggatgccagcaccccatagagatggagagccccagggagctcaagggctgaggggctgaggggctgagtgacagtgagcactgcccacagagggggtgccctgcagtcaggaggggtgggaaacgggtgcagatcggcagccaacagaggcccacccacatgagcacaggtggagttgctggtgcgatgaagagtgtgctggttgggagtggagggctgggggccggtagccggtttgggaaacccaagctgagcgaaaggtgtgccaaggcctgtggtggtgcctgttaacagaaaaatcaaactgttagatgatctgaaagaggtatcttctgagccaatatgagtgaccacggtctggggatctcaagaggtcctgaaaacgtgtgctggggccgtcgttttctacatttgaggggacaggaattggagtaacatcataaattaatccatggaaggtgtacattgactgggcctaacaaggtgggatattgtgaagcagcagggggcattatagatcacaggtggattcaaagattttccgattggcaattggttgaaagagttcagctttgtctaaagaccgtgaagttggtacaaaagaatgcttcagttcagagagaggggtctgcctctgccacgtgatgctgtcccagagtcaggtaggaaagtcagccacagtatcctgggtcaatttaaaccccactgaaggagactctgtggtttctagggtgtgtgttaattcttgccttgcaaggccttaagtcttgttcataatctgttactgattgtcacagagtccattctgaataatctaatgatgcctattttaacattcatgccagtcaagtgattctcctgcctcaccctcccaagtagctgggactacaggtacacgccgccatgcccggctaatttttgtatttttagtagatacagggtttcaccatgtttgttaggctggtctcgaactcctgacctcgtgatctgcctgcctcggcctcctaaagtgctgggattacaggcaggagtcagcacgccaggcccagagttttctaaatgagacttggtgtagccagtgagcttctgttgcctgctgtgacatgggtgctattgttcccattaaaaactcagacctctgcctcgggagacagggctcagctgcagcctactcaactaaaacatgaagcgctgcttcgtgggcaccacagcggctccttaaacttgcaatggtgtgcaaatttgtgggctcactttctacatccgatcttcaaaggtgtctgcgatcccagaaggttgggaactattaaatttgatcatttctgaaatgtcttccagtttaaaagtcttcagttccagttcattttcaattcctgaataaagggatgagtcttggagcttctggaagctggcctggaactgagcacttactgcagacagtgcctgaagtgcaaacccaaaggtgcgtagatctgggctgcatgtgaaagctttcatattcaggtcttactttgcgacagtgaggggtgaccagggaagcctatatgaggggcgggggcaaaccaaggcagcctgggagctgccttaaccacctctcacctcacttcctcagagataaggttttcttgaagggaacgtgcagatttatacaaaatactaacaagctgagattttaattttttaagcaataaggaaaaacagaacttttcactccaaagaccctgtgttaggctcggcagaactggtggcacatctcaggagtcatggggcaatgctctcagaaacaatgttagggaaaaaaaaaaaaaaaacgaaaaacaatgaagaggcttaattcttcttgttaaaggaagaggtatcctc

SEQ ID NO: 93839 - DNA, 24246 bp, Homo sapiens
tttgtatttttagtagagaccaggtttcaccatgttggtcaggctggtctcgaactcctgatcttgtgattcacctgcctcggcctcccaaagtgctgggattacaggcgtgagccaccgcgcctgactagaattcttgtatatttagttcaacagtttgtttgtttgttttttgagacagagtctcactctgtcatccaggcaggagtgcagtggcacaatctcagctcactacaacctccgtctcccaggttcaggtgactctcctgcctcagcctcctgaggagctgggattacaggcacatgccactatacccggctaatttttgtatttttactagagaggggtttcaccatgttggccaggatggtctcaatctcctgaccttgtgatcctcccgcctcagcctcccaaagtgctgggattacaggcatgagcactgcgcccgggtttgtttgtttttttttgttttttgtttttttttttgagaccaggtcttgctctgtcactgagactggagtgtagtattgcaatcttggctcactgcaacctcggcctcccagattcaggtgattttcctgccctaccctcttgagtagctgggattacaggcatgcaccactatgtccagataatttttgtattggtaaagacagggtttcgccatattggccaggctggtctcgaactcctgacctcaagtgatccacccgccttggcttcccaaattgctgggattacagatatgagccacagtgccaagccaaaatcaaacttttcagtgggtccttggggctcttttggaagccaaggaacatttacgagggtcttagaaggggtggggactatagattgaggccaaaagggacttggctggcccctgatgttttgtatacactggacttgagataagaacatgtttttttgtatgatgaagggagaggatagaaagttatgcgaacattcagtctgcccagagatggggactttcgggggtcgggtttggggactggaaggctttctctgccacttttttccatttcatttccttttttgtgtgtgtgatagggtcttactctgttgcctgtactgaagtgcaatggcgtgatcactgctccagcctagcaacagagcgactccatctcaaaaaaaaaaaaaaaagaggaaaaccacctaatgagacagatttatgtctagatatgtccataattacattaaataccaatagaccaaattccccagttaaaaaacaaagatggacccgggcgcaatggctcatgcctataatcccagcactttgcaaggccgaggtgagaggattgcttgagcccaggagtttgagaacagcctgagcaatgtagcaagactccatctctacaaacaataaatataaaaaaagtagctgggcatggtggtgcacacctgtagttgaagctactggagaggctgagctgggaggattgcttgagcgtgggtgattgaggctgcagtgactcatgattgtgccactgcactccagcctgggccacacagtgagaccttgtgtcagaaagaaagaaagaaaacatgaaccaaggagaattggtgtgtaatttttttttcttttttgtttttgagatggagtctagctctgtctccaggctagagtgaagtggcgcaatcttggctcactgcaacctccgcctcccgagttcaagcaattctcctgcctcagcctcctgagtagctgggattactggagtgtgccaccatgcccagctaatttttctgtttttagtacagacggggtttcaccatgttggccaggatggtctcgatctcttcacctcgtgatcagcccgcctcggcctcccaaagtgctgggattacaggagtgagccaccatgcccaagcttggtgtgcaatcttaacaaagtgcactctaagggaaaaatgaaagaagtaaagaggggcacatcttaacaatgaaaggttcagatcgggcctggcgctctggctcatgcctgcaatcccagcactttgagaggccgaggcaggtggatcacatgagatcaggagtttgagaacaccctggccaacatggcgaaaccccgtctcaactaaaaatacaaaaattagccaagcgtggtggcgggtgcctgtaatcccagctactcgggagggtgaggcaggagaatcacttgaacccaaggggcagaggctgcagtgatctgagatcttgccactgcactccagcctaggcgacagattgagactccatctcaaaaaaaaaaaggttcagttcaccaggaaacacaattgcaactctacatgcagccaatgatatggcctccaagtagagcagtcttgtttttttgtttttgttttgttttgttttgtttttgagatcgaggtcaagagtttgagaccagcctgaccaatacagtgaaaccccgtctccacgagaaatgcaaaaattagccaggcttggtggctggtgcctgtagtcccagctactccagaggctgagacaggagaattgcttgaacttgggaggcagaggtggcagtgagccgagatcgtgccactgcactccggcctgggcgacagagcgagattctgtcccaaaaaaaaaaaaaagggaaaagcaaatataagtaaaatgtttgcctgcaaatatctgttcaatgagtgccagccattattattattgttggtggtgttattttatagtttattttagtagcttattaatttataataataattattactattattttagaaacagcgtcttgccttgttgctcaggctgcagtgcagaactttgatcataactcactgtagcctcgacctcctgggttcaagggatccctcccacctcagcctcccatttagctgggactacatttttaaattttctgtagaggccaggtgtgacggctcatgcctgtaatcccagcactttgggaggccaaggcaggtggatcacaaggtcagaagttcaagaccagcctggccaacatagcggaacccccccatctctactaaaaatacaaaaaattaggcaggcatggtggcaggcgcctgtaatcccagctactaggaaggctgaggcaggagaattgcttcaacctgggaggcagaggttgcagtgagccgagatcacaccattgcactccagcctcactagactctgtctcaaaaaaaaaattagtcatgtgtcatggcaggcgcctgtaatcccagctacttaggaggctgaggcaggagaatcgcttgaacctgggagtcagaggttgcagtgagcccagatcgttccactgcactctacgtgggagacagagggagactgtgtctccaaattaattaattaatattctgtagaggcaggctctcactacgttacccaggcttaggttgcccaggctggagtacggtgacgtgatcttggctcgctgcaacatctgcctcccgggttcaagcgattctcctgcctcaacctcccaagtagctgggattacaggcatgtgccaccgcacccggctaatttctgtatttttcgcagagacaggtttcaccatgttggccaggctggtctcgaactcttgacttcaggtgaaccatctgcctcagcctcccaaaggctgtttttgagactgggtcttgctcactgcaacttccacccctggggttcaagcagtcctcatgcctcagccaccccagtatctgagattacaggcatgcaccaccatacccggctaatttttgtatttttagtagagacggggtttcaccatgttggccaggctggtctagatttcctgacctcaggtgatccacccacctcggcctcccaaagtgctgggattactggcataagccaccgcacccagccctccaggtgatttcttacatagctctgctatgctaccacctttaacctcccttccttcctcagtgatttccgtgagaccccaccactaccttttgtggcaggcactgtgcaagcctcagagctataacaatgagaaagaacaaagccttcccagactttggggctctgccagtgtagagggcaaggcagaggtaaatcaaagcagtggctcacgcctataatcccaacagtttgggaggccaaagtgggaggattgcttgagcccaggagttcgagaccagcctgggcaacatggggaaaccccatctctacaaaaaatataaacattgggccgggcgcgatggctcacgcctgtaatttcagcactttgggaggccgaggtgggcagatcacaaggtcaggagatcgagactatcctggctaacacgatgaaacgctgactctactaaaaatacaaaaaattagtcgggcatggtggcaggcgcctgtagtcccagctacttgggaggctgaggcaggagaatggtgtgaacctgggaggcggagcttgcagtgagccgagattgcgccactgcactctagcctgggctacacagcgagactctgtctcaaaaaaaaaaaaaaaaattagctggacatgatggtgcacctgtgggcccagctactcaggaggctgaggcaggaggattgcgtgagcccaggagatagacatggttgcagtgatctgagatcgtgccactgcactccagcctgggtttcaaagtaagaccctatctcaaaaaaaaaaaggcagagatataagtaaactagtttgggaagccgaggcaggcagatcatgaggtcaggagttccagaccatcctggccaacatggtgaaaccctgtctctactaaaaatatacaaattagctgggcatggtggcgggtgcctgtagtcccagctactcaggaggctgaagcaggagaatcgttggaacttaggaggtggatgttgcagtgagccgagatcgcgccactgcactccagcctggcgacagagagagactctgtctcaaaaaaaaaagagaaagaaaaaaaaaaaaaaggccaggcacgatggctcatgcctgtaatctttggtacatcgaggtgggcggatcacgtgaggtcgggagtttgagaccagcctgaccaacatgaagaaatcccgtgtctactaaaaatacaaagttagccaggcatggtggtgcatgcctctactcccagctacttggaaggctgaggcaggagaatcgcttgaacctgggaggcagcggttgcggtgagctgagattgcgccattgcactccagcttgggcaacaagagtgaaacttcttctcaaaaaacaaaaacaaacaaacaaacaaaaaacccaagtaaactagttatgaagtggacgttcatcaacttcattgtgccaagacagctaaagggggcacctggtcttgccttggggaggttgggagggcttcctgtaggaggtaacctgggaactccaaccttagaagtgatctccaaaaagccagttaccacctccatgatagctacctccaaaagctggtgtctgactcatccatccatccatccatccatccatccatccatccatccatccacctacccatttattgagcttctatagatgccaggcatggttcaaggaggtgctgggtacaaatcaggtaaaaatctctgccaggatgaagcagagtgagggatggtccctccaaccacaagcaaaataatgacaagataattctggaaggagtaactgctaggaaggaaataaaactgagtgaaggagggagaagtgtcccggtttcaaaacaagatccacaaaaacttagctaatcaaggatgccaccttcttcccgagccatggggaccttatcaccctccagcagacagtgcatagaggaggaactcctcccagtggccctgctggctcagtcgcctgcgcagcagtaatcgagcgcctccagtatgcaccaggcaaccttctagacattaaactgtgtgggggatgggagggaggtttctgtatgcctttgggcacgtcactcctcctcaggccctcaggttcacttctgtaactaaggcttcaggatgggtcattcagcaaccccagagctgccctgcccgtcaagcttgaactctttaaggaaataacatttagagtggactgtgcccccagcagcccccaaggtgagagtgcatagatgggggtgtttatccccatttcgcagatggtcaggatgaagctcagaggagaggcaggagtcgcacaggctgcgcgatactgacccgtgttggggtccagcccagggtcccccgcccccgccccagcccccgccccagcccccgccccagcccccgccccagccccagcagccgggaggcttcggtccctttaagaacgccccgcggggccaagcaggaagggggaggtgccaacgcccgggacggacgtctgcatgagccaacgggtgcggcagtcgcggcagcggcggccaatgggcacggcaggggcggggccaagcggccgaacctggttcccgaggcgcggcggccgcggctgggggcggggaggggggcgcaggaccccaagtgggggtcccggagccagaggcaagtgtcctggggtgctgggggcgccgtgccggccgggccgctgccctggcctaggctggtccgggggctagcgcgccgggggctgcggccgatgggcggggcgaggggccgcgggggtggcgagccgggggggcacgggggtcgggggtgcccgagggggcgcggccgggcgggggtggccagggatgggggtcactgggggcaaaggggatccagtgggggggtcccgatggaggcgtgcagggccaggggcgcccgaggcgtgcgggggtcgggtgccccagactggtggcgtcagacaggcgtgggtcgttgggggcctgggtcgcggcttgactgagggcccggccggggctgtggggcgtcaggagagcgtggggtgttatgggatcggaaaggggggggcgtctggggacactggagtgtttacggcgagacggagcggctgtggggggagctggcccgtgctgggggcggtggtggttggggtggggggtgggaggggaggccgaattgtgcgggcgcggggaattatgggggtgggggctgggagggtctctcaaagtggggctccgagcccgggaggagcaggcaggtgagggttagggaggggatgcggcgggctggtttgatggctgtgccacactcttctgagcttggggcctgggggacggaggggttggttattggttcaggaggtctggggcaaggaagaggctgtagaatgtggtgggacctcgaccactcctggaaaggaggctgctttgagggggtgggaccgaggcctgatgagaggaggatggtctcctggggaaggatttgggccagggtccctgatgttggggttgtgggggatagtgttagattcagagtgtggaaggaaaaaacgcttggggtttctgggtgattacagttggtgcttttggggagggtctcccctttggagaagaggctggaggtgggaggccctggtaaaagattcaatttcccccagtggccctagaggctctaaaaatggcttccctaaggcctcggaggctgtcctctccacaaaaatcccagcacccttcgctcagcttataatcaggcaaagccacagggcctgaagccccaggttcaaatcctcctttggcctttggctttctctgtgaccttgggcaaatgcctttgcccctctggcctgtttcctgttctgcaaaatgttgaggggaatcttccctacttcctggagtatttgtaaacattaaataataattagctctaataatggctaacactatttgagcctgatgccaagggcttgatgcatgggttaatttctcccaacaagctggggttgttgttacacccactgtatagatgaggaaactgaggcctggagcccttgagttacacagaaagtgatcggcagtgtggggaatcagtacagtggagactttgaggggctgcgtaggattctgacccacatctctgccccccacttccagggccaattcctgtccccccagcagcatggcatcgtgtgctgaaccctctgagccctctgccccactgcccgccggggtcccaccgctcgaggacttcgaggtactggatggggttgaggatgcagagggtgaggaggaagaggaggaggaagaggaggaagaggatgacctgagtgagctgccaccgctggaggacatgggacaacccccggcggaggaggctgarcagcctggggccctggcccgagagttccttgctgccatggagcccgagcccgccccagycccggccccagaagagtggctggacattctgggtaaggagcaaaggtggatcagggtgcccttggccctggccctctcgtcccctgagcctcatttccccatctgtgctgtgagggttggaagtcacgtggtcaccaccgtgatcaccagccagaggcaactactggagatgcttcacattgatgtactctatccactgactcacacacatgcacaatgtgctgtgtccccgtttcccagatctgctaacagtggctcagagaggctgagtcacctgcccagagccacacagccagcacgccaggcgctggcagctcctaaccccatcaatgcatctttttttggcatttgtctgacacatgcttgggctctgaaaaatgtgtcctgagtgcacgccagcctgggcaacacagcgagaccccaacttccaaaacaaaaaatgtgttctggggtcaagtggatcagaggaatgttattttgttcagccttctggttggttcacagtagtgatagtattgtaaatgctcagagcaatcctacaagaagaaaactacatgagcccccacatgttccccccaacataccccatcacagcaactgaaaacaagagaaatgttagttttctgtggaagacgtcttgctactagtatagtactgatatctaatataccaaataatgctggtgcccatgcaaataataagatatcattaccactatcaattgtaataacaatactgtagcaatagtttccaatcatattgacactgatggaacagaaatattactaaatatcaccaccactactgataaaaatcttactacttttttttttttttttgagacagagtctgactctgtcacccaggttggaatgcagtggtgcgatctcagttcactgcaacctccgcctcccaggttcaagcgattcttctgcctcagcctcctgagtagctgggactacaggtgcccacctctatgcctggctgatttttgtatttttagtagagacagggtttcaccacattggccaggctggtctcgaactcctgacctcaggtgatccacctgccttggcctcctaaagtgctgagattacaggtgtgagccagcacacctggcccctaatttttgtatttttagtggagacagggtctcaccatgttgaccaggctggtctcaaactcctaacctcaagtgatcctcctgcctcagccttccaaagtgctggggttacaggtgtgagccaccatgcctggtcattttttattttttgtagagatggggtctcactatgttgcccaggctggtctcaaactcctgggtttaaacagtcctctcatttcagcctcccaaagttctgggattacaggcatgagccaccatgtgtgtcctttgcttaacttmtaaattcatcccacttggtgctgtggtggggacactgtgtcacaggggctctgctaaccaaaggtcccatgagcacctcatttcatggctgggtaaaccgaggcccaaacatctcagggcaaggatttcagcctgagggctgtttgtcctctctgagctttggttttctttctttttgaggagggtggggagactgggttcttgccattttgcccagacgctgggctgaacttgtgattctcccacattggcctctcaaatagatggaaactcggcaagtctcagttttcttaaaaaaaaaaaacaaaaaaacmaaaaaaccagaccaaccattgttcactgagctggtctctagcaccagcactgtcaccctgaagtctgtcccatcctgcccagtgtcctgcacgtggggttccccactctrgtggcagagtggccattggaagtttggtttgtgccccagtgttgggccagccccctctggacagctagtgggcagagctgagggtaggagtgggggctcaggggagcgggtgcctgtttgagctgccaggtgacaggctgcatgtccctggaccctggcagggaacgggctgttgaggaagaagacgctggtcccagggccgccaggttcgagccgcccggtcaagggccaggtggtcaccgtacatctgcagacgtcgctggagaatggcacacgggtgcaggaggagccggagctggtgttcactctgggtgactgtgacgtcatccaggtgcgggctggggyggracagggcaggggygaggggcgtgccttgctgggtctgagtctgcctgacagctggctatccccacrcaccccaggccctggatctcagtgtcccactcatggacgtgggggagacggccatggtcactgctgactccaagtactgctacggcccccaaggcaggtgagagtcagccacccttaggtctctgcaggtctcaggagggggatgggtggagtgggtgtacccctcggctcaccccatctacttgcccattttatagacaagaaactgaggctgggtgaggtggctcacacctgaaatcccagcactttgggaggttgaggtaggaggattgcttgagacctggagttccagaccagcctaagcaatatagaccgcatctctatacaaaaaaatttaaaaattagctgggtgtgggccgggcgtggtggcttacgcctgtaatcccagcactttgggaggccaaggcgggtggatcatgaggtcaggagatcaaggccatcctggctagcacggtgaaaccccgtctctactaaaaatacaaaaaattagccaggcgtggtggtgggtgcctgtagtcccagctactctggaggttgaggcaggaaaatggcgtgaacccgggaggcggagcttgcagtgaaccgagattgcaccactgcactccagcctgggcaagagagcaagactgtctcaaaaaaaaaaaaaaaaaaaaaaaaaagctgggtgtggtgcacacctgtagtcccagctactgaggaggctcaggcaggaggatcacttgagcccacgtttttgaggctgcagtgagccaagattgcaccactgcactccagcccgggcaacagagtgagaacctgtctcttaataaaaaggaggaaaaccgaggcttagggaggggaactcgttcgtcaagtcccgcagctccaaggcggcaagtcacttcccctgcactttactgaggagggaatgatggagggcagaggggagayagatcgggggcttgagccaagctcactccttcctagccagcccagcgggtttaggggtcaccaggtctgagtgctgcccctgcctgctcccacccaactagcaggagcccatacatccccccgcacgcggccctgtgcctggaggtgaccctgaagacggctgtggacgggcctgayctgsagatgctcacggggcaggagcgcgtggccctggccaaccggaagcgggagtgcggcaacgcccactaccagcgggcggacttcgtcctggccgccaactcctacgacctcgccatcaaggctatcacctccagcgccaaaggtgaccgcctgggtcagatctccaccatctcccctgcaaaggtgtccactccgtgccagaaacttccagccccagagagcctcagactcagaatattctagaatagcccagaatatgggtagatccccaactgcccctaagctagggcctgttacagactcgtggtatatcccagaccagtggagtgttgtagaatgcaagtggatatggggatggggtgaccatagacagggccagttcacatgtaccacaggctaggccctcgcttgcttaagtctccatcttgtagcttcctcaggagagccccaggaaagcgtggcccttggtccggggttaaaattggggaaactgaggccagagaggcagcctccgcagaggggtgggtgccggggtgtctggtggcatggtgacggctgccgtggcgggcactgtctcccaatagtggacatgacgttcgaggaggaggcacagctcctgcagttgaaggtgaagtgtctgaacaacctggcggcctcgcagctgaagctcgaccactaccgcgcagccctgcgctcctgcagccttgtgctggagcaccagccagacaacatcaaggctctcttccgcaagggcaaggtaggccacaccggggtgccaggccgggtcactcagcctggggtatacggggtggtccccaaccctgcatttgagaaaggcataggtatataagccagctgagctctgtggggtgcaggtggagaaactgaggcccagacgggtgcaggagtgtggcctggtcacaacaattcattggctgaggccagaatttgatcctcgagtcttgggtccccaacctttggcccagtgttttttgtttgtttgtttgtttgtttcttgagacagagtctcactctgtcacccaggctggagtgcagtggtgtgatctcagctcaccaccgcaacctcctcctcctgggttcaagcgattgtcctgcctcaacctcccaagtagctgggactacaggtgcgagccaccayacccagttaatttttgtatttttagtagagatgtggttagccatattggccaggctggtctcgaactcctgacctcaagtgatctgcccgcctcagtctccccatgtgctgagattacaggcctgagccaccgtgcccggcttggcccagtgttgaaacctcctcccatagaacctccatgggtcccagttttcctcagagtaaagtggaatcctagtcacagcccttggggccttgagttgtctggtcttccccctcctgctatcacttctcccacctcactttctgcttctctccatcccacgtggcattctccctttctgctgtctagccaggctctctccacctcagggcctttgcgtaggcattgccgactgtctgagatgttcctgacaggcagcacgtggaggtgacatgcctcttgtccatctaccttactcaaaggtggagatttggtctgtcttgctcactgccggatctccagccttgcaaacagggccaggtacatagtaggtgctcagtaaaagtcctggcagaggccaggcacaatggctcattcctgtaatcccagcacttgggattacaggaggccaaggcaggaggatcgcatgagcccagacatttgcgacgagcccaggcaacatagggagacccccttctctacccaaaatatacaaaaattagctgggtgtgggggcgcgggcctgtcgtcccagttgctcaggaggctgaggatggcttgagccccgaaggtcaaggctgcagtgagccttgatcacaccactgcactccagccttggcagcagagcaagaccctgtgtcaaaaacaaaacacgagaacagaaaaaaaagttctggcagaacataggggtgaatctggcttgcacagacttgaccttcattctcacccccttttctgttcatcctcacagcctcacccctaggtggggctttcaggaccttttagcagttaacgaaggaaactgaggcacagatactggctcacctgctgtgtttctgaaaagcctgaggtggggctccctccagctgggatttattaaggacatactgtgtgcggagttctgcagagaaatatgaagagggagaagatgcagttcctgtttttgaaggctttgttctcaacctgggggtagtatcctcctgggggcagcaggagtggctgcttgtgtagcttcatacaagtttggacctgctggttgaaggtgatagaaacccactcaaacaggttcaagcagaaaggagggatcgatagctcatggaactgccaagtttggattagctggcttcaggcatagctggatccaggcactcacaatattgtggggatgctgtttctctgctctgaccttccctcctgggccggctcctctctcagggtgaccatgatgctcccccctcccccctggaaagttacagatttccatcttctaccccctccttttttttttttttttgagacagagtcttgctctgtcacccaggctggagtgcagtggcacgatcttggctcactgcaacctctgcctcctgggttcaagcgagcacatccagcctttttttgtatttttagtatagacggggtttcaccatgttggccaggctggtcttgaactcctgacctcaagtgatccacctgccttgacctcccaaagtgctgggattataggcgtgagccacttcgcccagctccatcttctccccttagcaacccatctcccatcagcaccagcatagtgcaggctggatctcattgactcatttgggtcatgtgcctggtcctgaatcattcactatggccaaagctttggaaacatcagggccaggtgtggtgcctcacgcctgtaatctcagcacttcaggaggccaaggtaggaggatcatttgagcccaggaattcaagaccagtcttggcagcatagtgagaccccattgctacaaaaatttaaaaaataattaagggctgggcgtggtggctcacgcctataatcccagcactttgggagaccgaggcaggtggattggttgagcccaggagttcgaaaccatcctggggaacatggccctgtctctaaaataaaataaataaataagtaggcctggagcggtggctcatgcctgtaataccagcactttgggaggctgaggcaggtggatcacttgaggtcaggagtttgagaccagcctggccaacatggtaaaaccctgtctctactaaaaatacaaaaattagccggtggtggtaggtgcctgtaatcccagttactcgggaggctgaggcaggagaatggcgtgaacccgggaggcagagcttgcattgagccaagatcgtgccactgcactccagcctgggcgagagtgagactccatctcaaaataataataataacaatagtaataataattttataaataaatacataaataaataattcgttggacatggtagtacacgcctgtagtcccagctcctcgggaggctgaggctggaggattgtgtgagcctaggagtttgaggctgcagtgagctatgatcatgccattgcactccagcctgggtgaccgatcaagaccctgtctctaaaggaaagagaaaaaaaaaacaacaacctctggaagcatccattcggcctctcgccagtggaggtggtgagggaggaggcagcgaggtgggtgcctagatctgcagctgagacaggaaggaggagcatgttgcggggaccaatgccaagctaagtgtgcactgatggagtttgagggctaggagagcagtttgggagtggctggaacccagggatgttgccagagctccatttggcacttgtatgagtagccaggagcctggctgttttttttgtttgtttgtttgtttttgagacggagtctcgctctgtcgcccaggctggactgcagtggcgtgatctcggctcactgcaagtgctgcctcctgggttcacgccattctcctgcctcagcctcccgagtagctgggactacaggcgcccgccaccatgcccggctaatttttttgtattttttagtagagacggagtttcaccatgttagccaggatgrtcttgacgtcctgacctcttgatccgcctgccttgacctcccaaagtgctgggattacaggtgtgagccaccgcgcccagcctttttttttttttttgagatggagtctcactctgtcgcccaggctggagtgcagtggcacgatctcggctcactgcaagctccgcctcccgggttcacgccattctcctgcctcagcctcccgagtagctgggactatcaggcgcccgccacctcgcccagctaattttttttgtatttttagtagatacagggtttcaccgtcttagccaggatggtcttgatctcctgaccttgtgatccgcccgcctcggcctcccaaagtgctgggattacaggcatgagccactgcgcccgacccttttttttttttctttttttaagacagggttgcactctgtcacccagactggggtgcagtggtgtgatctcggctcactgcaacttctgccccctggttcaagcaatcctcccacctcagcctcctgagtagctaggactacaggtgcatgccaccacgcctggctaatttttgtattttttggtagagacggggtttctccatgttggccaggctgtttttattttattttattttttgagatggagtcttgctctgttgctcaagctggagtgcagtgacaccatcttggctcactgcaacctcctgggctggatttcttgaaggacaggcccaggtatgggtccagagtgatgccacccccttccccttacaggtgctggcycagcagggggagtacagtgaggccatccccatcctgagggcagccctgaagctggaaccttccaacaaggtgagcaggacaggggtgccctgggacttgctcggctgggaagtccctcctgcggtctgccccaggtctttcttgctgtggctctctgttgtgttcccacctgggcagtggcacggagtaggtacctgaagggtcctggtcagcttgtgaagaccctcatgacggccacacaggcagtctgggctctcactcctccagcagctgagggcactgccagcctgctccatgccagtgtccttggccttccttccagaaccttttgtctcctggctaccttgtgctctgcgccatcaattggctccctaggagggatggggtcagcagccctgactttgctaagcccagaaaggggcagatgggacccctgtgtcccaacagtcccaccacccaaacagcctagggtcccagtaaggcagagcgccagtgatgacaggttggccgctgcgtgttctcagcttcccctgccttctgcagacgatccacgcagagctctcaaagctggtgaagaagcatgcggcgcagcggagcacggagaccgccttgtaccggaaaatgctgggcaaccccagccggctgcctgctaagtgccctggcaagggtgcctgggtgagctggggcacagaatgggcaggggctgtgtgcagggcacgcctagcagagggattttattttgcatacatggatgtcctcggagactgggccgtcctgggcgatgcaggggacgtggagagagcccagccctgtgtgatcatgagtggagtcgaaggtggaactcaagctggagggctgggggtggactgtggagcctcttccagggcacgaggggcggtgtcctggaggaggggccatttgatttgggttttgctgcatgagtaggagtttgccaggaagtgggaaatacatagtcaggcaatgatttgttgggaggtctgtttgggctgtgctggcagctgaggccccagaggccagtcttgacctccctccacccttctctcccctcctttttatccacagtccatcccatggaagtggctgtttggggcractgctgttgccttggggggtgtggcactctctgtggtcatcgctgccaggaactgaccacctaggtggctgccaccccctctgcacaccatggaccctgccctgcgctccccaactcccccaggctccctgtccactgccctccctggtytggccccctcctccgggttaggggagcaaggattgggggtcgtgcagcccagccagcaggagggactgaggccctctaggaggaaagcccagagggagggggccctcattccttcagacccagttttcccccaccctccttaccccgctgggstaggtctccgcyagggctggcctcagtttytcctcaacaggcctgggggcagcccttcccctgcctagtccccgcctgagtgccagccccccaccccgcctgccgccccctgtccaggttccctccccgccacagtgaaataaagcatcccmccctgcagtttccacggactcctgagctttcttctcccgctgtctggggctgggccagagacagcctgtgatgcatctggagtcacacagcatggtggatgtggttgagccagctggagctgggggtctcctctccgggcacaacatactcactttacagaggagaaactgaggcatagagaagtggggtgatgtagcaggggcaagtgggttgagaggtctgactcagctggactctgggggtgttactgcccagctccactcgttaccccagcgttcactgtttactcacctgaaatccaggaccccagtgggccctaccttgaggctgctgcatgggttctgtggcatcattgctttacctagtggatgtactgaattcaaaagagacagatggtaggaggatgacttgagcacaggaatttgaggctttagtgagctatgattgcaccactgcactccagcctaggctggaagacctcaccagagtgaggtctctctttttattatttatttatttatttatttatttttgagacggagtctcactctgtcaccaggctgaagtacagtggcacgatctctgctcactgcaacctccacttcccgggttcaagcaattcttctgtctcagcctcccgagtagctgggactacaggcgcacgccaccatgcgcagctaatttttgtatttttagtagagacagggtttcaccatgttggtcaggatggtcttgatctcttgaccttgtgatctgcctgcctaggcctcccaaagtgctgggattacaggtgtgagtcaccgtgcccggctcttttttttttttttttttttgagacagagtcttgctctgtggccccggctggagtgcagtggcgtgatcttggctcactgcaagctccgcctcccgggttcatgccattctcctgcctcagcctcccgagtagctgagactacaggcgcctgccaccacgcctggctaattttttgtatttttggtagagacggggtttcaccgtgttagccaggatggtctggatctcctgacctcgtgatccacctgccttggcctcccaaagtgctgggattacaggcgtgagccaccgcgcccggcctttttttttttttaataaagaggtggggtgtagtgtcatggcctgtaatttcagctctttggaagccagggtgggagggtcgcttgagcccagcctggtcaacacagtgagattccatctatgtttaaaaaaaaagtgcaccaggcacagtggttcccacctgtaatcccagcactttgggaggccgaggtgggtggatcacttgagctcaggagttccagaccagcctgcccaacatagtgaaaccccagctctacttaaaatacaaaaattagctgggtgtagtggcacatgcctgtaatcccagctactcgggaggcagaggttgcagtgaaccgagatcatgggactacactgcagcctgggcaacacagggagacttcatctcaaaacaagagacagatggggtccaggggagaggatgtgaatgtctggatgcagcctgtgagaaggcacagctggaggcccaggaagacctctcccaggggatgtgtgcgctgatatttcagcgatggcaagggtctgcccatgcaggaagccgacagccccaggtctgggcaacagcacgcccagtacaaagaccctggggccaggtctagcctggtgcattccagatggatgaggctgggtagcctgcagagccataccctgcagggctttaggggccatgaggaagggccagggttgatgctgggaggttccctgatcccatctggctctcccaactctggactctgggagcttctcctatgatgccgctcaccagtgcagccaggatgggcggagccagcatcggggcctctgtcagcccagcacccacaccctttcttcctgctgttccatcttgcccccaagaataagggcatccttgaaaatagaccactacagtcatctcacctgcatctatccccttacagcccaggagggaaagctgcctgccacagccacccaggagaagttggtgcagaagggaggttggagggcctcccaaaggcctgggactccaatctacacctccacctcacccactcacccgcttcttccaggcccttgttctctgggtcacctggatgacttgaggctgagtgtggcttgaggctgtgctctctttccagtggttagccccaggttcaggcaattctcctgcctcaacctcccaagtagctgggattacaggcatgtgccaccacacccagctaattttttttttttttttttgcatgccagctctgtcacccaggctggagtgcagtggcatgatctcagctcactgcaacctctgacctctgcctcccgggttcaagcgattctcctgcctcagcttcccaagtagctgggattacaggtgcacgccaccacacctggccaattttttttattatttatttattttcgagatggggtcttgctctgtcacccaggctggagtgcagtggcccaatcttagcttactgcagcctccgcctccagggttcaagcagttctcccacctcagcctctcaagtagcttgggattacaggggcacgcaaccaagcttgactaatttttttttttttttttttgagacagtctcgctctgtaacccaggttggagtgcagtggcatgatcttgttcactgctacctctgcctcccagatcacggttcaagcgattctcctgcctcgtctcccgagtagctgagattacaggcacacgccaccatgcccagataatttttgtatttttagtagagacggggtttcaccatgttggccacgctgatcttgaactcctgacctcatgatccacccgcctcggcctcccaaagtgctgggattacagacatgagccacctcgcctggcctttttttttttgagatggagtcttgctctgtcatccaggcaggagtgcagtggtgcatcttggctcactgcaacctccgcctccagaatttaagggattcacctgcctcatcctcctgagtagctgggattacaggtgcgtgccaccacgcccagctaattttgtatttttagtagagacggagtttcaccacattggtgattaactttctttttctctctctctgctacccaggtcggagtgcagtgtcaccatctcagctcactgcaaactccacctcccgggtgcaagggattcttgtgcctcagaatccctatagcaagcctgtaatcccggcactttgggaggccaaggtgggtggatcacctgaggtcaggagttcgagaacagtctggccaacatggtgaaaccccatctctactaaaaatgcaaaaatcagccgggtatggtggcataagcctgtaatcccagctgctcaggaggctgaagcagaagaataggcttgaacccaggaggcggaggttgcagtgacctaaaatcgcgccatcgcagtccagcctgggcaacaagagtgaaactcatcgccaaaaaatatatatatagaacctcttgacttttcgtaatgcaaagtcaacttgtttcctgttcatgtagcacacaaatccttttttttccccccgagacggagtattgctctgttgcccaggctggaatgcagtggcctgatctcggctcactgcaacctctgcctcctgggttcagcaattctcctgcctcagcctccaaagtagctgggattacaggtgagtgccactacgtccagccaatttttttgtatttttggtagaggtggggtttcaccttgttggccaggctggtctcgaactcctggcctcgtaatccgcctgccttggccttccaaagtgctgtgattacaggcgtgagccaccacacctggccagcatacaaatcttaagatacagaatttcttcaatccaggagctcctaagatattttagtcttgtttttttcttagagacacggtcttgctgtgtcacccaggctggagtacagtggcaccattgcagctctctgcagcattgacccaccccactgcactcaagtgattctcccactgcagcctcccaagtagcaggggctacaggcacgtgccactgctctcagccaatattttagtcttgaattgcagcctagacctggctaaatgtgagactgatagttaatatttcactcacttgtttgatacactttttttttttttgagacggagcctcactctgtcgcccaggctgcagtgcagtggggcgatctcggctcactgcaacctctgcctcctgggttcaagtaattctcctacctcagcctccggagtagctgggactgcaggcacgtgccaccacacccggctaatttttgtatttttattagagacagggtttcaccatgctgaccaggctggtcttgaactcctgacttcaagtcattcccccacctctgcctccctaagtgctgggattataggtatgagccactactcctggctgcttgtttgataaacttttaaaaaagctttattaaaggaaggaaatgtccttcctggccaagcaaactgccggtgccaatgtctggagttgaaatagccccgctggccaggcgcggtggctcaagcctgtaatcccagcactttgggaggccaaggcgggcagatcacgaggtcaggagattgagaccattctggccaacgtggtgtctctactaaaaatacaaaaaaattagccgggcgtggtggcacacgcctgtagtcctagctacatgggaagctgaggcaggagaatggcgtgaacccaggaggtggagcttgcagtgagctgagatcgcgccactgcactccaacctgggtgacagagcaagactccatctcaaaaaaagaaaaaagaaataggcccggagctgcctagaacatgcaagttatgacatggtccggggacagggaggagagaggccccgaatggccagactaggagtgtgaaattgaatgtggttattcactcggccacttcatcctcaaaggtctgagctggttgtgggtggtgagctggagcatccagcacgtgtgacgctgcagttgtgttgaaggcatgggatgcctttaatgggtggtgaagggtatcccttgtggatggcatagctgtgcaaggtatgccagctggaccatgtgtggtacctttggagaacgacggggatggctttgtctttcataccaaagcatttactaacacctcccatatacctggccttgagcagtgactcaggagggccttacccgacttgccatgggctgtgaattggaagtgagcactgcggaaggaattttgtatgtgtacgcgagctcacaattctggaagacttgaacagggcgagctacacatgtccttgtctcatgtcattgtcacagaagaatcaggtagatgctgttacactccctgttttctggatgagcaaactgaggaacagagatggcaagatgtgtccaagaccacacacggggtaaggggcagggtggggtcactgcttccatcagagagctcaccaggtggactatgtgtccggggggcaccccagggtgatcaactcacttgcaatattgtgggtgacctagttcctttttttttttttttgagatggagtctcgctgtgtcacccaggctggagtgcagtggcgcgatctcggctcactgcaaactccgcctcccaggttcacgccattctcctgcctcagcctccggagtagctgggcctacaggcgcctgccacaatgcctggctaatttttttgtatttttagtagagacggggtttcactgtgttagccaggatggtttcgatctcctgacctcaagtgatccacccgcctcggcctcccaaagtgctgagattacaggcgtgagccaccatgcctggccatgggtaacctagttcttaaaaatttctgcagacaaagccggacacggtggctcacgcctgta

SEQ ID NO: 93840 - DNA, 13196 bp, Homo sapiens
tctcctgcctcagcctccctagtagctgggaatacaggcgcgtgccactatgcccagctaatttttttgtatttttagtagagacgaggtttcaccatgttggccaggctggtctcaaactcctgacctcaggtgattcgcccacctcagcctcccaaagtgctgggattacaggcatgggccactatgccccgcatatattggtaaatttaaattaagacagtgaattagtgtacttcagtgggaaccagctaagcacctttgtctattgggagcagcagagacagtttaatttttaagaaacagctccttctctgagttcaaacatagcttcctactgagaaatcatttgggaaggaggagatacacagcggaagatttcaaataagccacatgaacatcttccagcttcttgatgctgaccagcttaaagtcgattttatattttcaatgtcacagttataattagttaatatatgtacttaattagttatatgttattaaaattattcaatacactctgaacatttcttttctataaattatatcacaaatttttttccaaatattcatgattgaccatcatctcttagtgacttcagatttagttcaaaaattggctgattagtaaaacaataaaattatgttgttctgattactaaaaatatctgaaaacataacaaccatttgaaaattgccttctacaagtatgttttgaaaactttaaatttttaataaagcaagatatgtttcatagaaaaacttcaatctgactggccatttaaattttgatgtcggccccctgcaggggctcacgttcgtaatcccagcacattgggagaccgaggcaggtggattacctgaactcaggagctcaagaccagcctggacaacatggcaaaactctgtttctacaaaaaaatataaaaagtagttggggccaggcacggtggctcacacctgtaatcccaacactttgggaggccaaggtgggtggatcacctgaggtcaggagttcgagaccagcctggccaacgtggtgaaacgccgtctctactaaaaataaaaaaaattagccgagtgtggtggcgggcacctgtaatcccagctactcgggaggctgaggcaggagaatcgcttgagcccgggaggtggaggttgcagtgagccgagattgtgccattgcactccagcctgggtgacagagtgagactcgtctcaaaaaaataaaataaaataaaataaaataaaataaaataaaataaaataaaataaattagttgggcgtggtggttcacgctcccagctactgggaaagctgaggtgggaagatcacttgagcctgggaggttgaggctacagtaagccctttttgagccactgcactccagcctggatggcaaagcaagaacctgtctccaaataagtaaataaataaatcttggccgggcacggtggctcacgcctgtaatcccaacactttgggaggctgaggcaggcagatcacctgaggtcagcagttcgagactagcctggccaacatggtgaaacttcgtctctactaaaaatacagaaattagctgggcgtggtggcgggcacttgtaatcccagctacttgggagcctgaggcaggagaatcacttgaacccgggggaggttgcagtgagcggagatcgttccagtgcactccagcctgggcaacaaagcaaaacttcatctcaaaaaaaaaaaaaaaaaaaaaaagctgggcacagtgactcacgccaataatcttagcactttaggaggtcaaggtgggcggatcacttgmggtcaggggatcgagaccaacctggccaacatggtgaaaccccatctctactaaaaatacaaaaattagctgggcatggtggtgtgtgcctgtaatcccagctactggtgaggctgaggcatgaggatagcttgaactgggaggtggaggttgcagtgagccaagatcatgcaactgcactccagcctgggcaacaaagtgagactccatctcaaataaataaataaataaataaatattgagctaatcgatattaacatctacttcttccatgtggacagcagggacaagagaggtataagagagctacattctaagctgggcgctgtggctcacacctgtaatcctggcactttgggaggctcaggtgggcggattgcttgagcccaggagttcaagaccagcctggacaacatagactccatcgctacaaaaaaaaaaaaaaaaaaaaaaatacggttgggggcggtggctcacgcctgtaatcccagcactttgggaggctgaggcgggcagatcacgaggtcaggagatggagaccatcctggctaacacagtgaaaccccgtctctactgaaaatacaaaaaaaatcacccgggcatggtggtgggtgcctgtagtcccagctactcaagcaggagaatggcgtgaatccgggaggtggagcttgcagtcaaccgagaccgcgccactgcactccagcctgggcgacacagtgagactccgtctcaaaaaataaaaaaataaaaacaaaaattagcagggtgcagtggtgcacgcctgtaatcccagctactgaggaggctgaggcaaggaggattgcttgagtccaggaggcggaggttgcagtgagccaagatcacgccactggactccagcctgggtgacagtgtgagactcttaaaaaagaaaaaaaaaaaagagagagcaccacattctaatctcccatagcgtgaagttaataaacaaatgtttcaactgaaaaaattaacgaagagcagcacaaatgtgttatttagaaatatggagacaaacagagaagaaacagctgtgagatttgaaacagactgtctctagacaggagtcagaggccaaagaaaagtgaggcaggagaatgctgttttgtttttaaggacacacctcgcaaaaatattcaacttttaaaactacgtaccggacaaatggagcaacagagaccaggttcaccctaacacctaacataaccccctccccccaccagaaagggagaaaatacgtgagacgcatggttttcaatgaggggtagcgcctgctgtgcacaggaaagcgagcgagtgggtctgcaccagctcggtgcctcaagggcttagggggcctgccagaacccgaggtgcagaaatgggggccgagagtctggggagatcgccgtctagctggccggacagagtagcagagaagagagggctgtacacagagaactccagaaatgggtggcaggtttcctgggtagtcagcagagtcctggttggcccgtgtgtgtgtgtggacacgatctgaggccagggtgagaatcatctgagaaggccagagggaaccatgcctgtgtttacagcaagcttgaaatagtacctgtttctaccagtcagatgggaaaaattcatattcatggggcacgaggtagaacagtctgtcaggtctcgattcagtattgggaataactamacctagactaaatgcagctctctgattctctaataaatcttaaaagcaacacaccaaaagatcaaactgtctccaagttaactgtatccctgaaaaaagctcaagaataattacaggattacaaaagtttctagcacccaacgaggtacgaatcccaatgtctggcattcggtccgagggccaggcatgaaaagcagcaggaaaatatgatccatgatcggagaggccgggatcaactgacggaaacaaatccggacctaacacagacaccagaatccacagacaaggaccttacaacaaatactgtcattgtgctctgtatgtcccaaaaattaagcagagatgtagatgagtttttaaagacccaaaatcaagcttctagggataaaaactatactatctgagaagaaaaatacactcaatgggattaacagcagattaggcactgcctgagaaaccattagtgaacttgaacggctagcaatagaaagtatacacaatggccaggcacagtagcttatgcctgtaattcagccttttgagaggctaaggcaggaggattgaggccaggagtttgagaccagcctgggcaacaaagtgagaccccgcccctacaaataaaaagaaaagaaatgagccgggcgtggtggcactgccgtcccagccccagtccaggcagtccacaggcaggcccggcactccacctcccagactacaggtgcagcctgcagtcccaactacttgggaggctgaggcaggaggattgctggaggccaggaattcaagaccagtgtgggcaacatggcaggactccatgtccacaaaaaataaaattaggccaattatggtggctcacgcctttaaccccagcactttgggaggctgaggcgggcagatcatgacgtcaagagatggagaccatcctggccaacatggtgaaaccctatctctactaaaaatacaaaaatcagctgagcatggtgatgcgtgcctgtagccctagctactcaggaggctgaggcaggagaatcgcttgaacctgggaggcggaggttgcagtgagccgagatcacgccactgcactccagcctggcaacagagtgagacttcgtctcaaaaataaataaataaataaaaaacaaaataaaattagctgggcgtggtggcacatgcctgtagtcccagctactcaggaggcggaggtgggaggattgcttgagcccaaggtgttgaggctgcactgagccgtgaatgtaccactgtactccagcctgggcaacagagcaagatgttgtctctaggagagaaaaaacaaaacaaaacaaaaaaaacgccaaagtggctatgctaatatcaaagcagacttcaaagcacagaatttcccagggataaaatcatttcataataataagagtcaactcatcaagtggacacaagaattctaaattatatagatatttaataatacagctttgaaatacatgaagcaaaaactaatagaactgcagagagacagagaaacttacaattattacagttagagatttcaatatccctctcagtaaatgacagaacaagtaaacagaaaaacagtaaagatatagaaaaactgaataacacaatttaccgactcgacctaattgacatttgtaagactctgcccaacaacagaatacacattcttttcaagtacacacagaatttaccaagagagaccataatctggacataaaataagactcaaggctgggcaaggtgggtcactcctgtaatcccagcactttgggaggccaaggcaggcagatcatccgaggtcaggagtttgacaccagcctggctaacacggcaaaaccctgtctttactaaaaatacaaaaattagccaggcatggtggcaggcacctgtagtcctagctacttgggaggctgagataggagaatcgcttgaacctgggaggtggagattgcagtgagccaagatcatgccactgcactccagcctgggtgaaagagtgagtctctgtctcaaaaaaaaaaaataaaataaaataaaaataaataaataaaataaaacaaaataagacaatacatttaacaggattcaagtcatacaaagtatgttgtttgatcatactagaattaaattagatatcaagaacaagatctctagaaaatacccacatttggctggcacgatggctcatgtctgtaattccagcactttgggaggctgaggcacgcagatcacttgagggcaggagttcaagaccagcctggccaacatggcaaaaccgcgtctctactaaaaatataaaaaattagccaggcatggtggcacacaccaatagtcccagctactcaggaggctgatgtgggaggatcgcttgaacccgggaggcggaggctgcagtgagccgagattgtgccactgcactctagcctgggtgacagagcaagactctgtctcaaaaaaaaaaagaaaaagagagaccagaacccaagatrgctgcgctgttgctgagacacgttggtcgtcattgcctccgagcccactttagccctcagctctgtatcagaaattggtctcttcccatggcgatgtccatctgccaccgtggcactggtattgctttgagtgcaggggtctctctttttggcatgtyggccgtgttactccctgggaactttgagtcttatttggaacttgtgaagtccctgtgtctggggccagcactgatccacacagctaagtttgcactcgtcttccctctcatgtatcatacctggaatgggatcygacacttgatgtgggacctaggaaaaggcctgaagattccccagctataccagtctggagtggttgtcctggttcttactgtgttgtcctctatggggctggcagccatgtgaagaaaggaggctcccagcatcatcttcctacacattattacattcacccatctttctgtttgtcattcttatctccagcctgggaaaagttctccttatttgtttagatccttttgtattttcagatctccttggagcagtagagtacctggtagaccttaatagtggaaaagggtctagttttccccttgtttctaaagatgaggtggctgcaaaaactccccttttttgcccacagcttgcctactctcggcctagaagcagttattctctctccatattgggctttgatttgtgctgagggtcagcttttggctccttcttcctgagacagtggaaacaatgccagctctgtggcttctgccctggggacgggccgggtggggggtgggttggtgaggctttgggtgccactacctgtgggttgctggcttaaaggacaattctcttcattggtgagagcccaggccattaacacctacacagtgttattgaaagaagagaggtgggggtggaggggaattagtctgtcccagctagagggagataaagagggctagttagttcttggagcagctgcttttgaggagaaaatatatagctttggacacgaggaagatccagaaaattatcattgaacatattaatggttatttctttttcttggatttccagaaaagcctcttaattttatgctttctcatcgaagtaatgtaccctttttttctgaaactgaattaaatactcattttatctttgaaaaaaaaaaaaagaaaaagaaaaagaaaaaaagagaaaatccccacatttaaaaactaaacacatttctaaataacagaatgttaatgatgaaattgaaagggaaataagaaagtattatgaattgaatatgaatgagaatataacatatccaaatttgctggatacttttaaagcagtagctaagggcagattcataatgctacatgcctatgttagaaaaaaagatctcaagtcaatgaactcagcttccaccttaagaaacgagaaaaaaatatacaaaacccgaagtaagtagaagaaaataaagataaaaagcataaatcaatagaatacaaaacataagagaaaatcaataaaaccaaaagttgctcctttgagatcaataagattgatgaaactctcaaattctacagacactcaaaggataacaaggaaacatatatgtatgttatataatatatatatatgctataattccagcactttgggaggctgaggcaggcagatcacttgagggcaggagttcgagaccagcctggccaacatggcaaaatcctgtctctactaaaaatataaaaaattaaattaaaaaagtaaattaaaaaagtaaaaattaaataaaaataaaaattaaataaataaataaaaactatatatagtttcgttttgttttgttttgagacagagtctcattctgtcggcccagctggagtgcccgtggcatgatctcagctcactgcaaccttcgcctcccgggttcaagtgattctcctgcctcagcctcacgagtggctgggactacaggtgcgtgccaccacgcctagataatctttgtattttttcagtagagacaaggtttcaccatattggccaggctggtctccaactcctgacctcgtgatccgcccgcctcagcttcccaaagttttgggattatgggcgtgagccacagcacctggcatttttttttttttttatggggtctcactctgtcacccaggctagagtgcactggtgccatctcggcttactgcaacctccacctcccgggctcaggtagctgggaccacaggtgcaggagcgccaccacatccagctaattttttgtatttttggtagagactgggttttatcatgttgcgcaggctggtcttgaactcccaagcgcaagcgatcggcttgcctcgttctcccaaggtgttgggattacaagtgtgagccactgcacccagctggaaatatattttttaaatccatctgataatttctaataattggggtgtttagaatatttatatttctatagactaataaattcaagaacttaaatgaaattaaattccttgaagcacataatctaccaaagtctactcaagaagggtgcttgaataaccctgtatctctctattaaagaaactgaacttacagtttaagacttttccattaaaaaaaaaaaatcaggcccagatgacttcactggtgaattcaactgaacatctaaggaagaagtaccaagtctacataaactgctgcagaaaatttaagaacggaacacacttcccaacttattccataaggccagggttactcaggtatcaaaatcagagatgtaacaatagaagaaaactaaagaaaaatatctctcgtgaataccgatacaacaattctaaacaaagtaaatcagatcaaagggatatagcaaatcaaatccaacaatatgtaaaaagaataatacatcatgacgtagacttatcccagagatcccagattggtttagcgctcaaaaaccaatcaacgtggctgagcgcaatgtaatcccagcactttgggaggcccaggcgggtggaccacttgaggtcaggagttcgagaccagcctggccaacatggcaaaaccctgtctctactaaacaaacacacacacacacacacacacacacacacacaattttagccgggtgtggtgtcatacacctgtaatcccagctactctgaggctgaggcacgagaatcacttgaacccgggaggcggaggttgcagtgagcctagaaggcaccactgcactccagcctgggtcatgcaatgagactgtctcaaaaaaaaaaatcaatcaatgtaactcaccatattaactaacaaagaaaaccatatgatcatcagatcatcagcaagcacagaaaatgcatttgacaaaactcaccatccatttctgatgaaagccctcaccaactaggaacagaaataaacttctttacttctgataaaaagactctaagaaaaccctacagttaacatgacatttaatggtgaaagtctgaacgctttctccctgagatcaggaacacgacaaagataacgagccaggctggagatgttttctaatgtattagccatttgttttccttctatagtgaaccatctatttttctccaatgcctgctttgctaatgaagtactttattccttaatatgtaaaaaaattcaataaatagtaaagatagtaaccctttgtcaatcctatgagttgcaaatattttatcctagtttacacacttttaattttttgcagtggggaatagcggacacttgctgtgtccccaggctggagggcagtggtgccatcacagctgactgcagcctcaacctcccaggctcaagtaatccccccacctcatcctcccaagtagctgagactacaggtgtgagccaccacacctggctaagtttttaaaaaattattgcagagatggggtcttcctgtgttacccaggctggtctcgtcctcctgcactcaaagcagttcttccacctcagcctcctaaagtgcagggattacaggtgtgaggtaccgtacctggtttcctatttttaatatgtaattttaaaatttcaatgtaatcaaatattcattgtgaattattccaatctatttgtgcagcctcttcctcttgatttttgatggtttcattttctaacttgaaaaaaatacatctcaaatttattttggtgtcaagtgaggcttttatgttttgacttggtgtaagggcaaacaatcctttcctttaatggggccagtgatttgaagattctttttgcctttctctagaattgtctgaagtaatgacttttttttcagcttcttttaggatgcaaagaaaaaatggactttttttatttcaatgtgcttttctatacattttcatgagaaaattaaatcattagtaatttcaccatcaagagataatcacagtaaaacaacgttatatattcaacttgtttcaacaaatacttactaaacgccagcctcaagttaggcactagaacaaacatgatctctaccttcacacagtttactcatggcttagcagtaaatagagataattctaaaagctaccagtgcagtgagtgttatcacaggagtatagactgcatgcttcacactttttaaaaacaaaagtgtacataagtcttaggaaaacacgtttctcattaatattacagatatcctgtagtatcctatattactgtgatatcctagatttttttttagtctagtataactgaatctttgtccattactttcttacttttttttgagacagagtctcactctgttgcccaggctggagtgcagtggcacgatctcggctcactgaaacctctgtctcctgggttcaagcgatttccctgcctcagccttctgagtagctaggattacaggcgcaggcctctatgcctagctactttttgtatttttagtagagacggagttttgccatgctggccagactggtctcgaactcctgacgtcaagtgatctacctgctttggcctcccaaagtgctgggattacaggtgtgagccaccgtgcacccaacccgtttgtccattgctttctaattgtgccctttcttcatacatcatttctttagaattgaaaaagcctgacagaatagcctggttcctagacctcagaatcactatcattttattaacactaacaagtcaaactgaatccaaaaggtagaactccgaatatataaagaggtattcatttgagtgctacaacctacgccaaagcattttaccttcattatagggcactggattgccaatcttcactccaactgcttcagctgacttcaaaacttctaattccatcaagataactactctcctgcaaaagcagacaaacagaaacaggttagaaaaacaaattccgttcaaatgataagctactcaaaatgctttccccgatgatcattgtgatgaactattttccatttgtcatctgtttacataaatatttctcttcatctttcgccgcatcattatcaagtgattgcagggttttcagttcccaactagttccttaattaaaatgcagtgttctcgctacgcaccgtatcttcaaggagccaaccgacatggtaagaatttagattactaaacacaagaatatatggcataaaaagagatgaactgttttcagaaacacatacttatctcaacaatgactttttcccagtgaaaaccaattatgacaatagatattttaaaaaatgtaataatgacccatttttaagaacttacagttcttttgctttttaactctaattaaaacgttgtgataacttcccaatgaccttaggccacaaagaaaaacctgggccatggcttgcctggcctggccttgctaacccccctcccgtgccgctgcctgccctctgccctctgccctctggccttcctgttttctttcagttccaccacatgggacagtccctcttgccacaaggcctttgtccgtgatgctctgagattgcggtgttgtgttccttctcattttgcctcatctaatactcattttttagctctcgtctcaaacatcacttcaagagacacttccttaatctctagttgagatcaggttgctttgttctagtctttcctacagccttgatttctttccttcagaacactctgctccgtcttaattatatgttcattagtgattattttattattctctctctctcctactagactgtactgtcaataaagacaggtatccctcagtgcttaatgaagcaaatggcccacagttgttgctcaatacatacttgatgagcatatcacaatgtctgcattttaaaaagaaggaatttaatgggaacatgactggaggcagggagaccaagagaagagacaaaatgacagaggcctgaatgaggttagtggcaagggagctgaagaaacaggcctagggcaatatttaagcaataatctacccaaattcatcacgttttagactttaaatggtctgactgctgtttttggatttttacatacaatcaatcgtttgttttaaatggtctgactgctataatttggatttttacatacaatcaatcagtgtgtgctacccttatcaggtttcacatcagagtttcaataagataagcctgaaattatctgttcctgaaaatggtatctagattccctgtaataactatctgatacttagtggcagatatttaactactttccaaattatacaaatcactccagaacatataaaaatagaaggcctatgaatcatttagtatgactctaatactaaaacctaagacaaaacacacacacaaaaccaaaactaatttcatcctgcaatatcccataaatcctaaataaaatatcagcaagatgaacctagcagcatattaaaagaatacactaatatcaacttacagagaatacagatgacaaggacacattaagtgactttacagggatgcaatcagccaaatccagactgggggaaactgcacaaggtgaaggataaatgacctggtttcttcagcaaataaacagtaaaggagaaaaaaggcagacgcagagcctacagattcagagagacttaacagaccatcaatctaccgtcacaggaaacttattttggattctgattcatatagattgtgcgggcacacacacacacacgcacacgca

SEQ ID NO: 93841 - DNA, 16977 bp, Homo sapiens
gagcggctcaagtcccgcattgccgagatccatgagagccgcacgaagctggagcagcagctgcgggcccaggcctcggacaacagagagatcgacaagcgcatgaacagcctcaagccggacctcatgcagctgcgcaagatccgagaccagtacctcgtgtaagtggcggctccatacttccctgcggctccctggcgactgctgcggcacatggagatctctctaggagtctcagtctctctctctccaccaagtggcccttcctgggccccgagaccccttaaactcggttcctcccgggccccttgaaagttttcccataggtcagcctcagcttagtcagaggtgtgtgcaatgggagtgtcactcctatcccattccattttgtggaaagttggaagccttccacaaaaattcctgctgggctgggcgcaatggctcacacctgtaatcccagcactttgggaggctgaggcgggcagatggatcacttgaggccaggagttcaagaccagcctggccaacatggtgaaaccccgtctctactaaaaataaaaaatacaaaacccggccaggcatggtggtgggcgcctgtaatcccagttactcaagaggctgaggcaggagaatcacttgaacggggaggtggagtttgcagtgagcagagattatgccaatgcagttcagcctgggcaacagagcaacactctgcctcaaaaaagaaaagaaaaaaaaaatcgcccgctgtgcaacctaccatgctgggtggctgcggcagccctgtcctgggttcaaatcagttcaaatcctgcccccacccaccaacctcctgaagacctcagccagagcctccacctccctcttgggcctcagggagggcactgtcgcgtgccaggtgctgtgctaagcaccgtgctcgttatgagttcatttggtccttttcaagccctttgtaaagtttgccctttacagctggggagactgaggcacagaaccgacagctgccctgtgcaaaggccagcagtgctggagtgagcctctggtgatgatgaggggcctgggctggcatcttcttgggggactccataggcgttaacagaaacaaaaaaatgaggggtgtgggtcagggttccccagcagagctgggcgagccaccctgggttcaggctgccctgagccaggtcagctctgccctcttgtggcaaccggagatattgtacccagaaccctctctcctcagccagaccctgcctcccaccggacaggcccactgtgggctcagcacccacacaactgcacaagcccacctttcctgttccttctcaggtggctcacccagaaaggcgcccggcagaagaaaatcaacgagtggctggggattaaaaatgagactgaggagtgagtgaccgtctggagggaggcagggagggcttcccagaggagggggccatttggggtgggtttcgaagaatgagtaggagttcaccagggaggaaaagttgtccaggcagctggggagcctcggaggctggcaggtgagtgaccagggccctccccgccaccgccccccaccccagccagtacgcactcatggaggacgaggacgatctcccgcaccacgaggaacgcacttggtacgtgggcaagatcaaccgcacgcaggcagaggagatgctgagyggcaagcgggatggcaccttcctcatccgcgagagcagccagcggggctgctacgcctgctccgtggtgtgagtggaccgcagcggtggggattcccgcgtccctcccagagctctcattgaatgcctgccgcgtgccaggccttgggaaggagtccctggtggggtcatccgggacrggggagcacgcggccctggaacggggaaagcttggcggggaggccagccttccgactccccctctcgtctgcccccacagagtggacggcgacaccaagcactgcgtcatctaccgcacggccaccggcttcggcttcgcggagccctacaacctgtacgggtcgctgaaggagctggtgctgcactaccagcacgcctcgctggtgcagcacaacgacgcgctcaccgtcaccctggcgcacccagtgcgcgccccgggccccggcccgccgcctgccgcccgctgagcaccgaggacccgccccaagcagagccgcccctgggcccgtctgcgccggaggctgcggcggcgggagccacggaccagaccagccacatccaggggtcctcatttctccggctctggctcttgtttggggttctctcaccctctttctctttccttccctcccccattctccagatctccctctgtctccttttctctgtctttcttggcccctgtctctctccatgttgggggtcctaactcccccaccccatatctacgtgtcctccgggcattgccctctccatggctctggtcaccctgaccctctgccctgcccaccgcaggtcccccggggtcccggaagccccttctggctgcacctgccatgtttacagagggcccctgggctgcgcggccccagcctgggcaccctgatttttaagccatagacctggggtcagggcaggaaggaacttcactctgctgcttccgagaacctcggccgtgacattcggggccgggcgggacccgccccacagactccaacttcccctccwaaccccgaagtgaaacccgccaccgggttacccccacaagggggccgctgcgagaagttcacccacccccgaaaaaataattaaactcgcaggccaggcacggtggctcatgcctgtaatcccagcactttgggaggccaagacgggcggatcttttgaggtcgggagttggaggccagcctggccaaaatggcaaaaccccgcatctactaaaatacaaaaattagccgggcgtggtggcggccgcctgtaatcccagctacttgggaggctgaggcgtgagaatctcttgaacccaggagatggaggttgcagtgagcagagatcgtgccactgcactccagcctgggtaacagagggagactcctccgtctcaaaaaaataaataaataaacttgtgagctggccccaacccctcctaggaatcacagctccccgtactggtgccgccgcagtggccaagttgcgacactgcccacggcccctccctctgatgcagattcagggcttctcttcgatcatgttgggttttgattctgtttttccttgactgcaaaaccctctttcctctcctcttttgggacaagagccctggttttctacgctgcccttggccaccacactgcctgccccacgagctgggaggcaggttttgtacggtacgttgttattgatatgatataaaacatcaaacgtcgtgggtgattctgttgtcagtgactgggcttcagtaccacctctgcgtgtcggggaccctggtgtctacgggggtcacagcaggtcggacccgtgggtttaactccaagcccctctgagacccgacaacccctccctcccccagtttagctgctcaagcctggagaggttgaggcagtgcccaaggtcatacaggagagagattcgaatcctgagctcccgactgctcaggggaccccagaccccatccagcccctcaagtgcttccaagctgcttcccccgcccaccgcccccaaatttgaatcctgtcgcaaccatcagctgtgtccttgggaaagttgtatcccctccctgatccacagcttcctcattcattgccaagtggcgtcaaaagtcaaaaccctcccatgccacagggaggagtctcccgtgtctttgatgttctcaagtcgtcggcacctccagccagcattggaggctcttctctgacctctcctcacccactcccatgcacagcccgccgggtcccaggagacgctgagcaaaagccctgtggggttttttgtgtttctttttaaagagtcaaggtctctcactctgtcacccaggctggagtgcagttgtgcgaacacagctcgcggctcacagcctcaagctcctggttcccagcctcaagcagtcctctcatctcagcctttagagtcactggattacgggtgtgtgtcaccatgtccagctaattatttttaaatttttttagaaacaagatcttgccgagtgcagtggctcacacctgtaattccagcacttggggaagccaaggcaggcagatcacttgaggtcaggagtttgagaccagcctggccaacatggtaaaacctggtctccactaaaaatacaaaaaaaaattagccagacatggtggcgcatgcctgtaatcccagctacttgggaggctgagataggaagatcagatgaacctgggaggtcaacgctgcaccaagccaagatcgtgccactgttctccagcctgggtgacagagtgagactctgtctcaagaaaaaaaaaaaaaaaaagggtcttgcccttttccaggtgggtctcaaactcctggcctctagtgatcctcccacctcagcctccctgagtcgcgtaagccaccacgcgtggcctcatggcgtctttgacttggactcctgtttaccaccctccccatcacacccagaatccacacccccactgygacgtcattgtcccttcagccctccccaaccctggggcctcactgtccttgtctgttttgtacagccacctctcaaggcccaacaaggctgaacctggggcaagtgcagaaagaaacctccactctgacccagtctactgctgggaccttgggacaggacctgcctcccttagcctcagagccccctagccttgccaggcactgtccctgccatgtgtcctgtctggagataacccataaataactccagcccagattgtgcctctcactgcataggtgctcacaggagaaaggttgccatctttatgatcccagctatgctgagctgggggtggaagagaatatcccgtgtgrtctctaaaaacactcaaccactggctgtgtgtccttggcaaaatagccttccctctctgatcagccatttatttgttaccagctggagtcagtagcacctacccccagccccaactggatgcttctgagggttcaatgataaaatgggttgtaggcccactctatgcctggcaccaagccagagagcaatacattgtagggttacatttatgatttcttccaatagggctggtgcctggtaactactggaaaaattgtagcaattatatttatggttatttcttcaatcccacccggcatagggtaagcaccaaagttggggtggtgagtcttggggagcctttgccaacggtttggtcgtctgagggatgggctcggggaccatccagccactgggacttcagagaagctccggctcccaaaccagctactgtgtgtgtggccagggtcttccccacaactagaggggggcacagctggggactcaggtatatcttccagctgggtgtgggacattttcttccctaggatccgatgtgtcttgccctgaatgtaaggcctggcagggttggaatgtctcagttattcccccaacactccagcctccatctgggccttttttccaggctattctctctgccttcactgttggggccactgtcctgtgtaggcaccaaggcctgaccatgccatccagaagccccagcctgggacaactctcccccacctgcctctgagccctccatggtgactcttgttccccaaaccttatccttctccccattacacagaagggaaagctgaggctctgtcactcaaatccaaagccaggtggactccaagccaccccacccctatcccagacagcacaggctgcctctctcccccatgggcgtcccttgaaggccaggttgccccccaccccccacaagccttgaacgatgaaaagaaggaaggccagttctcttcaccccaagccagaagtggggctgggtgggtaccctagagaaatgacacgccactccctgcgccagcttctgctttccggcgtggctgtggtcaagcctgagtcagtcccacgggaccacggtgaggggtctggagcgtcggggtcaggagtttgaggggggaagggttgaggggcaggatgtgggggttgggtgtgagggaggtcacgggcgagactggagggaggagacctggccacacaggccttgcccactctcgggggcctgaatatttcagttactcccccaaaaccccggcctccatcccatccccagcctccatccgacgtcacccctgttaggtcacaggcccactctgagagtgggtctcgggcctcaagtcccctagccgcccctagaaggtctaggggtgcgtggagacaccaccrttcctctcagcctgtgtctgtctcaaaggccccacctcacctcccctaaaggtagtcttgcgccaggrctcacgtgcctgggcagggctgattgccaaggggcccaatggcctcgtgactggggacccagcacctggcaggggtgggggtgggacactcagaggaaggagtggaggagggagagacgctggcccgggacccgaggggcgtgggcatcgggaggcgggyccgggttaggggcgggaccgccgcctggttaaaggcgcttatttcccaggcagccgctgcagtcgccacacctttgcccctgctgckatgaccctgtcgccacttctgctgttcctgccaccgctgctgctgctgctggacgtccccacggcggcggtgcaggcgtcccctctgcaagcgttagacttctttgggaatgggccaccagttaactacaaggtagggacggcgacagggcgggcaggctggagggaacaggcgccctgtcggggcacgcggctccttctttctccccagacttcacaggggaagaccagggccccgaggggacgctgtccctgccgggttcctggaaaaaccctgttcagttcccggcgctgcggccacactccctccgtgccgtttcgctttcgcatcccgcatctgagaggcgcagctgcctccacccgcctagtcccgcccaagggttcaatgagcgcctactgtgtacttttggggcaggagctggggtctccttttgtggcccagggcacaagttcagcagctggccaagggccgccggcatgcattcttgctgctacccttgatgcattcattccagccagggcagggctcgcgtgtctttgggacctattaggcagatgccctagaggctgagcgacttgctcaccgctccagcgacatgggccacccgccacccctcagctgaagccggaagtcagcacctattaggtgccgcctctattcagtcggacttggaaagggttcacgtggatcccttgctcagctcagaggcaaggtctccaggtgaagtgacaagaaatgagcatgggccaaggccggaggcggtggctcatgcctgtaatcccaacactttggaagtctgaggcaggcagatcacgaggtcaggagttcgagaccattctggcctacatggagaaaccctgtctctactaaaaatacaaaaattagctgggtgtggtggcatgtgcctataatcccagctactcagraggctgaggcaggacaattgcttgaaccagggagtcgggtgttgcagtgagccgagatcgtgccgcagcacaccagcctagcgacagtgagactccatctcaaaaaaaaaaaaaaaagtctcaaagtcaagattccacctggcaagttctggaaggcgtgcaagatgaattgcstatcacagccccctttctacaagactaccaagtggggttgagagaagtggggaactgcccagggctacacctgcctcccacgccttcctaatccacagacaggcaatctatacctgcgggggcccctgaagaagtccaatgcaccgcttgtcaatgtgaccctctactatgaagcactgtgcggtggctgccragccttcctgatccgggagctcttcccaacatggctgttggtcatggagatcctcaatgtcacsctggtgccctacggaaacgcacaggtgtgtgggcgctggggaaactgaggcacgtgggcaggggagcaggggacccagcctaccagcaggctctcaccctgctgccttgcaggaacaaaatgtcagtggcaggtgggagttcaagtgccagcatggagaagaggagtgcaaattcaacaaggtggaggtgagcggccccagggccccacactggggtgggggaaaactgtcccacgtacaggaggcaaatacgaggatgccagctctgtcttctgcctcgtgtgctcccatttaatcacatctttattccctatctcctgggtgggtactggtgattattacgagagggtgtcagggtaccctaggccctcttcatgccctctcctgccccctctccaaaccccaggcctgcgtgttggatgaacttgacatggagctagccttcctgaccatkgtctgcatggaagagtttgaggacatggagagaagtctgccactagtgagtgacgcccctcactccacccaaggagggggacawgggtggtaaccttccctgcatccaggcagacccaaattcaagtcctagccctgaccactgctgtctgtgcagcccaggaaaacaactacccttctttattttatttatttttttattttttcttgagacagagtctcgctctgtygcccaggctggaatgcagtggcgcaatcccagctcactgcaacctccacctccagggttcaagtgattctccagcctcagcctcctgagtagctgggattacagttgtgtgccaccatgcccagctaatttttgtgtttttagtagagacagggtttcaccatgttggtcaggcttgtcttgaactcctgaccttgtgatccgcctgccttggcctcccaaagtgctgggattacaggcgtgagccaccgcacccagccctttttttttttttttttttttttttttttttgagacagggttttgctctgtcgcccaggctggagtgcagtggtgcaatcttggctgactgcaaccactgtctcctcagtttaagtgatcctcctgcctcagcttccccagtagctgggactacaggtgtgcaccaccatgcccggctaatttttgtatttttagtagagacagtgttcaccatgttggccaggctggtctcaaactcctgacctcaagttatccgcctgtcccagcctcccaaaggattacaggtgtaagccaccacgcccggccccagcctcccctcttgaagcctccatctctgaatcaggggaatgaatgcaggtctcttaggagcatgagtgatcacagaggacttactggaggaggcatttctgagctgggcatggaaggatgagcaggaatgtgcagagacacagatgatgggatgtggagatgataggacagaccccacctacttccccgggggattgtgaagaatgactcccagagaagtgactcattggctccaatcatttattcattcatcaaacatccgggtcacccaagaggcctcacytagtgacaccctagtcctgcagggttagatcagggctgagagagtggcaaggagagggcactgaggagacactgtggaaggaggatgaagggtgttcctggcagagggatcagcctgtgtggaggtcctgagtaaagtgagatactatgggggtcagaggcagtgggtctggtcttagggatgaaaccaagggagctaggaggcaggagcagcccaagccctgccttaggggcctccactcaagcatgtattgagcacctgctgtttgtgggctttgtcgcatcactgtgaagccaactgtaccctcttctcagtgacgaaacaggcttggctcagggctggtgggygggaccgttgagataacggggaggaagctgaggcaaccccctgctccccacccacccagtgcctgcagctctacgccccagggctgtcgccagacactatcatggagtgtgcartgggggaccgcggcatgcagctcatgcacgccaacgcccagcggacagatgctctccagccaccrcacgagtatgtgccctgggtcaccgtcaatggggtaagaatctttttagccctcagcttgacactcatagtcccatggagtcagggatggacaagacagagggaccagagataaaggaacccaggcggaggttgcagtgagctgagatcatgccactgcactccagcctgggcaacaagagcaaaacttgatagctttgcatagggaaagagggcattgatgctggggttttgaaaggtgagtaggagtccakcaggcaaaaaaagtatgtattaattcgaagtattaaacatccctagccacccccattgggaaagatgtgccactgatttgcgaggcgggaggcgggggccagacttgggaatatgtgcagccctttctgggctggaaccagggtgcatgggttggggtagctgctgggaatatgcgacccctgtcttgctttgtgcagaaacccttggaagatcagasycagctccttacccttgtctgccagttgtaccaggtaagctgggaggggagcagtgggattcaggtggtgggggtagggtctccttccaggaccccaactcrtggccttcacctccagggcaagaagccggatgtctgcccttcctcaaccagctccctcaggagtgtttgcttcaagtgatggccggtgagctgcggagagctcatggaaggckagtgggaacccggctgcctgcctttttttctgatccagaccctcggcacctgctrcttaccaactgraaaattttatgcatcccatgaagcccagatacacaaaattccmccccatgatcaagaatcctgctccactaagaayggtgctaaagtaaaactagtttaataagcccttctggatggtgtaattmatttgataagtcagccattcccccttccccaggcctggcaaaacccgctctctactaaaaatacaaaaattagccaggcgcggtggcgggcgcctgtaatcccagctacttgggaggctgaggcaggagaattgcttgaacccggcaggcagaggttgcagtgagccgaaatcgcgccactgtgctccagcctgggcgacaagagcaaaattccatctcaaaattttaaaaaagtgactggttgtggccgggtgaggtggctcacgtctataattcctgcactttgggaggtcaaggtaggaggattgcttgaggacaggagtttgacaccagctttggcatgaaagcaagaccctgtctttacaaaacatgaaaataaaaagaattagcaggacatggcagcgagcaactgtggtactcgggaggctgaggcaggaggatcacttgagcacaggaggtcaaggctgcagtgagccataattacaccactgcactgcagcctgggccagagagcaagactctgcctcttttttttttttttttttttttttttttgagacggagtttcgctcttgttgcccaggctgaagggaaacgcgtgatctcggttcaccacaacctctgcctcttcagttcaagcgattctcctgcctcagcctcctgagtagctgggattacagacacatgccaccacgcccagctaattttgtgtttttagtagagacagggttcttccatgttggtcaggctagtctcgaactcctgacctcatgatccatctgtctcggcctcccaaagtgctgggattacaggcgaaagccaccacacccagccaagactctgccttttaaaagaaaaagaagggaaagaacatgttcagtgttgtattttttcctactgatggactggtcaaatcatagatgtatatattcttccttcgaggaagtgaggcttaattccactccctacaaatatctttgtttctctttattttgagatggagtctagctgtgttgcccaggctggtctcaaactcgtgggctcaagcgatccttcttgaggatcctgaagtgctgcgattatagacgtgagccagcgtgccgggccctacaaccaccttgacagtgaactagattgagtaacttgattccaaagagtagaacaggaaaagtgaaaaagaataccccggctgtgcgcggtggctcaaacctgtaatcacagcactttgggaggctgaggtgggtggatcacttgaggtcaggagttcaagaccagcctggccaacatggcgaaaccctgtctctactaaaaatacaaaaattaggctggatgcggtgtctcacacctgtaatcccagcactttgggaggcccaggcaggcagatcacctaaggtcagaagtttgagaccagcctggcaaacatggcaaaaccctgtctctactaaaaaatacaaaagttggtcaggygcggtggctcacgcctgtaatctcagcactttgggaggccgaggcgggtggatcacaaggtcaggagatcaagtccatcctggctaacacggtgaaaccccgtctctactaaaaatacaaaaaactagctgggcgtggtggcaggcacctgtagtcccagctactcgggaggctgaggcaggaaaatggcgtgaacctgggaggcggagcttgcagtgagccaagatcatgccactgtactccagcctgggcgacagagcaagactctgtctcaaaaaaaaaaatttaaaaaatacaaaagttagccaggcgtggtggtgcacgcctgtaatcccagctactccagaggctgagatgggagaatggcttgaacccgggaggcaggggttgcagtgagccgagatcacgccactgctctccagcctgggcaacagagagagaccccatctcaaaataaataaataaataaatacaaatcatcaagtagcaaaggtggcatgttttgaggtggcacgtcctgaacttcctcattccctggctgaattggtggtggagagaaattcagggtagaagttctgaagtaacacatctacagaaggggtagaaaaagacagattagaacaaatagaaaggaataaatataagcacactatgccagatattgtcgaatcagtatctttgtcctgagaataggttagcttggttacacacttgtatctcattttattttatttatttatttattttttgagacggagtttcgctcttgttacccgggctggagtgcaatggcatgatcgtggtcttggctcaccacaacctccacctctggagttcgagcgattctcttgcctcagcctcccaagtagctggaattacaggcatgcgccaccacacccagctaattttgtatttttttttttttttttgagacggagttttgctcttgttgaccaggctggagtgcaatggcatgatctcggctcactgcaacctccgcctcccaggttcaagcaattctcctgcctcagcctcccgagtagctgggattacaggcatgcaccatcatgcccggctaatttgttgtatttttagtagagacggggtttctccaagtcgaggctggtctcgaactcctgacctcaggtgatccgcccgcctcggcctcccaaagtgctgggattacaggcgtgagccaccgcgcccagcaattttgtatttttagtagagacggggtttcaccatgttggccaggatcgtctccaactcccgacctcaagtgatctgcctacctcggcctcccaaagtgctgggattacaagtatgagccactgcacccagccttgtgtctcattttagaaggtggtggcttaggagggagttgggaacctatctaagttaggtctctaaatggtgtgagcaatcaggcatttaatgagcatttcttctttctctctctctctgtctccccaccctcactttccttccttccctttttttttttttttttttttttttttgagacagagtctcgctttgtcacccatgccggaaagcagtggtgcaatctcagctcactgcagcctccaccttctgggctcaaccagagtagctgggactaaaggcatatgccaccatgcctggctaatttttttttttcccgtttgagacggagtctcactctgtcgcccagcctggagtgcagtggcacattctgagctcactgcaacctccacctcccaggttcaagagagtctcctgcctcagcctcccgagtagctgggactacaagcgggtgctaccacacctggctatttttttttttttagtagagatggggtttcatcgtgttagccaggatggtctcgatcccctgacctcatgatccacccgcctcagcctcctaaagtgctgggattacaggcgcaagccaccgcgcccagccacacctgactaatttttgtattggtagtggagacggggtttcgccatgttgctcaaactggtctcaaagtcctggactcgagcgatctgtccgccttggcctcccaaagtgctgggattacaggcgtgagccactgcgcccagctcttcctttcctactctacaggatctggctctgttgcccaggctggagtgcagtggcacaatcatagctcactgcagccatgacctcctggactcaagcaatcctcctgcctcagcctcttaagtcgctgggactacaggctggagtgcagtggcgcgatcttggctcactgcaacctccacctcccaggttcaagtgattctcttgcctcagcctcccaagtagctgggattacaggcacatgccaccacacccaagtgatttttatatttttagtagagacagggtttcaccatttggaccaggctggtcttgaactcctgacctcgtgatccacccgcctcagcctctcaaagtgctgggattacaggcatgagccactgcgccccaccccgaagttcacatttacaaacagattttgaaaacaatatttaagcaggcatactataaaacataattattgttgaaaagcttatttacaagctttcatctcactttcatttaacttacttgtgttcaacaattatgcttaattactcatgaacatttcataaaacattgaaaaaataatcatcatcttaagttacttttcttgttgacaaatcaagtatcaaaaatcaaagaagcaaagaacctaaaaaaataaatatatgggacgcagcaccatggctcacacctgtaatcccagcactttgggaggccacggtgggaggatcactggagaccaggagttcaagaccagcctggccaacacagtgagatcccatctctataaaaaatacaaaaattggccaggcgtggtggctcgtgcctgtaatcccagcactttgggaggctgaggcgggcagatcacctgaggtcgggagttcaagaccagcctgaccaacatggagaaaccccatctccattaaaaatacattagctgggtgtggtggtggtagctctaatcccagctactcgggaggctgaggcagcagaatcgcttgaacctgggaggcagaggttgcggttagccgaaatcacaccattgcacttgagcctgggcaacaagagcaaaactcaatctcaaaaaaaaaaaaaaatagccaggyctggtggctcacacctgtaatcctagctactcgggaggctgaggcatgagaatcacttgaacctgggaggctgcagtgagctgagatcatgccactgcactccagcctgggcgacagagcaagaccttatctcaaaaaataaccatccaaggaaccaaaaaaaattaaaaacccacatatgggtctctcctttactttttaaaattaattttattgtcaggcttgacatccattaagcaaatcacctttttttttttttttttcagacagggtctcactctgtcacccagactggagtgcagtgaggtgacatcacagctcactgcaacctctgcctccagggctcaagcgatcctcccaccccagcctcccgagtgtctggaactacaggcacaagccacaacactcagctaattttctatatttttagtagagacagcttttcactatgttacccaggctggtctcaaactcctggactcaagcaatccgcctgccttggcctcccagagtgctgggattgcaggcatgagccaccgtgcccaccctcaattcacttcgtaaaaatttttttatttattttttgagacagggtcttgttctgtcacccaggctggagtgcagtaatgtgatcacagctcactgcaacctccatttccagggctcaggcgatcctccctgctcagcctcccgaatagctgggacaacaggtgcgagccacgagccagcatgcgtggtaaatttttgtattttttttttttttttttgcagagatggggttttgccatgttgcccaggctgttcttgaactcctggcttcaaatgacctacctccatcagcctcccaaagtgctgggatggatgacagatctgagccaccacctggccaagcaattcacttttattgcatgtattgttcttaggtttattttatagttttacagtttacacttttataatcttcaacatctaaagataacataagcctgtttgactagtcttaatttacataagcaaatgtggttttctaaagtcaatgaaatagagctcctttacaagttaatctttaggaattccatcaagagggagaaagtgttacatacctataacatatatatatataaacataaataggtgcagtcagaaatcttatagctttcattttaaaattatagctgtgagacaggtgtgataatacaaaactcactagtttttaaaaaaatggtggagccgggcacagtggctcacgcctgtaatcctagcactttgagaggccgaggcaggcagatcatttgaggccagggagttcaagaccagcctgggcaacatggagaagcc

SEQ ID NO: 93842 - DNA, 17068 bp, Homo sapiens
tgagaccagcctggccaacatggtgaaactccgtctctactaaaaatacaaaaattagccaggcgtggtagcgcacgcctgtagtcccagctactcgggaggctgaggcaggagaatcacttgaacccaggaggcagaggctgcagtgagttgagatcacgctgctgcactccaacccgggtgacagggagactttgtctcaaaaaaaaataaataaaaaataaaaaaataaaaaaaagtaaaaggaagcttctggacagctgaaagttggcacagccctcaggtatacataaagccaactcaggagcttccagttaagagtagttcacagttccttgccccacctaaggtgtacgacattccccacccagttggccccgaacctatcgtgggccactcagaataccccacaccacctggccacagtgattaaaacagggatgggcccatgaaccaactggggccaactggagtccttcctcaggatttgtctaactggagcagcagtggaagtacttcttgtggtctacaggccaaggtttcctgtggctctgctccccaggttcagccagcctgataatgatactggtgttcagaaagccacaaagggctgggcacggtggcatatgcctgtaatcccagcactttgggaagcagaggagggcagatcacttgagcccaggagtttgagaccagcctgggcaatgtggtgaaacctcatctctactaaaaattcaaaaaattagccaggcatggtggcatatgcctgtaatcccagctacctgggaggctgaggtgggaggactgcttgaacccaagaggttgaagctacagtgagcctcatgctactggcctccagcctgggcaagagtgagaccgtgtctcaaacagacgagacgggatgggacgggatgggacgggaygagacgagacacaatataaagacaatgaagacagaatggaagacatacctggtggtagtacagcccctggcttctctcccctaaaacattggcgactgtgccctatccatccttgattatgtaaacccaacttctctattttgcttgaactagttcaagttcagtttatattacctgccactgagaggatcttaatagatcctatttttacaaatgagaaagcagagtctggaggaagtgtgattcacccaaggtcacacaaagctggcctgcccatctagttccactacatcccaccattggaagtttagcagaggcagaaatgcccaggtctctgctctgcttttgtctttgtgaccttcaagaggatctggcaccatctcttaaggatctccaactgtttttgatgttagaatcctgtgggcccatccagacttgaccctggaacatggagagaagtcaacagagtcaagaaggggcagaagctcaaccctgggcttcctgctctgtttgaaaaaatgagtatgttattggtgtccatctttttcatgtgtctcttcctagcacccaacacagtagctgtcccaagcaggccctaaggacaggtttaatgagttcatcaattagggtctatgggaacagtaggtgacagcactcaggcttttgagtaagcctgagtcaaactcttacctgtccataagcaaaaagtgggagaagagcctcagttctcatctggaaaatggggataatccccaaaggaaaaaactgacaagatgctgttaatgctgattcaaactctaggacccaagaccttagttttttgggggttttatttatttatttttgcttgtttgtttttttgtttttgtttttttttttgagacggagtcttgctctgttgcccaggctggagtactatcacagctcactgcaaccttcaccacccggttcaagcaatgctcatgtctcagcctctcatgtagctggtattacaggcacccaccaccatgcccagatcagttttgtatttttagtagagacggggcttcgccacattgactaggctgatttcaaactcctaacctcaagtgaccgtcctgcctcccacaaagtgctgggattacaggcatgagccaccgcgcccagcctagaacccaagactttgtatgggagaaaataagaatccattcatgggttccctagagagataatgtgctttcaggaaaaacaaaaacaaaaacaaaaccaagagacatggagtctttctagcctccttagcctaggaacaggtgtgacaccttgggcaagtcagtaaccctgagtgtcaattgcctcctctgtaaaacggggcctgccttagagcaccttggggacttcctatcacctttatgatcccccaggatatagagagaatgaaatgaatatgggtcaagccactaacaccctctaatgcaaaagcttgtggctactttacctgcacctcatggagtcgttgtgctatgagcttgtcataaaaacccacccaagataaactgctctttttatatgagtaaaaaatttttcactgctgcttcactggaatcattaagctggagcggggagggaaaggtgacacaggttacagatggctgaggccagggccagagcagatttgacagggtcctgggggagtggctgaggcttccccgggtatcttaggacaagtgcagctctgttacaattttcagagaagcaagggagtaaccacagtttcttcttgtggaaagatatgctaaaggggtgtttcatggacacccagaagaaaagcaattctgtgtttgtaaaagggccccagtgcagtccacaagagaagggttatcaggaactcagaaccatcttccaaagcagtcttttgtttttttgagatggagtttcattctgtctcccaggctggaatgcagtggcacaatctcggctcactgcaacctccacctcccgggttcaagcgattctcctgcctcagcctcccgagcagctaggattacaggcatgcgccaccacacctggctaatttttgtatttttagtagagacggggtttcaccatgttggccaggctagtctcgaactcctgacctcaagagatatgcctgccttgggctcccaaagtggtaggattacatgcgtgagagccaccatgcccacccagccaaaagcagtcatcttgatgatccttcttaaggatgaaatgggagagaggggtcttagaggggaggagtaaaagttgtagagtagggttcgaaggatgaatttgagaggtgtttagcttggggagcacttgctctagaccctgtgcctaaaggggatctgggaggcgggggcttgggggagtatagatcagagcagggagaaataaaagtgaagagtttggacagatgttaggctggttaataggggaattccagaagaaggtttggggaaaatttagaatagggaggtgtggggtggacaggggttttaggaggctctgaaaggtgaggtgaaacatggggtggggtggggtagaatggagctaggtactccaggtgaaaatataacaatctggtcaaaatgaggaaatgctgaagagtggatgtacttctaagcactgcattttcactttttgataatttggttacaccatgaagtagtcttacaaataaatacctttaaatggttttgcccatttaaaaataattcttcaggatcaggcacagtggctgaggcctataatcccagcactttgggaggccaaggtgggcagatcacttgaggtcaggagttcgagaccagcctggccaacatggtgaaaccccatctctactaaaaatacaaaaattagccgggtgtagtggtgagcacctgtaatcccagctaatcaggaggctaaggcaggagaatcactggaacccaggaggcagaggttgcagtgagccaagactgtgccactgcactcgggcctgggccacagagctagactctgtctcaaaaaaaaaattgttcatattttctttctaaaatgcggaaacaaaatctacagtatggaagcaattgaataaattttggtatgtcataaaataaaatacatgtaattgtgtatgaaacatagacgggtggtatattagatgggagaaaaaagcaggttactaaaaagtgaacttttgtgatgtatcttttttaagtataagcatgttgtaacatatatatatatatatatatatatatatatatatatatatatgaatggattctgatcaaaatacaccaaaatgttaacagtgattgtccctagccacttatgctgctggcctgtcttgtcttctttttatttcttcgagacggggtctcactctgtcccccaggttggagagtagtggcacaatctcagctcactgcaacctccacatcccaggctcaagtgatcctcccacctcagcctcctgagtaactgggaccacaggtgagccaccaagcccggctaattttttgtatttttggtagagatggggtttcaccctgttgcccaggctggtctcgaactcctgagctcaggtgatccaactgcctcagcctttcaaagtgaagtggtgggaatacaagcgtgagccaccatgcctgtcctcatttttctataagtgtacactacttttataattgggtcaaaaaagacaactgtagaaggataaaaaatattgaaggactagtttttctaatgcattttcagcctatttggaactggagtgttgtgaatgttttcatatttacaaactagtatgaacaatccaacttctcaatctctcatttacatttttctgacctctatgcatagcctaggtatgaggtgatggaaaaagctggtttagagatcaagatgctcaaacacaaaagtcccccaaatcctgagagttttttgtttttttaaaaaaatccttaaaacatttaaagacgcataaaactcttcacccactcagtggtgcaaaaaatttaccaatactagaaggggaggaggctggcaacgactggaaatattccctttcaagtaataaataatggttattttgaaccaaattgctttccacctcaagtcctccatggatgggagcctggaggatgcagtgatgggggttatggaatggaaaggagcgtgggtaattgggtttgtgaggattggggccaggcagagggaactgggggcttttccaggaccactggggaacacagaggctgagaaggggagtgtgggatgggttcgagctggggaggacctcggcctcgccaggctctaaggagagtcacagctcaccacctagggcgctgggaccacacgatgtcatgcctgggagactgaagggctaggacagattctgagaaaatgtggactggagatggggattccaggttctcccgggagtccaggcgagggagttccggcttcagggagtcccaagagctagactgggaaggggctggtgcccaggactatgagaaatccagactcccctggggtgtgaaaaagggccgaggtccggctgagggagagcgagtctgaaagagttcgggctcccttgcgggtccgagagtctaacgaaggctctgggcacccaggccgcacctgaagagcaccaacgactgctcggtccgcggcgcgggaaggagatgtgcggctgaacccctacgccgattacttagcggcggccctatcgagagggtggttcgagcccgaggtggcgccggtcccgtaaatcgtggaggatctcaggtcccctgtgaccaagggcgtagtcagctgtgtcatggcggcttccctgttcgagaaacagttggaaactggaggccggttgggagtcatggtcgttgggcgcacggaggccggttggaagccatggtcgttgggcgccaggaggccggttgagagccgtgctcgttggacgcgcgcagacctggagttagtccctgggcggaacytggagccccgcgcggcgcgttgcctgggagacgcataagggggcggggccggggagggagtgtcgcacatgcgcacagagcccgggcggctacggaagcggtgagactgtctctcggctgcagccctggtgcgacccggcccgttgccgtagagatgggcagggctggatggagtggggtgcggtgagctgagctgaccctgcttcgccacggggactgcagtgaccccggcttgccggcagggcgggtaacaggttgagccagggtggggctgctcaggggcgtggagccgaggccaggatttctctgaagacccggcacaggctattcctttctgcgacgagcccattgctatggaaaccaaagcgttaggccagcggggattgaggctgcgggatcatgaygggtctctctcccgaagaaccttgcctaaggcttccccaagcggctacttcctgagcgaacccgcccacccgcctgaaggagagaggtaaaaccctgggggtcctgacactaagcrggcgaagaagcctattccaatgccagctcccctaggaaacctacccggcccacccctagaagtgatgcttcgctctcgttaactcttggactttgttccatgtttataacttagtatttcacgaacgccccgcggtgtttgttcatttttcccacacataatggaccataaaggtcggcttctttgctttatgactcgttctgaacaagtccttttccgcgctgtgtctcactttcctcttttgtaaaatggaaatattaactctagacgccggtctgattaggttgctttgaagatcgaaccagatgagggaagccaaatacttcataggctgtaaagtggtgaagctgaactgctaccgagttgctatttttttctcctcctccctctcaagctaaacgttctttagatcttttgtgatttcttcaggtggtctttgcgactccctaggctccgacctggaagaaatcttttttacacttccctttcacrgagccctgcattttaacttccctatcagaagcgagaaaaatagttatcattttgagagggcttactctatgccaagccctgagaaaactctttacgtggattatctcgtttaatttcacaacatccttttaaggtaggtactgttatcctattttcaagctctgtctgcctgtaattgcctgtttactatctgtttctcccactagtctttgagctccctgagaaaaggggccatgcctgtcttgtacatttcagtatctccaacacctaatacagtgcctgatagagattgctttttttttttttttttttttttttgagatggagtctmacgctgtctcccaggctggagtgcagtggcacgatcttggctcactgcagcctccgcctcccgggttcaagcaattctcccgtctcagcctcctgagtagctgggactacaggcccatgccaccacgcctggctaatttttgtatttttagtagagacgggggtttcaccatgttggtcaggctggtcttgaactcctgacctcaggtgatctgcccgcctcggccttccaaagtgctgggattataggcttaagccaccgtgcccagccctgatagatatttcttaactagcatgaaaatgactcctcgcatcactaccctcacctgcaagagcattgtcacttctgcagacttttagtggctataatgaacagcacattcctctattcccgttacccactgggcactggtttggggggacatcagttcacttctctatggattttctgatgacgaggatccagaacattccttagcatttagacttccatctgggttcaggaggctttttctttgcccttcatatcacctctgtagcaagccagccctctctgtccttccgggaatgagcctgatgcatttgagtctggggcattggcaggtaggatttgcctatacaacctttggtctttctctttagtagcctcagaaccacccccatccccacccagcccctccctggaattctggagacacgctgccagagaactcattctttccagaaarcctctcagaaggcagagtcatagctgttgggagtcatttcttcattcaacaaatatttatcaagcacctacttgtggggacacagcgcttggcactagttggtgatagagtgggagtgaagacagacaccatcatatccctaaagggctcacagtctcttggggagacagacattaatcaaataatcagacagatcggagcaaaactacgtcttcagtaagtgttaggaaggagagaacatagggctaagaaagcctggagcagagttggtcaaacgtgagggaggggtgtgatctaaggagatttcccttaaaacagttacctttaagttgatatcttaaggctcctcagacttctgcagtcctctgctgaatggaccagatcaggatctgatgggttcataaggaaagagactgagagatcagcaggggcaaaggccactggctggagaggacaggttgtccctaaggaactgtaagtggctcggttcacctgaggcccttcagagcatggagaagcctaataagaggctggagagacaggcaggagccaggtcacaaatggccttgacagccaaactaagtggctccatcttatcctcacagtggatagccactgaaatatattaagcagggaaacaaaactttggctcctcatttctcgtgcctggtgaagactgccacttggccttgaaaggtgtgatctaaatccaaatgcccctatttcagcggaatgtataaagatgtcctggtttttgcagctttgtttaagactgagaaagtgagggtccgagagtctaatgaatgctctgggcacccaggccgcacctgaggagcaccgacgactgcacggtctgcggcgcgggaagcagatctgcggctgaaccyctaccccaattacttagcggcgactgagcctatcgagcaggtgaagggaaggggtctgcctctccctggggtgtgtttcacagctctgctgcaggcagcatgatgcaggtgtggcaggtcttcctaaggccctgctgtctctgtgcttgtccctggggttgctgtggtgcccattatgctggcttccaggaagctttcagccactccctttcccaggccttcttcagaggcaaggtgcaggagcatgtctaacaatttaggactttgtatttgacatcagcttcgcatgggcatatcctgtctctttaaagagatggttcttagagggggaaaatgggaaccctccctactcttataccagcctcctcagtgactgccagcacagtgggctctggttccatgccactggctcaggaccttatgatttgggcataaagtcagaagactgaggaggaagactgtacaaatggttcccactcagaggggctggaaggaaggagagaatttggaagagcagcaagaaaagggctctgtgagcttaaatggagaatcaggccaaggcacagctgagggacacaagtcatctgcccaactagagctgtgggacccctcaarggaggcctcaagtgccagacttggggacttgccatttgtcctatagggcagtgcacattagaccacctgagaagcatgctgaaaatgcagattcatgctcttcaccccgagagtctgactgtgggtttggagagggacctgggtatctgtactttaaatgagtttgctgggtarttctgctgtgatggtcagaggactgccttggggaatgctataagcctatccatccatttcccagggatcccctggaattggccctctgggcacctgccctctaaacatcctctccctctctgcagttttccatggacacagcctagcagaaagacgcagccttsgtgcttcgctgactgctgaccactgacccaccgccttgatgacagcaccctcgtgtgccttcccagttcagttccggcagccctcagtcagcggcctctcgcagataaccaaaagcctgtatatcagcaatggtgtggccgccaacaacaagctcatgctgtctagcaaccagatcaccatggtcatcaatgtctcagtggaggtagtgaacaccttgtatgaggatatccagtacatgcaggtacctgtggctgactcccctaactcacgtctctgtgacttctttgaccctattgctgaccatatccacagcgtggagatgaagcagggccgtactttgctgcactgtgctgctggtgtgagccgctcagctgccctgtgcctcgcctacctcatgaagtaccacgccatgtccctgctggacgcccacacgtggaccaagtcatgccggcccatcatccgacccaacagcggcttttgggagcagctcatccactatgagttccaattgtttggcaagaacactgtgcacatggtcagttccccagtgggaatgatccctgacatctatgagaaggaagtccgtttgatgattccactgtgagccatcccacgagcccctgcattggagtcagaggtacagatctattgttgatcttacaccaagatccaaacttgaacattctacttttgttgatacagaaaaaaacagatgatgccttttatgagcacaaaaaagagttgctgtagcttttaactttataatccattttttttmagattaaactaattgtgagatggtgaagataaattttctgccctgtgagtgacactggccaggggataggttgaggcagatggtgcccagaagaaagagggcagcacccattgcacatggcaggcctggaatcctgcagccctccccaaaaacagattgacccaggaatgaatctgctacaattccacctcattctttcacacccagagccagagccttaagcatcatggtacctcttgcgcttcttacagtgagtgccaatctactagataaatggccttcaggcagtgctccaggaatcctggggggtcccaggccacctctgcttccaccttcactataagtggcccagttctggttttctagattgtacttatgcataagatagtttttaaagaaagcattccactgtgtaaatttttttttgtctttttttgaaactgtcctgctctgtcacccatcctagagtgcagtagtgtgatcatggctcactgtagccacaacctctcaggctcaagtgatcctcttaccttagcctcctgcgtggctgggactacagatgtttgccaccatgcccgcctcattttttttctttttttatagagatgagattttactatgtcgcccagactggtctcaaactcctggcctcaagcaatcctcacgcctcagcctcccaaagtgttgatgagccactgtaccccgataccactgtataaaaaatttaaaaaaaattgtgagtgctattgtacatggcaaagtttcaaagagctcttggccatccctcaccaaactttggcaaaagatggtgttagtccccttctccagggcacatgagaaaaacaggcctaacatcaggtctcagcggttcctctcacaggccttggcttggaaggctggagcttcggaccaaggcccagccctgtcacctcctcttcatgtgatgtggacccctgggagcatcagtgtcctcatctgtccaatgacagcccttttctcacagagttattgtgaagattcaacaatttcttggcatagtgcctggcacatggtgtgtgcttagcgcaaatggcagctctcatcatgaatgatagactctttcaccctgctggtcccaggtcggcacacacatccccataatggcatttctcctttctgtgcacagcactttattgttacaaagtactcttccaaaaagttaccctgtgtgtaaaaaaaaaaaaaaaaaaaaaatggtttaagtcctttcagaccctacctcacaggaggcctagacttagagccttttgagagcttccgtcttgtttaatctaggtgcaatctagaggtcctgaaacaaggagcacagttccagcttcccccaatcacttctaaacagtgactgcagccttgtttagaatcactatgaaaacctgcaccccggctgactactgggatccataagggggccgtgtcaaagggactaactagtggactccatcagtaggccctggaattcaggattgttcacatcctcttggtgccaaggacctggctgaagaccagctcttctgatccagaggttttcagcaaacagcatttgaaacaaaagcacagctgctctgtttgacaccaaactgtggctccagattccagtagaagccaaatgctttttcttttaacagctgggtgcctgtaatcccagttacttgggaggctgaggcaggagaattgcttgaacccaggaggcggaggttgcagtgagccgagcttgcaccattgcactccagcctgggcaacaagagtgagactccatctcaaaaagaaaaaaaaaaaaaaagaaaaagaaaagaaaaaaagaaatgcttgggaccagaaatattttggattattttcaggttaatatttgctttacctgaagcaaatattacttgagcatcccaactctaaaatccagaatgcttaaatgagtatttcctttgatagtcatttcagctctcaaaaagttttagattttgagcatttcacatttttggatttgagatccatgaatgggtctcaaactatatttcacttggcgggggggtggctattgtagattttttttccaattgctcattattagtatatagaaatacaattgaggccgggcgtggtggctcatgcctgtaatcccaacactttgggaggccgaggtggccagatcacttgaggtcaagtgttcgagaccagcctggccaacatggcaaaagccttgtctctgctaaaaatacgaaagcagggcgtagtggcaagtgcctgtaatcccagctactgagattagagaatgaaacaggagaattacttgaacccgggaggcagaggttgcagtgagccaagatcaggacattgcactccagcctgggcaacagagcaagactccatctcaaaaaaaaaaaaaaaattgttctatgccttctggcctccatggttttttctcagaaatccagaggcattctaactattgtttcccaacaggtaatgctttatttttccccagctgctttttaagattttctccttgtctttggttctcatcagtttaattatgatgtatatggacatggatttctttcggttatccttatcagagttcacagagccacttgattgtgtttcagatatctgggaagttctcagctatgatttcttcaagtattgttttctgtaccatactgtcctgtacttctgtgtcattgataacatgaatgttagagcttttgacattgtccgtgaattcctgagactattcattttttaaaaaattttctctaggtgggtgtggtggcatgcacctgtagtcccagctatttgttggggctgaagtgagagatcacttgagcccaggagggaggtcaaggctgcagtgagccaagatcgtgcctctgctctccagcctgagtgacaaagtgagactgtgtttcaaaaaaaaaatttttttctctctgctgctcattttggataatgtattagtttactcttggtgctgtaacaaattaccacaaacttagtggcttaaaacaacatccatatattttctcacaatttctataggtcagaagcttgattggacttgactaggtcctctgcttagagtctcacaaggtccaaatcacgtttcatacggccaaaaccaaatgtgtttttccctggaggctctgaggaagaatctgcttccacattcatttgggttcttggctgaatttagtgtattgcagttgcagggtagaggaccctgttttcttagctgtcagctgggggttggccttttctctgtagaagctgcccacattctggtgctttctacgtgtgcccctccagaaataggttgaattcttctcacactttaaatacttctaacttttccttctgttacatctaagtccagccagagagaatcactctgctttaaaagactcatgtgattagaatgagcccactaacataaaaataaaatcagttacatctgcataagttacatctgcagtctcctttgtcatataaagtaacattcacattttccagggaataggtcagaaacatcatttccaaatcttgattcttatattttcttagttctaaaattcttatttagcctgtaatccctgcactttgggaggttgaggctggtggatcacctgaggtcaggagttcgagaccaccctggccaacatgttgaaaccccgtctctaaaaatacaaaaaattagctggatgtggtggcgggcgcctgtaatcacagctacccgggaggctgaggcggaagaatcgcttgaacccaggaggcggaggttgcagtgagccaagatcatgctattgaactcgagcctgggcaataagagtgaaactccatctcaaaaaaaagagagaaaaaaagagtctttttctgataattccaacatctgggtcatctcagggtccagactttccttgttctttgtgtgtaattttgattgtatcctaggcattttgaataggtcttgtttaaatcccacggaaaatgtcaggtttttgttttaggaggcagttgaccctcttcggttcgatcctcatctgtctcctgtgggctattgtagttccagtatcagttcagtttcttctttttttttttttttttttttttgagatggagtctcgctgtgtcgcctaggctggagtgcaatggcgcaatcccagctcactgcaaactccgcctcccaggttcacgccattctcctgcctcagcctcccgaatagctgggactacagggacccgccaccatgcctagtagagatgcggtttcgccatgttagccaggatggtctcgatctcctgatctcgtgatccacccgcctcagcctcccaaagtgctgggattacaggcgtgagccaccgcgcccagccgatcagttcagtttcaaagcctttgccatgtaaatcagaacagtcctaagcttatgccccccagtgagcagtctgaaacctgggtgttctgcctaatagttcagttctcattcactggaatactgcttagggtcaggtccatgcatgtgaacctacaaattcatgtgcaactttatgggatctatttcacaagctctctcctgtccacattctccagctttcaagacccctcattttcctgaccctttagctagaaattgggtcctttagtctccctgcttgttacgcaccctccatggcgggtgtactcttgggccaggtgacaggatgaagagagaaaaaaggcaacggagattcccctcttctacttttcagattgcagatgctttggacagatgaaaggattccgctttgtcagagttttaggtgcttttctggccaccactgttactgctgctacccccaaaaaaaaaaaatttttttttttctagagacagagtctcattgtgttgcccaggctggtctcaaactcctggcctcaagtgatcctcctgcctcagcctcccaaagttctgggattataggcatgagcaaccgcacccagccttgttaatatttctttttcagagtcctcagatccattatttccagggcttttagttgcagccagtgggagagacagactgcttactctatcttacttagaactagaaccccgagagattcagttttttttaactaaaaaaaaaaatttattttgaaatggtcttattctgttgcccaggctagatactgtggtgtgatcaccgcccactgcagcctcaaactcccagcctccaatgatcctcttaccttagcctcctgagtaactggaacctagaggtactcaacaccatatccagctaatcattattattattattattattattattattattattattattattatttgagacagagtcttgcactgttgcccaggctggagtgcagtggcgtgatcttggctcactgcaagctccgcctcccgagttcacgtcattctcctgcctcagcctcccgagtagctgggactacaggtgcccgccaccacacccggctaattttttgtacttttagtagagatggggtttcaccgtgttagccaggattgtctcgatctcctgacctcgtgatccacctgactcggcctcccaaagtactgggattacaggcatgagccaccgcgcctggcctattttttaaatctttaaaaaatttttttagagacagcgtctcaccatatttcccaggctggtctcaaattcctgggctcaagtgatctacctgtctttgcttcccaaagtgctgggattataggcgcgacccactacacccggccagaatttttttttttttgagacagagtcttgctctgtcacccaggctaaagtgcaatggtgtgatctcggcttactgcaacctccgcctcctgggttcaagcaattctcctgcctcagcctcccaagtagctgggattacaggtgcccgcccccacgcccggctaatttttttgtgtgtgtgtgtgtgtgtgtgtttttagtagagacagggtttcaccgtgttggccaggctggtctcaaactcctgacctcaggtgatccacccacctcggcctcccaaagtgctgggattacaggtgtgagccactgcacccagcccagaaatttatcttacatgcttattcgtagaaaaaggaaaacaaatatggtccagccacaatatccccatcgttgtaaccaagtcaacatattagtattgtgatctagttccttcctcctgagcatttttttcatagttgagtaaacataattttcattcctccttttttaagttttaattactttatatttttatacaaaatagagatggggtttcactatgttgaccaggctggtctcgaactcctgggctcaagtgatccttcctcctcagcctccgaaagtgctgtgattacaggcatgagccactgggccaagccattcctcctttttaactctctttttaaatattcagaattggacatgatga

SEQ ID NO: 93843 - DNA, 20727 bp, Homo sapiens
ttaccctcactggctctggggtcattcgtactcaggaaacaggtcccaagaggtcctagcccagaggtggcagtgggtgggagggagcctagtctacctggaatacccttggtcctcagtgtgacccctgctgcccccatgtggcctgggcctgcactgcaactgggcttgaaggaacctcccctgggtgacacccctcctgctcagcatgtggacacagtgcccacctgaggtgacaagatacctacaccctgtgtggagggatgacaactaggagtgggagggtcaggacacctccacagaagtggcatctaagctagagatggagcaccaggaagttccagccagggcaaccgcatatgcactgggtcactatgttcccagaattcttgcctgagcttggtcctgtaggatagtgctggaaagctggtcttaactagtgtttactgattggtaacgcctgcctgaagcacactattgtgatagtggaaattaacctaaccacaagaatcacagtgccttaatggatcagtgatacctgccctgggcagaaatagaaccacagccaggcatggtggctcatgtctgtaatgccagcaccctgggaggccgaggcaggtggattgcttgagctcaggagtcagatcagcctgggcaacatggcaaaaccacttctctacaaaaaatacaataagctggacctagtggcacatgcttatagtagcagctattcaggaggctgaggtgggtggatcacttgagcctgggaggttgaagttgcagtgggctgtggtctcaccactgtactctagcctgggtgacggagagagaccctgtctcacacaaaaaacaccttgcagaactgcagggtcacagatcaggataaggactaatggtggtacccagatacccagacaggttcgaccataaagcaggaaacagcacactgaggaaggagagtttaatgttgtgggaaggcagcaggatgcttagggtgcgggctccagcaggggagcaccttggccctggtcttgggccagcagacscagaagcagggagtgcagagcccggcaaacaggtgtgtagcccaggcggctcaratgcaggtaatcatacatgtcatgatggctgatggtgccatctgagtgcacaaagccagggtcggcatctaggaagtgggcccgagggtggccagccagtgccgcccgtaccagctcgttcacctgtcggttcttctcccgaagtgggttgggatgttggcctcgcggaagcaggccctgagcaggaacacgaggcgtagtaaggaaacaagcatttgagtatcttgttctctgtgccaacctgtcctccacccaccaccatgaagtttccagctgcagaaaacactagggatgggcaagtggggagggtgggagggtagttcctaaatatcacatcctagccctcatttagcaagagacttctgggttttaccctctttcgttttcttttttttttttttttgagacagagtcttgctctgtcgcccagactggagtgcagtggcgcgatctcgactcactgcaagctccgcctcccaggttcacgccattctcctgcctcagcctcccaagtagctgggactacgggcacccaccatcatgcccggctaattttttgtatttttattagagacggggtttcaccgtgttagccaggatggtctcgatctcctgacttcatgatccgcccgcctcggcctcccaaagtgctgggattacaggcgtgagccaccatgcgcggcctagcctctttccaagtatcacttagaaaaatgttgacattggctaggttcagtggctcacgcctgtaatcccagcatgatgggaggcagagctggataggtcgcttgagcccaggagttcgagaccaacctgggcaacatggtgaaaccccatctctaacaaaaatacacaaaaattagtgggacatgatggcgtgtgcctgtagtcccagctactcgggaggctgacgtgggagaatcacttgagccctggaagcagaagttgcagtgagctgagatcatgccaccgcactccagcctgggcaacagagccagatcctgtctcaaaaaataaataggccaagggaggttgctcacgcctgtaatcccagcactttgggaggctgagacgggtggatcacttgaggtcaggagtttgaggccagcccggccaacatggtgaaatgccatctctactaaaaatacaaaaattagccaggtgtggtggcacgcgcctgcagtctcagctactgtgaaggctgaggcaggagaatcacttgaacccaggaggaggaggttgcagtgaggccagattgcgtcactgcactctggcctggcaacagagcaagactctgtcccaaaataaataaataaataaaagatatcaacatcatggctcatgccaagggatcaatccgttttcagaagaggaaatatcctagctacctacaagtgatggagcctagatttaccccaggaatgcctgacaacttttggcctattcaaggttttttgagggtttttcttttgttttctggtgagacagggtctctgtcacccgggcgagagtgcagtagcatgatcacagctcactgttaccttgaattcctgggctcaagtgatccttctcctttagcctcccaagtagctggggttacaggttttgcgcaccatcatacccagctaattctttttttttttgagatggagtcttgctctgttgcccaggctggagtgcagtggcacaatctcggctcactgcaagctccgccccccgggttcatgccattctcctgcctcagcctcccaagtagctgggactacagacgcctgccaccacgcccggctaattttttgtatttttagtagaaacggggtttcaccttgttagccaggatggtctcgatctcctgactttgtgatccaccctcttcagcctcccaaagtgctgggattacaagtttacaggcgtgagccaccgcacccggcttttttttttttttgagacagagtttcgctcctgttgcccaggctggagtgcaatggtgcaatcttggctcaccccaacctccacctcctgggttcaagcgattctcctgccttagcctcccaagtagctgggattataggcatgtgccaccacgcccagctaattttgtatttttagtagagatggagtttctccacgtgtggtcaggctggtcttgaactcccgacctcaggtgatctgcttgcctcggcctcccaaagtgctgggattacaggcatgagccactgcgcccagcccatgcccaactaatttttttttttttgagacggagtctcgctctgtcgcccaggctggagtgcagtggcacagtatcagcttactgcaagctccgcctcccaggttcatgccattctcctgcctcagcctgccaagttagctgggactacaggtgcccgccaccacgcccggctaatttttttttgtatttttagtagaaatggggtttcaccgtgttagccaggatggtcttgatctcctgacctcgtgatccacctgcctcggtctcccaaagtgctgggattacaggcgtgagccaccgtgcctggcccgttttttagtttttcaatacccccaaagtcttaagccatccctgggcaaaaaaggctaattggtctcggagcatattctcaaccacagccactctgaagggtatagcaagctccaacgtgagattctgcctaaaagccactgctctatgtcaagctgcctagaactgtgccaactgtggctatatctgagggggtcccagaccactgccattcttcctttcccactctcccagcctctcaccagcaccacaacccgggcctggggctgtcgctcattcaccagttgcacaatggccttgatgccaccagtcacctgctctgctgtgtgtccgtggttgttggtgcccacccagaccaccacaatctgtggaaaaagagacatgaagcagcggtgagggggcagccaaaagatgttttagagccccacccaagccccgctcaccttgggccggatgtgttccagctccccattctccagccgccacagtacatgctgtgtgccgtcaccaccaatgccaaagttaagtgcatgcagaggagagaagagctcgcgccagatctgtgggcaagaagtggtgtgggcaagaagtggtaggggcacaagggcactgtccgcatggaccatccccctctgtccaggtgttaaccaaatgccattatggaagaaccttacttcatggaagcagtcttaaaattttacctggagcaaactccagcatggctgaacctcactttatagaaatctattagagtctctcacttattttattttattttatatttttgagacagagttattttatttttgagacagagtctcactctgtcacccaggctggagtgcactggcactatctcggctcactgcaacctccgcctccctagttcaagtgattctcatgtctcagcctcctgagtagctgggactacaggtgtacgccaccacgtccagctaattttttgtatttttagtagagatggggtttcaccatgtgggccagactggtctcgaactcctgacctcaggtgatccacctgcctcggcctcccaaagtggtgggattacaggcgtgagcccatggtgcccagcctatttattttttgagacggagttttgctcttgttgcccaggctggagtgcagtagtgcgatctcggctcattgcaatctctgcttcccaggttctggcgattctcctgcctcagcctgccaagtagctgggactataggcatgtgccaccatgcccagctaatttttgtatttttagtagagacaggatttcgccatgttggccagggtggtctcgaactcctggcctcaggtcatccgcctgccttggcctcccaaagtgctgggattacaggcgtaagccaccacaccctgcctagagtctctcactttaaaccaagccccaggctctgttgctcatgctgaggtgggcggactgcttgagcccaggagttcaagaccaacctgcgcaacagggcaaaaccccatctctacaaaaattacaaaaattagccaggtgcatggtgatgtgcacctgtagtcccagctactcggagactaaggtgggaggatcacttgagcccaggaggcagaggttgcagtgaacagagatcataccactgcacgccagcctgggtgacagagcaagaccctgtctcaaaaaccaaccaaccaaccaaccaaccaacaaaacaaaccaagccccatagaagcaagactcacttcatgaaaatccagtctgcttgagccatgcattgaatcaatggcattacagttgaaacttattttgatgaaacccattacagttggacatgctttgtggaaagatattattatgattgagtcctctttgtggagtgccattagagttgcccttcgcttcctgtaaagtgactatagctttgtgtaaacccaacagggctgcgcactacttaaagcaaacaagaaagagcctcactttaggcaagcctatggcaggaaagcctcattttaggtcttagtacattatacacaaatccaatctgataaaaccaaggcatacatttctttctcaatagaatgttgcaccttacaccaagattctcagagcctcgggctgcctgaggccaatctgggtactctcataatacctcacctggcctgggttctggtccagatgtgtcagcatggacacagggctggatggggcagggggagagggactgccctcacctcgcactggtgcatgagctggaccaaggagtccccgatgaagacgacttcgggttccttatctttgctgtcagccacgaaccgatggtgctgcgggagcgcgcgagagggagtcaatggcatgcacgctccagggcccgccccgccctgctcccttaggcagcgcctcctcaactgccctcagtttcccaatcaggtagtgagagtggcacgaaccagccgttctcctgagccaccccccgcgcccccggactcctcaatatcccaggtgggaacgctcaccagggacatccagcgcccgtcgccctgtacgtcctgcaccggcgtgggcttgctggctgggttctcctctccactcatcttggcgccgcagctcctgcaggatgagcgagtcgggtcggcccgggagtgttccgaacsgagctggctccgccacgcccactcctacccctcgcggcaacaaaggaccgtcccaacgctagcacacccgcggaggacgaaggccgatacagggcgccgcctcctctccagggacggaagccttcacttaggaggtaggtggaatcaggaaccttcgcttcccccacgacggccgcacagtgggctcgcccggcgcttcccgctcgggccgctgactcccaggccgcgcacccggcacggggtggggggagggagaggcgagaccatccagctcccgaggcggggaggagggagaaaccacccaccggtcacggggaggggcgaactacctgaagagtcgagagtgggcggggaaaatctagccctctgtctagcaaatgggaagaaaccatttgctgtacagagtgaaatgtgcggaagggaccacctactgttgcgggggggggggtgacccattcacgtggtggggggaggggagcgagtggacgagtccattcttatattcccttgaaggggtggctcgaatgcacctggctgggggggacgctcctattttctactgatgtgggggacagaaaaggaagatgacaaaatgtgaaaattcgaggctcccttctaaggagccactctaaggccgcgccagggctttagtgagcctatctactcgtgggcttcccctactcaaaacaccgtgggkgtgtgtgtgtgtgtgtgtgtgtgtgtgtgtgtgtgtgtgttgaaatctaaagtacatatctttgcattcaagacatcacaggacccctactcaaaacaccgtrtgtgtgtgcgcgcgcgtggcataacatataaactacatatctttgcattcaagacaccataggacctgcttggagggtagaagaaggtgcagaaagagaaaggaaattagagacgcctccagggctcaggtccagtctggcgtccctccggcagatcatcttgcagatctgcagcctctacactctctctaaacccacaggccaactgggtatgtctgagctctgaaacctacatccatagccaaggccacctagggtcgcgcctctcccccaacgctgccccaaattaatctcagacctcagtgtcttctcagatctccctcttctctgggaccaggtggggggctcactccctgctaaacgtcctggtcatgttcttgtagcctcactccaggtgggaccttcccatgtattcattccttcgaggtggattgatactgagacagagatgagtgttattcattgtgtttatgttttcaatccacttycctggaactgggccgggcacacagtggttattccacaagtgcttgctgaatgagtagtaaatgagtgggtcagctcctgaccttgtcccaatgtgtttagggagacagatccagacacagaggtgtaggggtgtcaaagttgtgtttgagggagagacagggacctctggggaggaagaggagaaggactctgaggactatgggtttcctaggagtagtatctcagctgggtctgaaagataatgaagaatgggcaagcagaaagaaaagacacaggtaatcactttcttattaggtttggggaatatcgtggaatagcttgattttaaagtctgagggakgccagcatggaggctcatgcctgtaatcccagcactttgggaggctgacatggtcggatcacttgaggtcaaccagcctggccaacatggcgaaaccacgtgtctactaaatatacaaaaaaaaaaaaaaaattagctaggcatggcagcacacgcccgtagtcccagctacttgggaaggctgaggcaggacaattgcttgagtctgggaggcagaggttgcagtgagctgagatcgcgccactgcagcccagcctgggcaacagtggcccagcttgggtgacacagcgagactctgtcttaattacaaaaataaacaaacaaataaagtctgagggagccaggtgcagtgatgcatgcctgtagtcccagctactggggaggctgaggtgcgaggatcgcttgaacccagaagtttgagaccagcctgggtaacacagtgagaccctgtctaaaaaaaaaaaaaaaaaaaggctgggcgcggtggctcacgcctgtaatcccagcactttgggaggccgaggtgggcagatcacgaggtcaggatcgagaccatcctggctaacacggtgaaaccccgtctctactaaaaatacaaaaaattagcggggcgtggtggcaggcgcctgttgtcccagctacttgggaggctgaggcaggagaatagcgtgaacctgggaggcagagcttgcagtgagccgagatggcaccagtgcacttcagcctgggagacagagcgagacgccgtctcaaaaaaaaaaaaaaaaaaaaaaagggcaagtgcctgtagtcccagttagttgggaggctgaggcaggaggatagcttgagcctgggagatgaggtggcagtggcccatgatggtgtcactgcactccaggttgggtgacagagtgagtccctgtctccaaaaaagaagtcataatcagctaggcacggtggctcactcctataatcccagcactttgggaggctgaggtgggcagatcacttggcgtcaggagttcaagaccagtctgaccaacatagcaaaaccccatctctattaaaaaatacaaagattagctgggcaaggtggtctgcgcctgtagtcccagctacctgggaggctgaggcaggagaatcgcttgaacccgggaggtggaggttgcagtgagttcagactgtgccactgcactccagcctcagtgacagatttaaattccatctcaaaaagaaaaggaaagaaaagaaaagaaaagaaaaaagtcttaattatgccttcaagtcagtgatataagagagaattttttttttttttgatagagtctcgctctgtcgcctaggctggactgcaatggcgcgatctcggctcactgcaacctctgcctcccaggttcaagcgattctcctgcctcagcctcctgagtagctgggactacaggcgtgtgccaccacgcccggctaattttttgtatttttaatagagaagaggtttcactgtgttagccaggatggtctcgatctcctgacctcgtgatctacctgccttggcctcccaaagtgctgggattacaggcgtgagccaccatacccaaccgagaaaaaaatttttaaaaataaagtcttagaggataagttggagcagttcctgaagcaaagcttagtgagaaacaaagcttccaggcattcttcattcaccaggcccatttcaagttagacatattggtctagtttatccttctagcaaccaaatgaggaaggtagttttattaccaacccaattttacaggtcagaaaactaagtctgaccagttacaaacatttccaaggtcacacagcccagttgtgccattttgggcatttaaaccaagcctagctatgaatcacaacactacactaacttttttttgagatggagtctttctctgtcacccaggctggaatgcagtggtgtgatctcggctcactgcatcctccacttcccaggttcaagcaattctcctgccccagcctgctgagtcgctgaatatacagtcgtgagccaatgcrtgtggcctaatttttgttcttttacagggtcttgccgtctccctcaggcgggcgtgatcatggctcactgctgcctccacctcctaggcttaagtgatcctcctgcatcagcctcccaagtagctgggcccacaggcaagagccactgcgcccagcttatttatttatttagagacggagtctcgctctgtcgcccaggctgaaatgcatctcggctcactgcaagctccgcctcccgggttcacgccattctcctgcctcagcctcccgagtagttaggactacaggcgcccgccaccacgcccggctaattttttgtatttttagtagagacggggtttcaccgtgttagccaggatggtcttgatctcctgacctcgtgatccgcccacctcggcctcccaaagtgctgggattacaggcgtgagccaccacgcccaaagctaatttattttttgtagtcagggtctccctatgttgtccagggtggtcttgaactcttgggctcaagccagcctcctgcctctgcctcccaaagtgctgggattacagacgtgagccaccacgcccggccaactgtataagttttctagggattatgtctgtggctgcttgggggacagctgtgcatgggggctaccatgacccttcttccctttggcacgcctggtctcaactagccctcgaaagaccgctgatagctatctgaaccaatcagcattcaggaagggggcggacctagtgaacctcacagccaattgagggctgggaggtgctgagaccaagaaagggagatttctgaaattgaggctgggaggggaggggctataaccggcgcttccctggcacgcgccgctaggtttccgtcctctcagagccacgaagccaaagggcatggaaagggcacgcgcatgcgtgtgggggagcccgaggcccggaacagcgccaggtgacttcgagagctggggtcaccgcggaaaagaagccattgcgccccacagctacgtgaagtgggaagggccggggttcgttggggcgagagaggtgcccttcccacaccctgctcctgccaaccgtaccccactcccttcactctgcccaccctgccctaccgcggctggccaccatgcttcctctcctaccctaggcccttcctttgtgatcaggccctgtccctgatcgcgcctctgtctcccttcctgttctcttgaggttttctcaggctttccagacttctcttgctgctctccctctcctgcttctctttctctactatctctttccactttctgcattcccctgtacctcgtctacccctggatttctccgtccagaatcactttctggtcccccaaatccctccaatctcatgaccccttcaccaccctccatcttttgttgttgttgttgttgttgttgttgttgagacagagtctcgttgtgtcccccaggctggagtgcagtggcgcgatctcggctcactgcaacctccgcctcccgatttcaagcgattctcctgcctcagcctctttgagtaggtgagattacagtcattcaccaccacgccggctaatttttgtatttttagtagaggcgaggtttcacatgttgcccaggctggtctcgaactcctgacctcaaatgatctacccacctcggcctcccaaagtgctgggactacaggcgtgagccactgcgcctggcccccaccctccatcttttttttttttttttttttttttttttgagatggagtctcgctcggtcatccaggctggagtgcagtggcgcgatctcggcccactgcaagctccgcctcctgggttcacgccattctcctgcctcagcctcccgagtagctgggactacaggcgcccgccaccgcgcccggctaatttttggtatttttagtagagatggggtttcaccgtgttagccaggatggtctccatctcctgacctggtgatccgcccgcctcggcctcccaaagtgctgggattacaggtgtgagtcaccgcgcccggctcaccctccatcttttaactgtttccccatgtccctgttcctaatagcctctctctgtttcctggcttatcttcccattagctgtgactccttcgacttcatcttacccctgtgattccttatctgaccaaaccttttccaatctctctctgctcacttattttctctcatcttctctctctcttttaagagacaaggtctcactctcttgcccaggctggggcacagtgatgcaatcatagctcagagtaacctccaactcctgggctcaagtgatcctcctacctcagcttccctagcagctgggactacaggtgtgggccaccgaatccagcttttttttttttttttttttttttttgagatagagtctcactctgtcactcaggttgaagcgcagtggcgcaatctcggcttactgcaacctccgtctcctgggttcaagcgattctcctgcctcagcctccagagtagctgggattacaggcgcgcaccatcacatacagctaatttttgtatttttagtagagacaggatttcggcatgttggccaggctggtctcgaactcctggcctcaagtgatctgctcgccttggcctcccaaagtgctgggattacaggcatgagtcaccacacctggcatcatccagctaatttttatttttattttttgtagagatgagggtctcactttgctgctcaggttggtcttgaattcctagcctcaagcgatactcccgcctcagcctcccaaagtgctaggattacagatttgagccaccatgcctggcctcatctggtcattctaaatagtattcccaccacaccccaaaacatctccctattcacttgttttgttttgttttgtttttgagatggagtctcactctattgcccagactgaagtgcagtggcacaatcgtgactcactgcaacttctgccttctgggttcaagcaattctcctgcctcagcctcctgagtagctgggattacaggcgtgcaccaccatgcccagctaattttttttttttttgagatggagtcttgctctgttgcccaggctggagtgcaatggcatgatctcagctcaccgcaacctccacctcctgggttcaagtgattctcctgcctcagcctcttgagtagctggaattacaggtgcatgccaccacgtctggctaatttttgtatttttagtagagatggggtttcactatgttggccaggctggtctcgaactcctgacctcaggtaatctgcctgccttggcctcccaaagtactaggattataggtatgggccactgcggctggccaatttttgtattttcagtaaagacagcattttgccatgttggctaggctggtctaaagtgacctggcctaagtgatcggcctgccttggcctaccccagtgttggtattacaggcataagccaccgcgcccagccctccctattcactttgctactccccttgrcttatctgcatgctgatggccaccctatctttatattccaggacaccatggatacccagggaccagtctcccagccttttcagcagcctgagaaacctggtcgtgtccgtcgtcggaagactaggcgggaacgtaacaaggccctggtgggcagccycggccattagcccaccacgatcctcctgtggccattcgggatccacctgtggtccctactgcctccaagctcgtggtcataacccagggccggctgagccgggagcaccggggtctcttcaaccacgaggtgaaatccctagatgttgcaaggctgcttagcagtgggaccctggtgccaggcagccccacactccccgccaagccctccccaagcccaggcagggcccaggaaccagccccacggtccagggacaaagagaaccaggtgcctggaggttcgggcccaggcccacccagttccccagagttgtctggcgtggggcagctgctggcagagctgcagtgtcagctgagtttgccacaggccttcccccggaggaacctgattcaggatgccagggatgccatmgtgcacaccttgcaggcctgtcatggttgtgtgcctgaccttgccctggtgcttcggggctgccagccacccttgccaggtgagcgtccctcctgcccctgtactcccctttcctttgtcggctctagctcagctagcctctatgcttctttcctctgtgccaggggccaagcctggggtctctgagagaaagatgacacccttctggattaatagccctgatcaagtcccagagcaggagaggcaaaggaagcaacaagggacaaaggagttcaccttccccatgccctacacctccagcatgcccactgcgcacagggggagtctggcaccgccaagaggtccctggccaccatactttccctcactgtcttcgccatctggaacagcctggggtcccccaacagcgtttgacttgttaaaaagcatctggctggtagccacgccacyccctcctcggccctggggggttggcctccctcagcccctgcctcagccttcatcacccctgttgccccgaacctctgtcctggactggagccccagccccscttccccactgcccagcctctcctgggtagtagcccagagcagtccggaagcctggtcttttccacccatgagactgtactgaggagaggctgaggctagggctggggacagatatcttgtactcccagtgacctcaataaagtacttttcatggtcctcttgattttcagtgagttgctgactcagaagagcagcttttcttagctctgagttctaggtccaagatggaggggaaggtactgttgcttgttaccttcatagggcctgaggagccagcatggtggggaaaattgggacttcaattagtccaacacatatgcccactgtggctaactgtgtacctgaccctgagctctggtgatgctggggctccagagtgagtgagacaaaggccttgtcctcatgaggctcccagtttggtggtcggcacacacaaccccagctccagtgattgtgtctaggagagcaagagaggtgcaggggctggggcagtccaaggagggagtgatggctgccctagtgaggagggaattcttcgtagaagagctgtgtttttctttctttctttctctctttctttctttcttttctttctttctttttccttccttccttccttccttccttcctttctttccttctttctttctttctttcttttttggagacagagtcttgttttcttgcccaggctagagtgcaatggcacaatcttggctcactgcaacctccgccacccaggttcaagcgattctcctgcctcagcctcccgaggagctgagattacaggtgtgcgccaccatacatggctaatttttgtattttaagcagagatggggtttcgccatgttggccaggctggtctcgaactcctggtctcaagtgatcctcctaccttggcctcccaaagagctgcaattacaggcatgagccaccgtgccctgcgaaccctctatttttcaagggtggtggaaacttggtacttgaggaaaagaacatttcaggcaaggggaacagcatatgcaagtcctggaggaggctgcatagcagatacagggccattttcactcagcaaatccctaggccatgctgggacctagagtaagccacatctgggcctgcccttgagcgcctcctggtctgtgaacacagggaacagtgtatgtgcaggctcagggcaggagtgacagatcagggctgaatctggcccacaggctttttttagtttcacccacgatatgttttaaatgttggaatcaattgcctactgttacaaaccaggcagtttgctttttttttttaaattgcatttctggcttctttcagaaggaaagaaaaaataaaaaaggatctggcagcagcactacaatccttcctggcaacaactggccaagtagcagaggccccctctttgtgggatccatgctctccattaaaaatgtttcacttatatttccagcttggccccttggcttagaaaatttgtaaaaaatggtattttgagcagcccccgttttctgcagtggagaaggatgaagctagaaatgtttgttggagtctgatcaggaaaatcaaggtgaagggcatggcttctactctggaaaagcctttctagggcttgctgttgtccactgggaaaccatagggttgatatctgcatagaggggactgggctaggagatcatagggctgaatgacttggcccaggtcttatggtggacaagtgaaaaagtaggggtcaggctgggatttgaatgaacccaagcaagttattttaacttggatctgaaacatgcttttggctatctcacactaccacctctgtctctcacagcaacccagcttcacagcatggtaagcagtgacaggtcatggtcaggcagaggggtacggtggttatactgaagcctccaccaccaccatgtggtgtaacaagtggcttcccctctctgtgcctccatgggcactttgcagggtgcatcagatctagaacgctggcaactccaggatggacacagctggggatggctgcaatagaggtggtgatgggcaatcaaagacttgttggccaggcgcggtggctcacgcctgtaatcctagcactctgggaggccgaggtgagcagatcactttaggttagaagtttgaaaccagcctggccaacatggtgaaaccctgtctctactaaaaatacgaaaaaatcatcccgggcgtggtggtgggtgcctgtaatccctgctactcaggaggctgaggcaggagaatcgcttgaacctgggaggtggaggttgcagtgagccgaggtcgcgccactgcactccagcctgggtgacaaagcaagactcgtctcaaaaaataattagtttggggactacattgaggggaggccaggacagagcatgggtctggggatccggagaaggcagtctggaggaggcatggctttggaagacgtgagttcagtttaggacacaggaaaccataggtatctacgggactccaggaggggagggctggggcggggtgacagaggatgaacgtccccctcccacgcggagaagataggagtcaggttgggccctcttggaggagggggcagggagcgcggcgcccggcggcccctttaatcgggggcgcgcgctggccagcccgcgcgctctcgcctccattgccgggccagtgcgggagccggagcggagccggggccggagcgggcggaatggagcccctgcgcgcgcccgcgctgcgccgcctgctgccgccgctgctgctcctgctgctgtcactgcccccccgcgcccgggccaagtacgtgcggggcaacctcagttccaaggaggtgagcatgccgagccctcctctgcggcccgccggcccccgggggacgcaagggaggcgaggggagcgggtaccgcctcgccccctgccgcccctcctggcggactccgggagcctcgggggagtggggccgagggcgatgggggactgggccagagtcgaggctaaggggagccgtagggtcgcggccagacctgggggttgtaggagggacgttgaggtcagagctgagcggggagggggagcgggttgggagagtcagagtttgggaagggtggtgcagaggtggtgctgaagggacagcacttttcactcagcagagagccccgagctcgccgccacactcccgctcaggaccgggagggggccgtttggaagattcccccgcgcgggatggtctttgggagcacggggtggggtgcaggggagtgtggatattgggggaacggggttagatattggccaggacatgaggtggccaggatgagcatctggcccctaaggtctttctccccagaaagatcccgggaaatgcagggaggagtgtttgaatggaggggaggaaacttgggggggcaatggagggagaaaatcagggcggcaggaatcctggacccacagtgacgggatcagggaaggagtttggaggtgacctggtctccttctagtacttgrgaagccaggtacctggggggtagggaagaaaagttgggggtctatggagtaaagagttcttgaaggactcagcggagggtcagactgggcccctttttcaggactgggtgttcctgacaagattttgtttcctctcggattacggccgactggacttccgtttccgctaccctgaggtgagtctcccccaacactcgccatgctgaggctgggtacttcccttggcctccaaaggcacaggctgccccagctcccggtccccaacatctctggtctgcaggccaagtgctgtcagaacatcctcctctattttgatgacccatcccagtggccagccgtgtacaaggcaggggacaaggtgagggctgtgaagagggcatagggggagaggggagaaggtcgttgctggccgggggagtgaccctgtccctgccttccccaggactgcctggccaaggagtcagtgatccggccggagaacaaccaggtcatcaacctcaccacccagtatgcctggtccggctgtcaggtgcaggctcagcctgggggagtgggcaggtgctgaaggatgaagccttcggggcatcaaggacaggcttcagccttctcgtttgtccccaggtggtatcagaggagggaacccgctacctgagctgctccagtggccgcagcttccgctcagtgcgtgaacggtggtggtatattgcgctcagcaagtgtggggtaaggggctggggtggccacctggaccaccttctctttgccttcctgccaacccccaacttgcccagggccccccttaggcctccctaccccccacagggtgatggattgcagctggagtatgagatggtcctcaccaatggcaagtycttctggacacgacacttctccgctgatgagtttggtgagcacgtggggacctagaaaccaggctctctgtgggacaccagagctgggtgcccactgaggggacatccacctgaatgaaccttactcctcctaccaaatcggcagggatcctggagacagatgtgaccttcctcctcatcttcatcctcatcttcttcctctcttgttactttggatgtgagtctggcacatggggtgtgggggaagagataggagggagcagggttgggggaggtgagctgctctccctttctgcctgtggacagcctttccctaccttgcttcctagatttgctgaaaggtcgtcagttgctccacacaacttataaaatgttcatggccgcagcaggagtagagggtgaggttccgtgtcccaacttttgggttctgaaagagaaggcacttggggccagacacctgggcctaagaggaatgcctgggggcctggactcctgggtcctgggggaggaggggctgggggcctggactcctgggtccaagggagaagggcctgggggcttcgactcctgggtcctgggggagaaggggctggagccctagttcctgggggaggatgggctggggacctggacccctggttcctgggggaggagggggtgggacctgacacccctgggtccttgagggagtataaaggccggaactaggctggacacggtggctcacacctgtaatcctagcacttggggaggccaaggtgggcggatcacgaggccaggagttcaagaccaacctgaccaacatggtgaaaccctgtctccactaaaaatacaaaaattagctggacatggtggcgtgtgcgtgtaatcccagctactcaggaggctgaggcaggagaattgcttgaacccgggaggtggagattgcagtgagccgagatcacgccactgcattccaacctgggtgacagagagagactctgtctcaaaaaacaaaacaaaacaaaacaaaacaataaaggcctgaactcctgagtctgggggaggaggggctgggagcctggactcctgggtctgagggaggaggagctgggggtctggacccctgggtcctggaggaggagggyctgggggcctgagcccctgggtctgaaggaggagggggtgggggcctggacccctgggtctgaggggggagggggtgagggcctggacccctgggtctgagggggtagggggtgggggcctgggcccctgggtccttggggagcagggttgggggctggactccagattctcctagcaggtgagtcggggtagaaggtctggagtcctragggaggaggcgggattcagactgcctggatggtagtgctagagaacagtgatgccccagagctgctttctatcctttcttatctgcccatcctcccctcagtcctgagcctcctatttttctgcatctactggggtcaatatgccaccgatggcattggcaacgagagtgtgaagatcttgggtgagaatgaagctgggtggggagagggtggagcccagggctcaggttgggcatcaggtctgagcctggctctgagccgccccctcctcccttctcccagccaagctgctcttctcctccagcttcctcatcttcctgctgatgcttatcctcctggggaagggattcacggtgacacggtgcccgggcagggcgtgctcgtggggcggctggtgggggagcagggcaggggcagggttggggggctgggtgca

SEQ ID NO: 93844 - DNA, 22891 bp, Homo sapiens
  misc_feature (1)...(22891): n = A,T,C or G
gtacatatggaatatatacatacggaatacatatatggaatatagatatacggaatatatacatggagtatatacatacagaatatatacataaggaatatatatggaatatatacatatggaatatatacatggaatatatacatatggaaaatatacatggaatacatacatggaatacatacgtatggaatacatacatggaatacgtatatggagtacatacgtatggaatacgtatatggagtacatacgtatggaatacgtatatggaatgagtatatatggaatatgtatatggaatgagyatatatggaatatgtatatggaatgagcatatatggaatatatatatggaatgaatatatatggaatatgtatatgtggaatactactcagtcatgaaaaggaattaattaacagcatttgcagtgacctggatgagtttggagattattattctaagtgaagtaactgaggaatggaaaaccaaacatcttatgttttcactgatatgtgggagctaagctatgaggacgcaaaggcataagaatggactttggggacttgaggggaagagtgggaggagggtgagggataaaagactacaaatatggtgcagtgtatactgctggggtgacaggtgcaccaaaatctcacaaattgctacaaaagaacttactcatgtaaccaaataccacccataccccaataacttatggaaaaataaaataaaataatacataaataaataaaaatacaaaaattagcaggtcatggtggtgcgcacctgtagtcccagctacttgagaggttgagctgggagaatcacttgaacctgggagacagaggttgcagtgagcagagattgcgccactgcactccagtctgggtgacagagggagactttgtctcaaaaataaataaataaataataaggctgggcatggtggctcatgcctgtaatcccagcaccttggaaggccgaggctggtggatctcctgatgtcaggagtttgagaccagcctgatcacctgaggtcaggaatttgaggccagcctgaccaacatggtgaaaccccatctctactaacaatacaaaaattagctgggcatagtggtatacgcctgtagtcccagctactcgggaggctgaggcaggagaatcgctcgaaccaccctggaggtggaggttgcagtgagctgagatcgtgccattgcactccagcctgggcgacagagcaagactccgtctaaaaaataaacaaataaattcaaggtctttccactgtgctcccccaaccttgctacacacacacacacacacacacacacacacacacacacacacacacagagttcaagcccatagaaatctggttgtctatggatacaagtcttgagtgatccccaggacagggatagagttgtgttttccaaacagcgaatcttctaattttagcatcttttgcaatctgcacaggctgataatttcccaaatcatcaaaccttggtttctttttgcttaacagctttttcctcattttatcactttcctcttgcttttcaccataaacagcaagaagaaatgaggcttcaccttcaacgctttgcttggaagtctcctcagctaaatatccaacttcgttgctttaagttcacccaccatataactatcggacacaattcaactaagctttctacctccctacgggctccttttctgggaaatgatcctccttcctccagtttccagaaacacgttcctcatttcttcagagtcctcagcagcaggatttttaatatctattttttctttttttgaggcagattctcgcttggtcgcccaggatggagtatagtggcgcaatcttggctcactgcaacctccgtctcccaggttcgagcaattctcctgcttccgcctccctagtagctgggatgccaccacgcctagctaatttttgtatttttagtagagacggggtttcactatgttggccaggctggtttgaactcctgacctcaggtgatccacccacctcagcctcccaaagtgctggcattacaggcgtgagccactgcacccagccaatatctatatatctacctacagctgcctatgatgacttaggtatgctgtaaggcaatgtagacttgctctgaccatgtttagttgatactcgtgagccctccctatagtctttaacatccatatttctaccaacaatctgtgcaaggcaatctaggttttctctatcatgggcctcataatttttccggcctctgcacatcacccaaatttaaagctacttccacatttttagatttttgtttgtttgtttgtttgagacagggtctgactctgttgcccaggctggagtgcagtgtcacagtcacaggtcactgcagcctagacttcccagcctcaagcaatcctcccacctcggtctccccagtagctgggactacaagcatgcactaccatccccaactaattttttttttttttgagacggagtcgcgctttgttccccaggctggagtgcagtggcgcgatcttggctctctgcaagctccgcctcctgggttcatgccattctgctacctcagcctcctgagtagctgggacaacaggcacccgccaccacgcctggttaattttttgtatttttagtagagactgggtttcaccatgttcgccaggatggtctcaaccttctgacctcgtgatccgcctgcctttgccacccaaagtgctgggattataggcgtgagccactgctcccggcccatccccagctaatttatatatttttagtagagacggggttttgccatgttgcccaggctagtctcaaactccagggctcaagtaatccacccaccttggcatccgaaaatgttgaaattacagacatgagccactgtgcccagcctagattttcttttttatagcagcaccctgcttcctggcaccaaaatctgtgttcctctcctctggatggtataacaaattaccaccaccttggtggcttaaaacaacataaatctattctcttacagttatggagaccagaactttataatctatttctctgggccaaaacccaggtgccaatagggttgcacaccctccagaggctctgagaggggaattggtttcctcaatttttccagcttttggagctgcctgtcttgggtcatgtagccccttcttccatcttcaaagcccacaatgtagcatcttcaaatctctctgcttccatcttctcctgtcttctgtttcaaatctccgtctgtctcctcttacacagatacttgtgactgcatttagggctcactcagataatccaagacaatgcctccatctcaacattcttaatcaattctgcaaagtcccttttgccacagaaggtaatattcacaggttccagagatcaggacttgtatatccttaggggtcattattcagcatatcacaggaaggaaagagaaggtgtccctgtgctgtggtttgaatgggtcccccacaaagcatgtgttggaaatgtaatccccaatgcaacagtgttgggaggtggggcctaatgagaggtgtttatctcatgaggcctccaccgttacagatggattgatgtggattataaaaggactttgaggctgtgagttcagcctcttgctctctcttaccctctctttatcctttcaccaggggatgatacagcaagaaagctctggccagatgctggcccctcgatcttggactttccagccttcaggaccatgagccaacaaatgtccaccccttataaattaccaccaggcttggtggctcacgcctgtaatcccagcactttgggaggccaatgcaggcagatcacctgaggtcaggagttcgagaccaacctgtccaatatggtaaaaccctgtctctactgaaaatacaaaaattggccctgcatggtggctcacgcctgtaatcccagcactttgggaggctgaggcgggctagtcacgaggtcaggagatcgcgaccatcctggctaacacggtgaaaccccatctctactaaaaacacaaaaaattagctgggtgcagtggtgggcgcctgtaatcccagctactcgggagactgaggcaggagaatcgcttgaaactgggaggggtccctgtgccagggaccttacatgtttccaggtgtcaccccaacccagaaaggactgcgccccgccgtcctggaaaggccccagcgcatggacatctgagggttcgttcagagctctgtttctcggagctggaaggtggcagaagggagggagcgaatgggatcctctaaaagggatctcagactttcacccagcgggatatgacacttgcaggtgtcccagacttgtgggaaccttgactggaaggctggggttaaggatgaactttctgccgtccagactgtcccctgcagagcagctgctgccagacagcgggagctcccacttcgtgcacaggatgggggcagggagcccgcagccgcaggaggcaggaatgactgtgcagggagcccgcagccgcaggaggcaggaatgactgtccgggaacctcctttcttctccctgaatcccagccctggcatctaaccagggtgcacagtgatggtccagggctgggcccgggactctagctgaatctttcagagtatcccatccctctggccagtggcccaagcgagtgaaccagaatgcttccttgggagttttgaaattggaactggagagaggagctccctatggggaggtaaatgggagctggggccacctgtagtgacatttcctgagttcatggagtaggctagtctgagagagaaaagctgactcagagaaagggagtgataacagggcgtggtagcccacacctgcaatcccagctaatcagctcgggaggctgagacccaaggatcactttaggccagaagtttgtgatcagcttggacaacatagtgagaccctatctgtctctctctcttttttttttttttgagacagagtctggctctgttgcctaggctggagcgcagtggcgtgatcttggctcactgcaacctctgcctcctgggctcaagtgatcctgccacctcagtctcttgagtagctgggactacaggcatgcgccaccatgcccagctaatttttgtattttttgtagagactgggtttcggcacgttgcccaggctcgtcttgatgtcctgggctcatgtgatcagcccatcttggcctcccaaagggctgggattgtaggcacgagccgccctgccaggcccaagggtttttttgtttttgtttttgttttttttaactagtggggtatggtcatgtgcacctgtagtcctaggtactccagaggctgtagtggaatgactgctggagcacaggacttggagattgcagtaagccatgatcgtgccactgaactccaggctgggtgacagagcaagattctatgtcaagaaagagacagagaattaaaagaaaaaagtgtagggagacagagatcctgtctcaaagaaagaagggaggaaaggaggaagggaaggaaggaaagggaagggaggggaggggagaggaggggaggggacaggaggggaaggaggggagaggaggagaggggaggaaaagtggggagacagaaacaggttctgattccagttctcttagtggcttctacacccctcccctcctatgactggagaagttttctgagaaatctccccacccaccccactccctttgttttttttttgttgttttttttttgtttgtttgtttttgctaagccaattgtcattgagtttctatctgaaacccccaaagggacactggccacccctgcctccactctacagaggtggagaaaaggggagaggggcttggcaggcctcccagccagtcatggagggaataggcttcaggaggagtacagagttctggccccattttgggggaaggcactggccgagaagggctgagcaactcctggaggtacagacctctggggagggcaggtgggaggagcagcaatggggcccaagctgttcctggacatgcactcagccccctgccatgctatccacttttgccaggcagaatgacatcccttttcagctgcagacagtggagttggcttggggtgagccaggtggctgggctgggccccatggagtgggtgccaaggaccaggccctgcactgagccttctctcctttctgcccaccaggggagcacctgaagcctgagttcctgaaggtgaaccccctggggaaggtgcctgccctcagagatggcgacttcctactagcagagaggtaatggtgacctggtgcccacccagggtcagagccaggatctgcctgggttctggggctcagagttgtagggggaggcagaggcgagaggggagatctttccttgggttggagatctttccaaatcactgtggccccttcctcatttcagcctgtgtagctccgatgcagaggctggacccaggggcacctttgggctaaagctggaggctggaacctggctagagtctaagccagctggagctgcccagatggggaaaggacgtaggtcacccagataaacctggacaacctgaagccagcgggcaaggcccaggcttgaggctggctcctccccaaatgtccccagctcatcctttcagagtcctaggagctgggcagacccaggggagactccacattcaatcccagctcaccacttcctcaatccatgcccttggggaaatcacagaactttgtgtgccaggtttctcctctgtaaaacggagtgggaggaataatgtatccacctcccagggcttacctgaggatagaaaatgggcacctagtgttctggggcactaggaagggaacttggagaccttttgggcagggcccacacggcaggcactctgagtggggaccctgatgccagggagtggggcctgggcacagagggcaggatggtatggtaactgggaggggaggtggaaacatgggcccagggaggatcagagttggaaatggagaaacagagtggtttggtcgtggggagatactgcctggagggagttgcagtataggggaggtcctcccctgaaggtgaaggtggggagaaaacctggtcaaatcaccctgagtatgagcaatgaagccacctggccctgacaggctggagaaaagatctctgacaccccctgcccacagcatggtcatcgttttatacctgagtcgaaagtaccagatacggggacactggtacccacctgagctgcaagcccgcacctgcgtggatgagtacttggcgtggaagcatgtcaccatccagctgcctgccaccaatgtctacctgtgcaaggtgagcttcctaggccctgtcatgcaggctggggcaggggcctggacccccagagatggaaggtaccagttggtacatattacatattagcttcacttccactgtcctcagcagacataactaatctatcacagtactccttcccctaagcctgaatgaatccttagaaaccttctgaacacagagccccagaggacatcactaatgaatggcagccgggaagggatggagaggaggcccaagaggcttccaagagtctgggttaagttgctcctctcctcmcagcccagtctctcctgccccacttctccrgacagcctgcagatgctgcacagctggagcggctgttggggaggctgaygccagccctgcagcacctggatkggggggtsctggtggccaggcccttcctggcaatggagcagatctccctggaagacttggtgctgacggaggtgatgcaggtgaagctttcctacccacctgccctcggggggactctgggcatggggctgagccccaaccccagctgccctgtcttcccagcccactgccgttggctgcgacctcttccaagactggccctggctggcagtgtgacaggcccatatgaaggctgcccttggtactgagctcttcctggaggcccacaagctcatactccagcctctgaaccacagtgaggctcggcaggacccccagctggcccagaagcaggtgcagttgctgcaggagtggctccactgagtgggtacagcccactgcactgcaccctgctgtctgcaataaacayactgcatgctcttcgcttgtctccaggcttactctgtcactggaagtgggatcagtcccatttctgagcctagacctattaaatcacaaagcatagagtgagtggcactcagtcctctacgtggggctctagttaccttcctgggccaccaggtgcacagtctggccactgcagccccaacccaggccaggaagtttctgggctcctctgcatggcatacactggaggattaattagtataggaagggtataaccaacattttcagggtatgggcccaatagcttacttagctgtccttactgtggggtgtgataggatgtggtgtattatgtagcacggagaattttggattctcatgggtaggttcaattcctgtaattctagaaacaaaagggtttaaacctctgtaatttattctatcaaagtaactcttttgtgagacatatttcttatgtttggggtgggatgctggaggttaggactggcatgaagatatgtcatatgaaagtactagtgtgagtggtagaaaattttttcaaggagatatatgagctgatcataatggaatcaggaatatgatgttcgaattcataaaaaaagacttgttaaaatgagagtttgggtgacgaaatttgtggtatagagttctggtatatatatgttatgcagtgctcctaggaagacaatagtgattacgggatttattatttatttattttttgccctagggcgaaggtggcttttatttcctctcttagggaagagggggaggtgagctttcccaggcacgtcaacctaaggaaggggtcgtggggcccccagcaggggctggaagagctgatcatttggaagaaagggttcattcttgtccacttcctggccctcagctgcagggtgtgctggcaggggttactccccttggggcagctgctcctgcatcagcggaggcacaaggaggtacctgctggtgttcacaaagaggagggggcaggtgccgcgagtgagggagagagggctggggtgactggccccacaccaatgcctgcctagtatgatcactttcataaggcctggctggtgggactcctccaggaagggcctgaggggtcccttggcagtgctccatgcgatggctggtgctttaaatgtccatctcaaaactgtgcttcttcactgcccgccctgcttatcttctggactattgctcaggtggctctggctggcttccgttggggggatcatcactggcagggctggtgaccccgggaatggtgggcagatcccttgggagtgttttggtcacgggtaagtttcaacactccatcaggaatttccagtggtagatgatcctggtacctcctggggtggtgctgaagagcatgccgccgggggtcgcgctgtattccccgggcgggtgggagctgcttgccttcgccaagcaccacctggcaagtggcagggatggcccagcttggggtctgctgcagctgctgtccccagatatggtctcctgtgcactgcacccacgaacctcttgcggccttcagggcatttattataatgatatttatatagtctgctataaagaacagggcaaatgggcctgcagcatattcgacgttaaagcccgagattaattctgattccccctctgttaggtctaaagaggctcggctggtttctgctagtgtggaaataagtcatattatggccagaggtcatgatggtaggagcagccagagaaattcttctgttccaatgagtatatacaaattaaatgaaccacttattaataggactgataggaggataatagctagagtgacttcatatgagactgtttgggccactgtacatagtgcaccgatgagtgcatatttcaaattagatgctcatcctgatcacaggatagagtagacagctaggcttgatgtggctaatataaacaggaggcctagttaagattaactagagaatggggtatggggagagggattcatatgaggagggcaatagatagagctagagttggaacaataatgtatagggggtgtatttttattacattattgtacattatacaacaatatgttaaaagttttattgcatctgccactttcattgccgagtgccccctgacttcctggtggtggtgtccccactgctcccgaagctcccaggttcctgtgtctctttctcccaattcctttctagtcatagttcaggctccattcacctgtggatgctcccagcctctacttctagaatcctccagggataattctcattgcctcctcctcattctggaccctgcaaagcccctttcgtcaggttctgcaatcaaagtccggccctgggaattcccaggcataatcccttctcagacagggtgtctgtgaggtggcgccacgggacacagacacacgtgagagggggagagtagggtcacggctgccayacctttgccacgggcctctgccagcctactcctgggcctccttagaatccttgatgctgtgagaattgcaggcttcctggccttatgacaacacaaagggaaacaagaggttccagaatgcagggtcctgggcccagatcggagagggcacagggccagggactctggccagacataggcccaggtctgtggctggcyagctgcagctgtggggcctggcatgtgtctcaacatggccctggagctctacatggacctgctgtcagcaccctgccgtgccgtctacatcttctcgaagaagcatgacatccagttcaactttcagtttgtggatctgctgaaaggtcagctcccactgctgcctggcaggcctggtcctggggggaggcaggacacacagattggagctttttttttctttttctttttggtagagcctcactttgtcacccaggctggagtgcagtggtgctatcttggctcactgcaatctccactgggttcaagtgattctcccagctcagcctcccgagttgctgggtttataggcaaacgccaccatgcccggctcattttttgtatttttagtcgagatggagtttcaccatgttggccaggctggtctcgaacccctgaccaaaagtgatctgccccgcctcagcctccaaagtgctgggattacaggcgtgagccaccacgctcagattgataggggcatttctgagaagcagggacagagacaagggaatcaccccagaggtccacagggaaggaaaagatgccacggggcttgtaggctgcgtccctgcctagcctaccttagccactccccactaatgatagtccccacgccacagatgaacaggctttttgaggagaagggggaatgaacagcagctgggactccctgggctcccaccaggcaccctggcttcsttgtgggattctaggaccttgtgaactcagcacctgcccaccaggttggcaaagggggcagaagtgcacagtccgtctacacccatcctccccagtgttcagaaaggctcagggctccactgctcccgagtgagggtcagaggggtgggctccmactccatcccgagcacagagggactccaaaactcagcctgcaaaagcagaagcctctagaacacagaggaagagacaggraagctgtggaaatgaacgggctgcgagtggagcccccagaaatgtttccaactggaggcggctggtccaggaagagtttcagttcctgcccccacctcaggttccctgttaagatgaccctgattgtgtccgagaagcttccctttggatgtccagctgtgtgctgggcctggcttccttaaagtggagacagagtgagagcgatgggattgcggatgggacccaggccctcagggcttcaggtgattcaaaggctgtgttttcagatccagctttgggggtgggcactggaggcctccrgcttctgggtaaaagggtcgtcctggtcctgggacacaggtaggaggcacgggagtcaccaaacctagggtggagcaggctgggagccagcagttctgatcscagtccggttctgcaactgccttgccctgtgacctggggtgagmcgcmatgtccctccgggcctcagtccyctcttcttgagaaaatagagagggaggcgtttgkgkctctgggagtctcagttctctctcccctggagtcccacagcctcagaccttccctgcycctcccaggtcaccaccacagcaaagaatacattgacatcaaccccctcaggaagctkcccagcctcaaagatgggaaatttatcttaagtgaaaggtaagtcttccctggggcccttgcaccatctgtctctgctyctcctgggaggttcagtgcgagcatttgtctgtttgaccatggaaaatctcacacgtgcactaaaggagagtgaatactaactaatgagggacacgaggaaccccacaaatccatcgcccagctctgactcttgccaacttggggtccagtttacatcatttctattcccctgcctcccagacaccccatcattccattcataaatgtttaggggccagctcatgcctgtaattctagcactttgagaggctgaagtgaggggatggcctgagctcacgtgttcaagaccagcctagcctagacaacatggcaaaacccccatctctacaaaaaatacaaaagttagccagcatggtggtccgcacctgtagtcccagctactcaggaggctgaggtggagggattgctggagcccgggaggcagaggttgcagtgagcaaagattgagcttcagcctgggcaacagagtgagaccccatctcaaaaataaaaataagtaagtaaataaatcaataaacgttcaggaacatacctcttagagataagcgttctttaaaaaaaaaaaaaaaaaaaaaaaaagcaacaggctgggcgcggtggctcatgcctgtaatcccagcactttgagaggctgacacgggaggatcgcttgaggccaggagttcacgactgcagtgaactcygattgtgccactgcactccagcctgggctaggatagagcgtagcatcactacgataccattaagatacctcataaaattaacagtaattcctggatttcatctaatacgtggctcctgttcaaaactctctgattatctcctaaatattttcttggcagtttgtttggatcaggatccaaagaagttctgagtcttgcagccagttgctgtctctcctgccactttttaaccgatagctctctccatgccctgacctttttaccttggcatggttgctgttggtgatgataaaggagcccttgtgctgcggaggttcccacaccagccatcaatcagcaaggcctaggacatcccctccgaagcatgtctcccctccrtccccttccctctgtccccatggcctccaccatccccagacaccacaaccttcccgatagttgctggcctccccactatccattctgccccctcgggctcaccctccatccagcaccagagagatggatcctttcatgccctggcttatataatgcctaatcttaagcattaagtccataacctccctgcacctccaggggctaccctccgtggactccacagtgtctctggctgcctcatcactccccaatcacccccacccttcttccagttgcaaccccctactctcttttcttcagatttaccttgctcccttnnnnnnnnnnnnnnnnnnnnggcagtgcccctgaccggccccttctgcagcgcggccatcctttactacctgtgccgcaagtacagcgcaccatcgcactggtgcccgccagacctgcacgcacgtgcccgtgtggatgagttcgtggcttggcaacacacggcctttcagctgcccatgaagaagatagtctggctcaaggtgagcagggccacttctggggcttggggacacgggcacagggaagtcaggaaggctggaggccagttctggccctgctgactgccggcgacctcaagcaagtctccctccctctctgggcctcatttcctcagctccttctcctgcccgccttacagagccgtcaggagtgtggactgaaacaatgggcatgaaagagtcttattagggcgaggggaagggcatacgggaggggctgatgtgactcacccaggacagcattcgaggcatttcattctgaactagagaatctcagcgtcaaaaggcccacagaaggccgggtacggtggctcacrmctgtaatcccagtactttgggaggccgaggcrggyggatcacttgaggtcaggagttcaagacctaccttgccaacattgtgaaacaccatctctactaaaaatacaaaaytattagctgggtgtggtgatgggcacctgtaatcccagctactcaggacgctgaggcaggacaattgcttgaacccaggagktggagttggcagtgagccaagattgtgccactgcactccagcctgggcracagagtgagactccatctcaaaaaacaaaaacaaaaaagagtawggcctatagaaaattrgaagatgacaaataaccagtacatgtgtctctactttgaattctatgcctgtgacagacatcactaatcaatcacaggacttatgcctgctgagctccccaaatccttgtgaacrcatggttcccrgcaacttccaccaatcagaactgctaaaagaggtgaaactgctttatatcctgggaagtgttcaatatctatccagcagacaagagtacagagacctggcagggcaggtggccctggagtrcagcctcctcttccctcctcttcccaaccctggccagttgctgatcccaaagataacagggraggaagtttcagctgagaagatggagcatgcagtggaagaggtgaagaacagcctgcagctctttgaggagtattttctgcaggataagatgttcatcaccgggaaccaaatctcactggctgacctggtggccgtggtggagatgatgcaggtgtggagtggattggaggagggttagaccctgggcagaggtaggactcctctgtgaccaatggggccatcacttgaggataggctggtgaggcgggaaaggcaggcagagctgccatgggggctgcgggarcsaggcctggggscctggactcaatcsgggcaacaggaagcacagaatgttatgaatcaggaaggatcacagttctccacacttgacaaagattcttcggtgtgggaggaccyggagggtgagcctgggatagagaagaacactgcatttcctgctcaatccaccagcatcccagatacctcctcctcttgctggactctccaggaaatgttcactggcttcctgggtgtccttctggccctgcctgtttcccagagctccagacagacagctctggaggacagctctcgtggctgggtctgaggggcatccactgtgcatttggaggcacacctgagtgtggggcatttatgtggcctctacatgcaggggagggtgaccagttctgcttgtcaagacactggccagggtctcaactggccatcctgcacaccagctagggcactgcacactgaccaaagagactaatttgcatatcagccagagatatgcccgagaggagggacctggggtcctggtggattgaccagaaaatgcagtattcttttccttatcccagagatctctggctgatatgaaaattagtctccttggtctgtttgcagggcagaccagcaccaggaaaaatcattctggcctgccccaagggttcagccatatgcttcgtccccaccccttacatttcacccacacacacccattcttkgscttcccaaagatcttgggtgcaaaccaaactcttagtragccagcsaaactgcagggtagactgcccgccaggtctcccatcytagcccctgagcttgatcacagtgggaggctaaacatggaggaaaaaacctgagttctctccctcatccacatatacacacctgggataaggggtytccctggaagaaggcaggattcatgcgaggtcgcaggctggagaagtgggargtgcctgggccaggagccctctcagcatggttcagaaggcttggagcaagaagaccagtgactgaggactctgagggattctggatcctccatccccacctacatctattacatagtctgtgaccccttgctcaggccttgggggtcagcagcctaattctttgcataggtagatgttagggacgtgggcctgaggctgtgggagaggacccaggtggggctggtccccaggctgaccacgtctttgtcttcgtctatcyacagcccatggcagccaactataatgtcttcctcaacagctccaagctagctgagtggcgtatgcaggtggagctgaatattggctctggcctctttagggaggcccatgatcgactaatgcagttggccgactgggacttttcaacaytggattcaatggtcaaggagaatatttctgagttgctgaagaagagcaggtgaccctaggcgcagcctgtcccgcagggcctggctggcttagcaatctgagccaccttccttaaaggaaatrytaaaaaamwaaaacaaaaamacaaaaaaacaactgttctttgcctaataaagaactggaacaaccatcacagctgctgagcagcagacagttggcatatgcatagggtctgatgtgggagtgggtggtggttacagatccttccagtttccaaaaagaattttaaaagtaaagggttaaatatggttacattgtgagtaataatagttggtgacttcaataccccactttcagtaatagaaaaactacagaagaccatcaaggaaatagggaatttgaaaagcacgattaaccaatcgcatacactagacatgaacagaacgttccacccgacaggagcagaataagcattcttctaaagagcacatggaatattctccagtatagagcatatatttggtcctaagtctcaaatttaagatgattgaaatcacacaaagtatgttctctggacacagtggaataaagttaaaaatcaagaacagaaggaaaactagaaaactcacaagcacatagaaattaaacagcacactcttaaacaacaaatgggttaaagaagaaatcacaagggacatcaaaaagtatcctgaacaaataaaaatgaaaacacaacatgcccagatttataggatgcagcagaagcagttctaagagcaaaatttatagctgtaaacacataagttaaagaagaatgatcttgaatcaataacctaactttacaccttaaggaactagaaaaataagagcaaactcaacccaacaccactagaaaacaggaaataataaagattagaatggagataaatgaaatagaaaatagaaaagcaataaaatcaataaaaccaaaaattggatctttgcaaagatcaacaaaattggcaaacctttacttagaatagccaagtgaaaaaaataagggtcaaattattcaccaagaaagaaagtggaggctgggtgcaatggctcacacctgcaatcccagcactttggaaagcagaggcagaaggatcacttgaggccaggagattgagaacagcctgggtaacacaatgagacttttttctaaaaaatatattttttaaaaaaattagcttggtgtggtggtgcaagcctgtagtcttagctaactgggtggccgaggtgggaggatcactcgagtccaagagttcaaggttacaccgagctatgattgcaccactgcactccagcctgggcacatagaagaaccttatctcaaaaaacaaacaaaaacaaaaatgaaaaaatgaaatggaaaccagaaagaaagaaaatggagacatcacattggtcatagagaaattcaaaagtttagaaatactatgaataactatatgtggacaatttagacaacctagatgaaatgggaaaattttagaaacacacaatctaccaaaactgacttaagaagaaagataaaattttaataggcctgtaacaaataaagagattaaaatattaattatttttaaaaattccacaaagaaaagcccaggacsagatggcttccctggtgaattcaaccaaaagcttgaagaactaacacaaagccttcacaaactcttccaaaaaaataaaacaggaagaaatatttttcaactcatactatgaggccagaattactctgataccaaagacagaaaaagacattacaagaaaataaagttacaaagcaatatccttataaatatagatgtaaaaatcctcagcaaaatattagcaaatcaaatccagcagcatattaaaaggatcatacaccttgaccaggtaggatttatcccaggagtacaaatgcagttcaacatacaaaaatcaatcagtgtagcataccatgttaatagaaagtcacatgatcatcctaatgcacagaaggcatttgacaaaacctaacatccttttacgataaaattactcagcagatgaagacgagaaaggaacttcctcaacttgacaaaaagcatctatgaaaaacctataactaacaccatacttcatccattgtgaaagatcaagcgtttcccccctaagatcaggaacaggacaagaatgttcattcacactacttctacttattagggcaattaggcaagaaaaaggaacaaggtggaatctagatcagaaagaaagaagtaaaaccatctctattcacagatgacattacagaaattcttaactcacttaaaaaccattagagctaataaacaagttcaaggctgggcacggtggctcacacctgtaatcccagcactttgggaggccaaggcgggcagatcatgaggtcagaagtttgagaccagcctgtccaatatggtgaaaccccgtctctactaaaaatacaaaaattagccgggcgtggtggcgcatgcctgtagtcccagctactcaggaggcaaaggcaggagaatcaccagagcccaggaggtggaggttgcagtgtgccaagatcaagccactgcactccagcctgggtgactgactgagactccatctcaataaaataaaataagttcagcaaggttgcagggtacaagattaatacacaaaaatcaatagtatacatttgcaataaaggatgaaaaacaaaattaaaaccacacttccatttataataccatcaaaaagaataaaatagaataaatttaaccaaagaaaagcaacatttcaacacagcaaactacaatgtgctgttgaaagaaattaaagaagcgccaccaagcaatctgacctgagaaaacatgcaggttcaacagaatgagtcctgctcttcagcaagcacccatcttgtgttcaagctgggtctatgaggcaagtttggcaacatagacatggacatgccaccaaatctgtaatgtagaaaaggccaagggaaggtggatcaatcattggaaacattcaacaatccatggaagaaatgttaaaaatagaatctcagggtctgatgaagttggaatatcactcttctatgtatttcggttggaatctgttgaacgattggataaagtaaaagtatagggaattattaggtagcattaaatgtgtaataaatgtaaagagagggtgcaagtgcatacaaggaagtgtacgctactgggtttctgttgaattgttcatggaagaccatcagcagttcaattccaaaagcttgtcttaaaattagctgggtgtggtggcgtatgcctgtaatcccagctactcaggaggctgaggcaggagaatcgcttgaatccgggaagcagagattgcagtgagccaagatcgcaccactgtactccagcctggtgacagagcgatactctgactcaaaaaaaaaacaaacaaacaaaaaaaaaacttgtcttgagggactacgccagccttaacagctacaaacatcatggaggaagctgtctgcccattagaagcccagagcccagagggacagactagagcaaatcctctccctcattggagctagatgggaacacaaatctatctgataactaacatgcaattttacatctcttaccttgtttaatcctcacaaccaccctgatgagtagtagtattatgcccattttgtagatgaagaaacaagttcttcaaggggaagggtagcatatgaatgagaggcagaaccagagtcaggacctatatcttgtcttctccttcctaaaactagaaaagtacccacaaccaggcaatgcgtttggtgcagaaaaagcagtagtgaacaaaataggcaaaaatgtctgcctttagtgctcacattgttgtggagaaagacaaacaataagcacagtagagaagtaaaaattagaatgttttgctaaaaagtccataaaattgaatattattcagccataagaagggatgaagtaccgttatatgctacaacatggatgaaccttgacaccattatgctaaatgaaagaagccagtcataaaaggccacatatttcattattccatttgaatgaaatctccagaataggcagctacttcctatccacagaggtagaaagtagatgaatggtaaccaggggctaggggaagaggggaatggggagtgactctttattgggtacagagtttctttttgggtgatgaaaatgatctagaattagataactgtgatgttgacaaaactttgttaatatactaaaaaccactgaattggctttaaaccaattgaattttaaagtatactttgaaagggtggatattatggtatgggaattatatctgataatgaaaatatgattacattgttcaaaagcatagggaagaagctacaaaaaatatgaagcataaattgtggctcttttttattctgaagtgtagatttgaacattatatctcaaaatataaaacaaaaacaaagaaagctaaaagcccttccatttggccatcttggagtaagacctaccacagtccagtgccttttactcagccccacagcctagcctattgtttacatgaaaccctgtagcttccacccctgtttgactgttgggtgtaaagttatgagtgaccatattgggggaagggaggaaaactccccataaacgtgtatcctgggggcctgaggagagacgatggaccaggtagcagaacatgatatgcctacttgtccctatctccttgtccacacataaggcttggaaggcagccatgttgtatatcacgtgatykccaaccaatgagctgattggcttcttcaacaagagcccaggtagagattggtgtctagaggagcccatcagtttctagagaatcaggcctttggcagtggaaactcccctgggaggatgtcacagggtcctcagggtcagacacagagagaaggagacattgggacagagagaagaggcaagaaaaaaacataccttgcagtctgtgaggaacaaggtggcccctaggggcctccagcccaggttctgaatcaaagctcctcaaagtttaaggtgcatttggatcacctgaggatcttatgaaaataaactctgtctgattcagtaggtctgggtttgggggtgggagcctgttagtatatttctaacaagctcccaggcaaggctgctactgctgctgatctaatgaccacagtttgaggctggacagagtggctcacacctgtaatcccaacactttgggaggacaaggcaggagggtctcttgaggctagaactttgagaccagcctgggcaacacagcaggacctcgtctctaaaaaacaagagagaagaagaaaaaggaaacaacaagaagacctcaactagaatatgaagcagctaggccacatatgtcttcaatggagaaaagagctttttcttgagtaaattggagtgtacccatgttccttgtcaatgatggtaactttaaatgtcaagaatgtgagagaggccaggggtggtggatcacacctataatcccagcactttgggaggctgaggtgggaggatcacttgagccaaggaattcaagagcaccctgggaaacaaagtgcgaccccgtctctacaaagtcaaaaaattagcccagattggtggcatgcgcatgtggtctgagctacatgggagggtgaggcagaaggattgtttgagcccaggtcgaggctgcagtaagctaagtttgtaccactgcactcattccagcctgggcaacagcaagaccctgtctcgaaaaaaaaaaagaatagtagagaccaggggaaggtgtgtccctggggtaggcgctgggagactggagaacaactgttagtggtcccatcactgcccagagcagacagtgccctgtccaccctcatgagatctttgaactccttggacaggactggctataaatgaaaatgtggggacccttatttttaacttgttaagaatgttaagatggcaacagcaaagctttaaaccaagtgcatggcccttctgcgttgtaggcccacaaggccgacactgctattcacatccttgtatggtcccctccccttgagtgtggctggggcctgtgctctactgcttggaagcaaggcttatccctaagccttattttcgggaaggtggatttgagagm

SEQ ID NO: 93845 - DNA, 16690 bp, Homo sapiens
tgaaaataggtatgtatagtacaataagatgccttgagagaaaatgagaacacacatcacctttattacagtatgttgttataaaatattttgtttttagttatttttgttaatctttcactgtgcctaatttagaaattaaactttatcataggtgtgtatgtataaggaaaaacacagtatagataggacttggtactatctgtggcttcaggcatctgctgggggtcttggaaggtatcctctgtagataaggggcaaatacggtaattcaaaacatttaatttcatcacattagcacttatctcaaaacaacaaactatgcttctctggggcttattcttctatgattttttttttaactttgtcgcctatgtgattttttcccctgcacatgaatatatatttctttttgatttgcttttttttttgctttctgtgacttaagctatcactcttagattttaatgaacaggatttctgacaacataacaaaacagaaatcaggtttgatgggcttcagcatacatgaagtgcatatcctctctgaaaaaaattcaagcatgcaacacatctggcacgtttctgtactttgtatccgtctctcctggccaatcttgtgcatttgcgacagcaatgacattgatgaatcgctttaatttaccaggcagtggacaccttgccaaggctatctgtaagaaccagctagagctggtcctgatcatttcagatatgtgtattgtttcagaaaactgtaactgatcagatgcaatttagatgtatcattgcaccacaatcacacagaaatacatattttaataacctctggattttaatttttcttattcccttctccatttttgaaataaagataaataactatataaatatatgctaatttagttatgtggtaaaattaatcatgaaataatttggcaattttttgcattttgaagatgatttagaaattgaatttatataaatgggaattgatttttacaaaacaatattatctttatgtcatttaataagcaaggaatcattattttgacaataaaaaagttgtatcaatttttcacttaaatacttctaacctgaggtgggaaacaggcaatagaatacataaaatcctaaactattataagtttccgtggaaatatgcttaatggtagtctaagaaaaaataatcttgggaacattgtggagagagtagataattacatgtaatatgaagaggttatgttctcttgatgcttagagtatatgacagttatatatttttgaaaatcattcagagctaatattatatttaggtagactagatagcttgctataattatgtggtacaattacagcattaaaaaattcagcatatttacagagcacctaccatatgctaagacctgtaccaggcattttcacacataggcagtgcattagacagcatattgtattataacacacaagcaggatctggtgtcctcgaaacaaacgtcttcgcttgtcattttttgatattgatacctggaattctgatcaaacctcaaaacataaaactttcatcactattaaaatacaaattgtatctctatttcttaaaaatatatatttattctttcagggaattattacttgagtctttaataacatctaccctttggcatgaatgattactgtataatgtctgctgtaagcgagctttgacagcggaagtaggaatgagtttagatgccttgactatttgaactgatctggtacaggacaaaaactaagagccatatgataaagattgtttatttgttttgcctacattacatatcaagtgggactgatcctggctgcttttattaccactaattgaataaaacataactcatatattagataaatgaaatatttatacctaaatatctaagttattctttgttttttctttgtaatattctcagaatgactcgcatgttttcactctgtaacagtagtacaagcacatcaaattatcaaagagtaaattttgcaggctcaggtracaaagcaagctggtgcatggaaatgatttctggggtggggatattcatgagacataatcttggggcaactctggtttaaagacacagggtcccgtatttggagaggagcgtatttagaaggggtcttcctggggccttctttccttaagaagatgtcttatttctcattagcattttaaaaaagagacctggataaaataattataatttaaaatatacttctatccattcctatcttttgtgttcttataattaattttccttccttctctttcacttcactattcatgccaccacattgaaacatttcctattgttgttagtaggagttatgtgcatagttcacaagatgaaatgttttaatagcattgcttctcttttaaaggcaagtttgggcttggctagatttaggagttgctttgaaaatgtggcttagtgtattgtttctaaatgacaatatgggaattagaacaagggaaggaacagatcacacaatttacgcacgtttattttatagtggaatttttctgttatctaaatttcaaagtgcctttttaatcccttggtactctctaccaacattggttttttaaattttgtttttccttgttttcaatgtatatctttcatattcacatttgcatgaataccttccataattatttcaaatgggaccttaatgaatacaaactctttctgatttcttttaattgaaaatttattgagtaaattatagattcatatgcagttttacatgcagagtttctgtgaaccctttgccaatttcccccagtgctaatatcttgcaaaattatagtacagtattataccctaggtatttactcaatccaccaaacagttagatttcattagttttccatgtatttatttgtatgtatatatgtgtgtgtgtgtttagttctatacagtttttcacatatataggttcacgcatccatcaccacagtcaagatgctgaacagttccagcaccacaagggttcctcctattccctttgtgtaactacactcatctcccttctgttcccccattcctaaccccatgcaatcactgatatattcctcatttctaaaattttgtagtttcaaaatgttgtataaatggaatgatacagtatgtaacctttttgattgactttgcctatgtgttttaaacaattgatatgtatttttttcactatggatttttgtcaaaagactgtaagtatgtgataaaagataatattgattttactgttatagattcagggtaaatttgtacttctttacattttagcatttatggaaattactaacccttcattatttatattgatggagggaccagagacccaattgcatggtacaaaatactacaggctatgaacaagaagtatgtgactgtgggtcagagaaatattgattgcattgatttttaacatggatgattcatgtggacattgatcattggagtgtaatatggaccaggttatctcaagggtgtcccaagtgagagacagaggtagatttggcatcagaatgtctagtagtttaccttatcttgagcctactttatgaccttaatggactgtaactgaagggaatgtgttaaatgtatacactgttaatccagtgatttcagtgaaataattttggatctagaagaaacaatataacgtaaaaaaagtctgtattgcattgaatatgacatgggtcaaagaaacttgctcattgtaggcccaaattacagaatttattttattgccttctcagtttatttgtcctatgggagaggaaataaacaaaaattaattaatattcttcacaattagacctttatgacttcaagaaggtagataatgtctttttcatctttgtatctcagtgcctagctagatagaacatgctcagtaaatatgtgtcgaataactgtagcttatgagattgggaagttgctaatgtaagtgcatattgccctagtactcttttcagtcaatattttcttcatgtgttagtaagagataggttggaatttttagcagcagtatcatacaaatctttagagattttatatttatctgtgtacagaacccagctaatcaatttgagttcattgttagagccccaattcatcagaagacggagaaaaggcagactcctgaggttgacatatgacaagggaatttctatagtttgcattttattcactttttcccaatgcccctttctattatcattgctttgtggggtgtcagtatcacctaacaaacatttgaagtgattttgaagatattgttataaaacagcagttgtaatggattactcggggtgctgcattgtacaatgaaaataggcttaagtagaaaactgctggctatctagaagtgtcttttgtggcaggaaatattttagatagtttgttcatcacctgtgtttatcgtttgctatcccagtctattataacatattttttctttcaattctctaattattataaagaaatgattacactgtggaacacacataatgattaacacatgaaacacacacgtatgttttacttcacactgatttaagatacattcgatggaagaagagatttctggcttttccacagttaatgtgtaatgtttggcatgtaatagacactcaaaacagatttttttgaataaatgagtggtagtatttgtaatttaaaactgatgcagagggatgtgccagtttcagtactgtaagggctccataaaggcaggatcataattagcctaattcttattagtatatttcttaatgactctgaattttccaagaacccatcagagacttctagttcctggcttgtgtactctagcagctctcagtggtttagtgtgcaggcccttatccctctcatgtatacaacttcccaatcataagacaggcctgtaagatcctgcaaaatttggttctactctttctgcttctacccttcctgagtttaaaatgacttccttttttttttcttttttatttttgagacagttctcactccattgcccaggctggagtgcagtggcaccatcatggctaactgcagcctcagcctccatgggttcaagttatcctcccaacttggactcctgagtatttgggaccaccggtgcacaccagcatacccggctaattttttttttttttttttttttgtagagacaaggtttttccatgtttcccaggctggtctcagactcctgggttcaagccttctgcccaccatggcctcctaaagtgctgggattacaggcatgagccaccatgcccagcctaaagtgactttctgttacctattctaaagttaagaagaaaacaaaaatggaaaaacaagcaacctaaactataacctccactcttgagtgggacagatttctatagatctattatctcatttgagtctcatgacaacctgagaggtgggcattatattatctatttggcaattgagaaaatagaggcttatagaggctatgaaactaggctaatgtcataagtgctggaactagtctttggtcttatagcaataagattctaaagctatacagttaggttattgctggatttgtctctcctgcttttggtatagatcctacttgctctgtctgggccatctctactttttgatctattgctgttttcctcatttttgtctcttttcattccctggagattgatgctttagatatgctactggtttgataacagctttgcttcagtagtggattaaaattggccacagatgctttgctgcttctctcatcaagaagtgggatctatttttcctcctcttgaacccaggagataaacttgtgacttgctttgactaatagaatgtggtataagtaatactatatcagttatgggctttaagaggcctggcagccatcactttcactctcttggacccctaggccatcatgcaatgtggttggctaccctattagagatgctgcaaggagaatgagagagatgcctggttagctagcagttcttccacctagctcagctgaatcaccaggtgtgtgagtggggtaattttggatttcagccccaaatgagtgtgcagaaaactgcttctgcatgaatggcctatgtgagatcagcagaaaagccagcyagctgagccttgctcarattgtaaaatcataagcagatacacagtcatgttaagccattaaatttgggagtgttttgttttgtagaaatagatatctgaaatacccagtgacttacacatttacttcatctccatatactgaagaccgagtgttagtttctatcatacctatgcccgtcccaagatactgggccctcaggcaaggtgaggttctagttcctctaggaaaggcaaagaaatttaagggatatggggtgttaaaattagacaagtgaagatgcagttggtataagaaaattcatatcaactatcagaaggctgcttttgcaagaggaatatagttggttttgagaattcaaggaatgggaagataaaacatgttgagaatccacatatgaataaatatatttaacttcagtgtgatgaagctttctttacaggtgcttcacaaaggggctttggctttccaccttgttgagataygtgactgttgtggaggtgtgcttcttggtcttccttcaagaaagagcttgttcttcagctatgaggaatacagatagatgacaggtcttggctcccaaacctttagaatcctctgcaggattcaagctaaggtcatacttttccagatcatctcccagccaatgactgagcatgatggggtactagggacctgaccatttcttccaatgtaggattcacttgaccagttgtctttttggcagagtgccacatgggttagtcaagacagtgtggaatttttattgcattccctgcattgttctccatgtccaattcttcttaccctcttttttccccccacaaatgtcagatctgccttgtggtctgaaggctttctctgcataaccctttttcattcccctttacctttcctggtgttactcccagcaatctcgtacttctaactctggctcagcatctgcttctgagcaaggtacagttgagagaactaaaatggcaaatctatcagattaatatgatctgtagtttgtttgcttttaggtagagttggataatcattttacaacaattctaagaaaacttagtgtgttttactgcatgagatgccttttgaagtagagaagacatctgtctaaatcaccaactttatactttgggaaatctgtgttttttgccgaattgcaaaattgcattcgtcttatagtccttaaaatttattttacttcctaatatttgtaactacacagagtcatttgaatctgctaaacatagcacaaaaggtggatatacatcagtatttagtaaaagacatctatttaaattaagcaccttgcaacatgtattcagctatgaggaattttccgagcaagtagcattaacattgaaaattattatagagcttatggggggaggagccaagatggccgaataggaacagctctggtctacagctcccagcgtgagcgacgcagaagatgggtgatttctgcattttcgtctgaggtactgggttcatctyactagggagtgccagacagtgggcrcaagtcaatgggtgcgcgcaccatgcacgagccgaagcagggcgaggcattgcctcactcgggaagcgcaaagagtcagggagttccctttcctagtcaaagaaaggggtgacagatggcacctggaaaatcgggtcacttccacccgaatacagcgcttttccgacgggcttaaaaaacgccgcaccaggagattatatcccgcacctggctcggagggtcctacgcccatggagtctcactgattgctagcacagcagtctgagatcaaactgcaaggtggcagcgaggcttggggaggggcgcccgccattgcccaggcttgcttaggtaaacagagcagccgggaagctccaactgggtggagcccaccacagctcaaggaggcctgcctgcctctggaggctccacctctgggggcagggcacacacaaacaaaaagaccgcagtaacctctgcagacttaaatgtccctgtctgacagctttgaagagagcagtgtttctcccagcacgcagctggagatctgagaacgggcagactgcctcctcaagtgggtccctgacccctgacccccgagcagcctaactgggaggcaccccccagcaggggcagactgacacctcacagggctgggtactccaacagacctgcagctgagggtcctgtcagatagaaggaaaactaaaacagaaaggacatccacaccaaaaacccatctgtatatcaccatcatcaaagaccaaaagtagataaaaccacmaagatggggaaaaaacagagcagaaaaactggaaactctaaaamgcagagcgcctctcctcctccaaaggaacataattcatcaccagcaacggaacaaagctggacggagaatgactttgacgagctgagagaagaaggcttcagatgatcaaattactccgagctacaggaggaaattcaaaccaaaggcaaagaagttgaaaactttgagaaaagtttagaagaatgtataactagaataaccaatacagagaagtgcttaaaggagctgatggagctgaagaccaaggctcgagaactacgtgaagaatgcagaagcctcaggagccgatgcgatcaactggaagaaagggtatcagcgatggaagatgaagtgaatgaaatgaagcaagaagggaactttagagaaaaaagaataaaaagaaacgagcaaagcctccaagaaatatgggactacgtgtaaagacgaaatctacgtctgattggtgtaactgaaagtgatggggagaatggaaccaagttggaaaacactctgcaggatgtcatccaggagaacttccccaatctagcaaggcaggccaacattcagattcagaaatacagagaacgccacaaagctactcctcgagaagagcaactccaagacacataattgtcagattcattgaagttgaaatgaaggaaaatatgttaagggcagccagagagaaaggtcgggttacccacaaagggaagcccatcagactgacagcagatctctcagcagaaattctacaagccagaagagagtgggggccaatattcaacattcttaaagaaaagaattttcaacccagaatttcatatccagccaaactaagctttataagtgagggagaaataaaatactttacagacaagcaaatgctgagagattttgtcaccaccaggcctgccctaaaagtgctcctgaaggaagtgccaaacatggaaaggaacaactgataccagccgctgcaaaatcatgccaaaatgtaaagaccatcgagactaggaagaaactgcatgaactaatgagcaaaataaccagctaacatcataatgacaggatcaaattcacacataacaatattacctttaaatgtaactggactaaatgctccaattaaaagacacagactggcaaattggataaagagtcatgacccatcagtgtgctgtattcaggaaacccatctcacatgcagagacacacgtaggctcaaaataaaaggatagaggaagatctacgaagcaaatggaaaacaaaaaaaggcaggggttgcaatcctagtctctgataaaacagactttaaaccaacaaagatcaaaagagacaaagaaggccattacataatgggaaagggatcaattcaacaagaagagctaactatcctaaatatatatgcacccaaaataggagcacccagattcataaggcaagtcctgagcgacctacaaagagacttagactcccacacrwtaataatgggagactttaacaccccactgtcaacattagacagatcaaygagacagaaagttagcaaggatatccaggagttggactcagctctgcaccaagcggacctaatagacatctacagaactctccaccccatatcaacagaatatacatttttttcagcaccacaccacacctattccaaaattgaccacatacttggaagtaaagstctcctcagcaaatgtaaaagaacagaaattataacaaactgtctctcagaccacagtgcaatcaaactagaactcaggatgaagaaactcactcaaaaccgctcaactacatggaaactgaacaacctgctcctgaatgactactgggtatataacgaaatgaaggcagaaataaagatgttctttgaaaccaacgagaacaaagacacaacataccagaatctctgggatgcattcaaagcagtgtgtagagggaaatttatagcactaaatgcccacaagaggaagcaggaaagatccaaaattgacaccctaacatcacaattaaaagaaccagaaaagcaagagcaaacacattcaaaagctagcagaaggcaagaaataactaaaatcagagcagaactgaaggaaatagagacacaaaaaacccttcaaaaaattaatgaatccaggagctggttttttgaaaggatcaacaaaattgatagaccgctagcaagactaataaagaaaaaaagagagaagaatcaaatagacgcaataaaaaatgataaaggggatatcaccaccaatcccacagaaatacaaactaccatcagagaatactacaaacacctctacgcaaataaaccagaaaatctagaagaaatggataaattccttgacacatacactctcccaagactaaaccaggaagaagttgaatctctgaatagaccaataacaggatctgaaattgtggcaataaacaataccttaccaaccaaaaagagtccaggaacagatggattcacagctgaattctaccagaggtacaaggaggaactgataccattccttctgaaactattccaatcaacagaaaaagagggaatcctccctaactcattttatgaggccagcatcatcctgatagcaaagccgggcagagacacaaccaaaaaagacaattttagaccaatatccttgatgaacattgatgcaaaaatcctcaataaaatactggcaaactgaatccaacagcacatcaaaaagcttatccaccatgatcaagtgggttcatccctgggatgcaaggatggttcaatatacgcaaatcaataaatgtaatccagcatataaacagaaccaaagacaaaaaccacatgattatctcaatagatgcggaaaaggcctttgacaaaattcaacaacccttcatgctaaaaactctcaataaattaggtattgatgggacgtatctcaaaataataagagctatctatgacaaacccacagccaatatcatactgaatgggcaaaaactggaagcattccctttgaaaactggcacaagacagggatgccctctctcacgactcctattcaacatagtgttggaagttctggccagggcaatcaggcaggagaaggaaataaagggtattcaattaggaaaagaggaagtcaaattgtccctgtttgcagatgacatgattgtatgtctagaaaactccattgtcttagcccaaaatctccttaagctgctaagcaacttcagcaaagtctcaggatacaaaatcaatgtacaaaaatcacaagcattcttatacaccaacaacagacaaacagagagccaaatcatgagtgaactcccattcacaattgcttcaaagagaataaaatacctaggaatccaacttacaagggatgtgaaggacctcttcaaggagaactacaaaccactgctcaaggaaataaaagaggatacaaacaaatggaagaacattccatgctcatgggtaggaagaatcaatatcttgaaaatggccattctgcccaaggtaatttatagattcaatgccatccccatcaagctaccactgactttcttcacagaattggaaaaaactactttaaagttcctatgaaaccaaaaaagagcccacatcgccaagtcaatcctaatccaaaagaacaaagctggaggcatcacactacctgacttcaaactatactacaaggctacagtaaccaaaacagcatggtaccggtaccaaaacagagatatagatcaatggaacagaacagagccctcagaaataatgccgcatatctacaactatctgatctttgacaaacctgacaaaaacaagcaatggggaaaggattccctatttaataaatggtgctaggaaaactggctagccatatgtagaaagctgaaactggatcccttccttacaccttatacagaaatcaattcaagatggattaaagacttaaatgttagacctaaaaccataaaaaccctagaagaaaacctaggcagtaccattcaggacataggcatgggcaaggacttcatgtctaaaacaccaaaagcaatggcaagaaaagccaaaattgacaaatgggatctaattaaactaaagagcttctgcacagcaaaagaaactaccatcagagtgaacaggcaacctacaaaatgggagaaaattttcacaacctactcatctgacaaagggctaatatccagaatctacaatgaactcaaacaaatttacaagaaaaaaacaaacaaccccatcaaaaagtgggtgaaggacatgaacagacacttctcaaaagaagacatttatgcagccaaaaaccacatgaaaaaatgctcaccatcactggccatcagagaaatgcaaatcaaaaccacaatgagataccatctcacaccagttagaatggcaatcattaaaaagtcaggaaacaacaggtgctggagaggatgtggagaaataggaacactttgacactgttggtgggactgtaagctagttcaaccattgtggaagtcagtgtggcgattcctcagggatctagaactagaaataccatttgacccagccatcccattactgggtatatacccaaaggactataaatcatgctgctataaagagacatgacacgtatgtttattgcggcattattcacaatagcaaagacttggaaccaacccaaatgtccaacaatgatagactggattaagaaaatgtggcacatatacaccatggaatactatgcagccataaaaaatgatgagttcatgtcctttgtagggacacggatgaaattggaaatcatcattctcagtaaactatcacaagaacaaaaaacccaacaccgcatattctcactcataggtgggaattgaacaatgagaacacatggacacaggaaggggaacatcacactctggggactgttgtggggtggggaaagtggggagggatagcatggggagatatacctaacgctagatgatgagttagtgggtgcagcacaccagcatggcacatgtatacatatgtaactaacctgcacattgtgcacatgtaccctaaaacttaaagtataataataataaattaaaaaaaaaaaacaaaacaaactggccttatgaaccttagaccaatcttgagggtataaaagccttcgcagtgaagtggccataaaaaaaaaaaaaagagaaaattattatagaaaaagcagtagaaatcatggtgctgtttattatcatttgaaaagtatttttttattttgttctattaatatgtttcaatatgaatgatgcactgagatcttggataattagcacataacaacataaataataaaaatcatttattggacacaattaaattatgcctttcttacatacgttgtttctattaaaatgtgctgaaatttacttcttaatcttgagatgtaataaagtgttttaaggttacttttaaaaataaacatttaaaaaatgttgtgcttatatgatatcaatggaaaacaaatacttttgaggtttgaaattttaaatccgaaaataataatattaggcagcctttgtatttccagacctcttgtatttatacagggggatctagggcaaaaataattgctgaaatttaacatttatctgggtgggcctctgcgtacctcagcctctcttattcttttttttttttttcttttgagatggtgtctcgctcttgtcacccaggctggagtgtgatggcatgatctcagctcactgcaaagttttgctccctagctcaagcaattctcctacctcagcctcccaaatagctgggattacaggtgcccgccaccacgcccagctaatttttgtatttttagtagagatgaggtttcactacgttggccaggctggtcttggcctcctgacctcagatgatccgcccgccttggcctcccaaagtgctaggattacaggcttgagcgactgcgcctggcccaacctttcttattcttttgaaaatgcttctggagtccattgatacattctgtgagacctggtgggaagaaataggcctcaaggcacactgagtttttgagttgccctctacatttttcaagctgatcattattgagtccctattatctgacagatactctgctaagttatttatttaaattatctcattaaacattatcacaatcatattagatggggactgttattatttccatcttatacacaataaatttgaggcatagagaggttaaatttgagcagtgtcactgtaactcacttttaaaaactgtgtgataattaaatggcagtccttagttttaacccagttatggctggctgtaagttccatcccgtcatgaccattatgtttcctcaacttttctattttcctacttcctttgctctgctctcagtcactgggagacgaaagtgctgctggttagcacagaagaaactgctgctgctgcggcttctactgttgtctgccatctctgttaccatcgagaccggggctgtgtatgctcgaggtgcagggagctaatgtataaggagttaaatgaactcttgctgctgccaaatatgttgttatcactaactgcaccgctgctgtcattagtgctgctgccaacactgcaagccctgctgctgccagtgccaattctgctgatgccttgggctctccatgtcccagggtgattccatagacaagcagctgcttttagatttcacttgctcattacctgtagatcctttgccttaggactcaagcttaagcccatgaagcctgggatagaagacaattggaggtatgttttatcttctctagcatctgggacaactggccttgaaccaaacatgtgcacctcgtttttcttttcccttcttcctctgagatttcttttcccataggctcttatttcatgcaatgatccactagccctggaaacaggaacataaacactcgaaccctagaatgaacataatttagtcttaactacattagatattttagtttgaaagaaatcactcacatttcataatcctgaaacatataaatttatacttagttatctgtgcaaaaattgaatcatgataattattaaagaattactatgcaagtgtaaatagctttggtattaaccaagagtggtttcagtgtgcttttgtaaaaaaaaaaatactagagttcaaaaattcaggtctatatttgaagctctgtcaataattcatatacctcatatcaaaaagcttaccaagggacaagatgattttgttagtgggagtggtttactttttacttttgcttccaaccctaactcagaagaagggcaatagtctatcaaacctggaaaataagaaaacagcattcaaatttacaaagctctatttactaaaaacatgcaaaataagtaatttttttttgagagagtgtctcattgtgtctcccaggctggaatgcagtggcatgatcatggcttactgcagccttgacctcccaggctcaagacatcctcccaccttagtgcccccaagtagctgggacttcagatgcatgccacgatgcttggctaatttttaattttttgtagagatgttgctcacgctgctcttgaactcttgagctcaagcagtcctcccgctgtggcctcgcaaaatgttgggatgacagccgtaagccactgcgcctggctaaaataaagaatttttaactggaggaaaagaatcttatgttgttgaattctttattgtcttaactgaaagcaaaagcctgtttgaacttttttcttaatcgagaaaagcatatgaggagaaaagagctctaagttctatgccagatgcttacaaaacaaattgtttaccagtagtttagtgggacagggggtgggggtaaaagaaaaagttgtattaaaatcttgatgaagatattctgcatcaaggactattttatttttcttaagggcgaaacaatctgttttcttatttgaggccagtgaaagtttatatttctattccacctgggataataacaattgagagttttgtgttttattttccctaattgagaatatggggattggtaaataatatggtaagtaatttgcatttagaataaggtgaggttcttggttttccaaattattgatttgtggagtgaatttgcatctaggactctaattttttttttcagtaaattt

SEQ ID NO: 93846 - DNA, 12935 bp, Homo sapiens
tattttaagaaggaaaccacaggtaaatattcttacacttttatcactcttgacactacccttccactaggtaactgcaggaacagggtcagatgactgctggggttgttttgaaacttgacatgattaagcctgtgatgccaggataaaaaaaaattacttttctcttgccttttatctgttgtctgtcttttagacatttaactatcagtcttcctacataaaggaataaatggggtaaaaaaaaaaaaaaaaaaagagtttttcccattccaagctggccaaataggaacagctctggcctgcagctcacagtgtgattgatgcagaagacgggtgatttctgcatttccaactgagcctctgctggtgatacccaggggaacagggtctggagtggacctccagcaaactccaacagacctgcagctgagggacctgactgttagaaggaaaactaacaaacagaaaggaatggcatcaacatcaacaaaaaggacatccacaccaaaaccctatctgtaggtcaccaactccaaagaccaaaggtagataaaaccacaaagatggggagaaaccagagcagaaaagctgaaaattctaaaaaccagagcatctcttctcctccaaaggattgcagctcctcgccaacaacrgaacaaagcgggacagtgaatcactttgacgagttgacagaagtaggcttcagaaggtcagtaataacaaacttctccgagctaagggaggatgtttgaactcattgcaaggaagctaaaaaccttgaaaaaagattagacaaatggctaactagaataaacagtgtagagaagaacttaaatgacctgatggagctgaaaaccatggcatgagaactacgtgacacatgaacaatcttcagtagtcaattcaatcaagtggaagaaagagtatcagtgattgaagttcaaattaatgaaataaagtgagaggagaagtttagagaaaaaagagtaaaaagaaatgaacaaagcctccaagaaatatgggactatgtgaaaagaccaaatctacgtttgattggtgtacctgaaagtgacagggagaatggaaccaagttggaaaacactcttcaggatattatccaggagaacttccccaacctagcaaggcaggccaacattcaaattcaggaaatacagacaacaccacaaacatactccttgagaagagcaaccccaagacacaaaattgtcagattcaccaaagttgaaatgaaggaaaaactgttaagggcagtcagagagaaaggtcgggttacccacaaagggaagcccatcacattaacagcggatctctcggcagaaactctacaagccagaagagagtgggggccaatattcaacattcttaaagaaaagaattttcaacccaggatttcatatccagccaaactaagcttcataagtgaaggagaaataaaatcctttacagagaagcaaatgctgagatattttgtaaccaccaggcctgccttacaagagctcctgaaggaagcactaaacatggaaaggaacaaccggtaccagccactgcaaaaacatgccaaattgtaaagaccattgatgctaggaagaaattccatcaactaatgcgcagctaacatcataaccagctaacatcataatgacaggatcaaattcacacataacattattaaccttaaatgtaaatgggctaaatgccccagttaaaagacacagactggcaaattggatagtcaagacccatcagtgtgctgtattcaggagacccatctgacgtgcagagacacacacaggctcaaaataaagggatggaggaagatctaccaagcaaatggaaagcaaaaaaaagcagggtttgcaatcctagtctctgataaaacagactttaaaccaacaaagatcaaatgagacgaagaaggccattacataatggtaaagggatcaattcaacaagaagagctaactatcctaaatatctatgcatgcaatacaggagcacccacattcataaagcaagtccttaaagacctacaaagagacttagactcccacacaataataatgggagactttaacaccccactgtcaatattagacagatcaacgagacagaaggttaacaacgatatccaggacttgaactcagctctgcaccaagctgacctaatagacatccacagaactctccaccccaaatcaacagaatatacattcttctcagcaccacattgcacttattcaaaaattgaccacatagttggaagtaaagcactcctcagcaaatataaaagaacagaaatcacaacaaactgtcagaccacagtgcaatcaaatttgaactctggattaagaaactcactcgaaaccacacaactacatggaaacagaacaacttgctcctgaatgactactgggtaaataacaaaatgaaggcagaaataaagatattctttgaaaccaacgagaacaaaggcacaatgtaccagaatctctgggacacatttaaagcagtgtgtagagggaaatttatagcactaaatgcccacaagagagagcaggaaagatctaaaatcaacaccctaacatcacaattaaaagaactagagaagcaagagcaaacaaattcaaaagctagcagaaggcaagaaataactaagatcagagcagaactgaaggagacagagacacaaaaacccttcaaaaaatcaatgaatccagaagctggtttttagaaaagatcaacaaaattgatagaccgctagtaagactaataaagaagaaaagagagaagaatcaaatagatgcaataaaaatgataaaggggatatcaccaccaatcccacagaaatacaaactaccattggagaatactataaacacctctacgcaaataaactagaaaatctagaagaaatggataaattcctggacacatacaccctcccaagactaaactaggaagaagttcagtctctgaatagacaaataacaggctctgaaagtgaggcaataattaatagcctatcaaccaaaaaaagtccaggaccagatggattcacagctgaattctaccagaggtacaaagaggaggtggtaccattccttctgaaactattccaatcaatagaaaaagagggaatcctccctaactcattttatgaggccagcatcatcctgataccaaagcctggcagagacacaacaaaaaaagagaattttagacccatatccctgatgaacatcgatgcgaaaatcctcaataaaatactggcaaaccaaatccagcagcacatcataaagcttatccaccacgatcaagttggcttcatccctgggatgcaaggctggttcaacatatgcaaatcaataaatgtaatccatcacataaacaaaacaaacaacaaaaaccacacgattttctcaacagatgcagaaaagccttccacaaaattcaacatcccttcatactaaaaactctcaataaactaggtattgatgggacatatctcaaaataataagagctatttatgacaaacccacagccaatatcatactgaacgggcaaaaactgggagcattccctttgaaaactggcacaagacaaggatgccctctctcaccactcctattcaacatagtgttggaagttctgtccagggcaatcaggcaagagaaagaaataaagggtattcaaataggaaaagaggaagtcaaattgtctctgtttgcagacgacatgactgtataattagaaaaccccatcctctcagcccaaaatctccttaagctgataagcaacttcagcaaagtctcaggatataaaatcaatgtgcaaatatcacaagcattcctatacaccaataacagacaaatggcaaaatcatgagtgaattcccattcacaattgctacaaagagaataaaattcccaggaatccaacttacaagggatgtgaaggacctcttcaaggagaactacaagccacagctcaacgaaataaaggaggacacaaacaaatggaaaaacattccatgctcatggataggaagaatcaatatcgtgaaaatggccacactgcccaaggtaatttatggattcaaggctatcttcatcaagctaccaatgactttcttcacagaattggaaaaaactactttaaagttgatatggaaccaaaaaagagcctgcattgccaagacaatcctaagcaaaaagaacaaagctggaggcatcacactacctgacttcaaactacactacaaggctatggtagccaaaacagcatggtactagtagcaaaacagagatatagaccaatggaacacaacagaggcctcagaaataacaccacacatctacaaccatctgaactttgacaaacctgacaaaaacaagaaatggggaaagggttccctatttaataaatggtgctgggaaaactgactagccatatgtagaaagctgaaactggatcccttcctcacactttatacaaaaatttattcaagatggattaaaaacttaaatgttagacctaaaaccataaaaaccctagaagaaaacctaggcaataccattcaggacatagtcatgggcaaggacttcatgactaaaacaccaaaagcaatggcaacaaaagccaaaatagacaaatgggatctaattaaactaaagaccttctgcacagcaaaagaaactaccatccgagtgaacaggcaacctacagaatgggagaaaatttttgcaatttacccatctgacagagggctaatatccagaatctacaaagaacttacacaaacttacaaaaaaaaaaatcccatcaaaaagtgggcaaaggatatgaacagacacttctcaaaagaagacatttatgcagccaacagacacatgaaaaaatgctcatcatcactggtcatcagagaaatgcaaatcaaaaccacaatgagataccatctcacaccagttagaatggcaatcattaaaaagtcaggaagcaacagatgctgtagaggatgtggagaaataggaacacttttacactgttggtgggagtgtaaactagttcaaccattgtggaagacagtgtggcgattcctcaaggatctagaactagaaataccatttgacccagtgatcccattactgggtatatacccaaaggattataaatcatgctactataaagacacatgcacatgtatgtttactgaggcactattcacaatagcaaagacttggaaccaacccaaatgtccaacaatgatagactggattaagaaaatgtgacacatatacaccatggaatactaagcagccataaaaaaggatgagttcatgtcctttgcagggacatggataaagctggaaaccatcattctgagcaaactatcacaaggacagaaaaccaaacaccacacgttctcactcataggtgggaattgaacaatgagaacacatggacacaagaaggggaacatcacacaccagggcctgttgtggggtggcgggttgggggagggatagcattaggagaaatacctaatgtaaatgatgagttaatgggtgcagcaaaccaacatggcacatgtgtacctatgtaacaaacctgcacattgtacacatgtaccctagaacttaaagtataattttaaaaaaaaaagagcaataattttttaaaagaaaaaagtgctcagtgggcagcttttgaaagaaagtctaaaagagagttccccacctcctgtgcattaagtttatctacatacttacctgttctctttaataactgtagtttttgctggtgtttaaatattctaagaactacatctcccagcatgtgtggcagagtggtggcctctgtgcaccatctgcacccgtcagaggcgacaatgcagtgggctgtgagcacggtggccaatcggggttttctcctgcaggcattccctcctgccttgtgtcatctgcttagttgtgcacagaccgagatacgtggtggtgacccggtgaagctgatgcagagtctagtggttggagacactgcagagctgaggccaaaccagaggacactgttgctgtttaccaatgaggctggaggcaccttagatgacttgattgtgaccagcacttctgaggggcacctayatgtgatgtccaacactggctgctgggaaaaagacttggccttcatgcaggacaaggtcagagaacttyagaggcagggcagagatgtgggyctggaggtagtggatactgccctgctagccctgaaagggccccctgtggcccaggtgctacaggccagcacggcagctgacctgaggaaactgccttcatgactagtgctgtgatggaggtgtttgacgtgtctggccgccaccttacacactgtggctgcacaggagagaatggtgtggacatcttggtgccagcagcgggggcagttcacccsgcatcagctcttctggaaaacccagaggcaaagctggcagtgctggcagcttgcgcctggaggcaggcctccggctgtacaggagtgacactgatgaacacactacccctgtggagggcagcctcagttggacattggggaagtgccactgagctgctctcgacttccctggagccaaggtcattgttccccagctgaagggaaagtgcagtggaggcgtgtggggttgatgtgtgagggggccctgatgcaggcacacagtcccacctgagcatggagggcccatgattggtactgtgaccagtggctgtcccttgccctacctgaagaagactgtggcaatgagttacatgccctgccagtagtcagccagggataatgctgctggtagaggtgcggcagaagcagcagatgggcgcagtcagcaagatgccctttgcgcccatgaactgctctaccctcatgtgaggatggctcagggcaggaccatcccctccagaagtcttgccctagagggcattctacaagggcttaggcaggaagctgaggcagaactcactgggggtgggcagctaaggggcaggttggttttagttgtctggttaagggggccataccacctactctctccacccaacccatggccactccagctccaggaccctgtttctgagcgacagaccagccattcaatgtcttctttcggtccatgatcccactgacccactctagcctgatggagggaaatgagcagctctggttctgctatctctcccactctgccaggtgctggctgtggcacaaaggctcgcctttgtggggaggataaaacctgcccaacctgcctcaccttggttattcgcattgcaaggagtcattaccatgggcaatatgggctcaggccactccttccagtttgctttccataaatgcaaactgtccctaccgtgagtcaggaatgactcctgactcacagtggggctgctgtaaacttggggatggttgagggaacacagacacagtcttccatgctccccaggtggtccagcctgctgcccagaagcaaaccatggcaggctcaccaccggttctatgccgcagggctgttgtaggacaggctgggctttctcctggactcaccttaccctgggctgacctttgcccctggtatccaataatggcctccactaaatcctgaaaaaaaaattaaacacacttccttcttaaaaataaatattctaaaagttctgaggaaattattattattattattttgagacagggtctcactgtcacccaggctggagtgcagcagcacgatcatggctcactgcagcctccacctcccaggctcaaatgatcctcccgcctcagccctgaaagtagctgggactacaggcatgcaccaccacacctggctaatttttgtattttttatagagatgggggctcatcatgttgtccaggttggtcttgaattcctgggctcaagtgatcctcctgcctctgcttcccaaagtgctgggactataggcatgagccaccacacccagccagaaagttatttttaactcaggtttatttacaaagaaaatgtatgacagaccttatgtagttctgggccgcgaagctgcctcaatgaactctccatctattgagcttatggtaaatgttccaccatcttactggaatccacactaacggccaaagaatatgtagactcgaaagtatgtatgcttttttttttttttttttgagacagagtttcactcttgttacccaggctggagtgcaatggcacgatctcggctcaccgcaacctccgcctcccgggttcaagcgattctcgtgcttccgcctctcaaatagctgagattataggcatgcaccaccacgcccggctaattttgtatttttagtagagacagggtttctccatgttggtcaggctggtctcgaactcccgacctcaggtgatccgcctgcctcggcctcccaaagtgctgggattacaggcgtgagccaccgcacccagcaaaagtatgtatgctttacaaaatattacacttacattaacacacctgattctatcctgaagtagagccaaaagtctctgtaatctgtttaatagattcaaaatagtagggagaaaatctgagcaaatcatcgtactgttttgttgtcctccctcccaaacaatgcagcagctgagtggtggctggattgccagattctgggggtgctggtttgcccagtattttcatagttgagtgcagatactcccatgccctggcaaaccaggaggtttgctcaccctagctgggggataagcaggccttacgtgcccacctaggaaggtctgagtttatcagtacagtagcatcatgaacaaacagccaccaggtacagcttcctagaagcctctttcctcagagaagaaaagacaagataatcatcccccttaaaatggcagatttgccactggatccagttgccttgtgttttcctcatcactcacactgtggtgggtgtcagctggagttccaggccctccagaccagggttgagggttttttcaccttgtaccccaaggaggcaaaatagagtaacagtcaagagtggaggctgcgactcctgaccacctacggtcaaatcgctgctctgcgccttccttaggagtggtggctttataattgtcaacttggctagactgaactacatgtcccacagttcttctgcctgcatggctctggttagggtgggccaccagagacattcttcaatcaagaccctctgcatctgtaaatttattaagtctgaaaactgggtaaaaggctgtgactttttactatgatgatgcaagctacatttttgactacccatccattttgttcctaggaacactatgatcaattaccaccacagatctttgtgagctaaggcaactggttagcactatgttcctgctgccctgtattgtaaatatgtccacgcttcttgtctttggtggttaaatgcagtcactttgactctgcctctctgggattccatcatccccattgaaatctggaagcctctctcaatggtcgcattctttacagccacacgtagcctgcaaaggagacacccacagagcttttccagtctgctggtgccttagtgcagggagttgtctcctgactcttttcctggaacatgctgggggctgggcatgcagtttgcacatggtaaatccagtcccatttgcctatcgccctaagcctttggagtctctcttccatattgtgacaggaaagctgtctagttaaagtgcgctcataggaatgaagttagcctgctctagtgttctatcccactattctcattcgaacatctttaggatgtacttccacacatgttccccaggtctctgaagatacacattagaaaagtgtggcaattcttttggcgtataaactatttcttgctgggtcatggtggatccctgtcctactggaacttgctgagctttggcaataatcatgagtctagtggcaacaaggggtggttgtggtagatttagagaatgagtaactccttttaaggcatctgtccccagatgagcttaacacagatatttaagcagaggaaggctagtcttctaccaagagcaagctacttccacaggagagggaagctcaaaactatacattcaactattgttgtaagtcagcaacccacacccttaaattttatgtttaattttttagcaatatcagccctctggctgtgagcaataaaagattcttttagggctatcctcaaagctctgtcgtcctctaacaatgacttgagctcagagttaaaggatttgggtttgtcatttttctgttactactcaagtatgctcagaaaaatctgtcccacagtacattccttacaggcatcatgtactgccgtaacagttagttgcaactgccatttgggctcctaagacacttgctttggttacaacttcattacaattagccacaagtgctagcttgatgtgtgatgtccctgcatgccacaggtcactagcttcccatttcccattgctaaggagttcagcactgtgctgaactccaaggacagggtcagccctcaaatcccacctccgcaggtctatctcctaggactactcccagcaccattttgtggcagttggattctgtactagtccagaatcggagtgtaatttgaacagggaaagtttaataaatagtattaactagaggaggggaataactaaaaggggtaagcagaatgctaaagagtactctagagctgagaaaaatacttgaggaagaagcaaacttggaagggattcctctggtcaagctggaattcaagctctgctggagaaggtgtggctgcagtccactggagggtggacaagtttgctgggttgatccaggccagagccagtctaagtcactggacaggcaggtaatattcttctagggagcagggggacggaggctggccagaaaaccacagttaggactaccaagtgggaaacatgtctctgggatgcacgtgagaaggttggcaaaccactccgaggtgtaggagagggctgaggctagtggatggacctgtgcagggattgagggcatcaagaacccctttactgactgcttgtcatgaagcctggtgttaggagggctgcatgcagccaggtggtcacagaactggagctggtggcttgccaagggactgtgccctctctgtgcacactggtatgttagtttgctaggtctcccacaacaaaataccacagactggggggcttcaacaacagaaatgtatttcctcacaatctgcagctagaagtccaagatcaaggtgttggcagggctggttacttctaggggcatctttccttggcttgtcttccaccagtgccttcacatgtttccttttgtgggagtctgtgtcctcaactcctcttcttgtaaggacaccaggcatatcaaattagggcccacactagtaatctcatttaaccttaataacctctttaaagaccctatctccaaatacagtcacattctgaggtattgcaggttaggatgtcaacatgaatttggggggatacaatttagcctgcaatagttggggaggagcattactggatgtccctgccatatgttgcttacagccaggagcagaagcaagaagcaaatggaaacacgcccgaccaggaagaagccctttcctcctgcagggtccctccagcgccctctactgaaaaagtctgacatcccactcactgcaaaggagaaaagtctacaggattcaactccactattgcagagtagataatgaaggacggatttagagctgagaggcaataaattaataacaagcacactggttcttcagctttcccagcatttctgtgagttttctaatgtcctccagagaaaatgtgtgcctaaactgaccggtttacaactgagaacactggcaaatttgcagtttcccactttttttttttttttgacagtagttatgcattatggtaccttcaagttctcattttgggagggataaacgaattttccctggaattttactattatgataagtataaattaaaattatctccatttaacgtggcatggtaatgggctatggaagcaagagcagaaatctagctttcctgttgttccttgtatctgcctggttcatccctgtttcaaggctgatacacttgcttttccttcttcctggaactctcttccgtcaggtattcacatagctccatcacatcaattaaacctctgttcaactgtcacttggaaatccttccttagtactctatcaaaaatagcctcctttccccataactctctttcaccaggctttagttttctttataacaacttaccactacattatattatttaaagtagcctatgcacttatttacctacagagttactcacttattaaaatgcaagttctaggagggtagggatatgtcttgttcactgaggtatcctcagaacctagaatagtgtatggcatataataggtacttgataaatattgattaagtgaagggctgtaggtttcagaaaagagttggtttttccagaacacaactccatatgcaggcatatctacagcaatgaaaatttagcccctaacttaattaggatggcaacaatataattctgattattctcaccctaacttggtaaaaatgacttttgttcactttttaaaaattgtggtatagttagcatacagtaaaattcaccttttgtgtgtgggtacaatcctaagagttttggcaaatgcctataactatgtcaaaccattgcaatcaagatatagaacagttccatcatcctccgaaatctcctccttcccttttgtagtcagatactcctctgacctccagtccctggcagccactggtctgttttctgta

SEQ ID NO: 93847 - DNA, 12721 bp, Homo sapiens
ccacttggtcagatgagcaagactgcttgtccgtgaccacacagctaggtggtacagatcgagaacttgaaccaatgtctcagggatagctcttcttcaaatgcatcaaggtggcctctgacagcctattactgattcaaatgccatccttgcggtcacggtaaagcaggtccttctgagacagataggactctgagcctgygcttggtacctggagctgatggaaagggcagtgatctaagacggcttgtttaggctgcagaaagtccctcggcttggactctctgagctcttgctcattctgctgaggcagggaccattttggggcctcctgtgtatgctacattccattgctgggccagttactcttcactgaactgtaatactatctcatccaccttgttttcacagggccctataagccatattatggactttgctgaaagaattatcatgttcgcacagctctgtgtttgcagtaggcttaggactcttttcagatttgagcactrgcggtctttcatgcgatctgcttttcaacacacatcacatgttctcctcctccctttcctctcccggtcggattccttgctgccttctgattatggtctgcctcagtatgcagagtcccacagccgagcttaacaggtactctacaattctcaaggtgctagagttgatggattttaatcaggtgagtgcagtttaatgcaaatgctcctttagccgaggttcataaaatgggctgcttaatattatggtcccaaatattagttcaatgctcatgacttatgtaaatggccttgctttggggttaggttaggggaaaatcaataaaaaccagctggaaatggagaaagcaactgtgtacttacattccattgtgatgtaaccctgctcccaccccacaatacctcgtacttatcctttttgtttttttgccagctcacttttctcccccacatttaaggtttcacagagatatgaaaagccaccctggttcctccatctattaaatgggaaatgcatatgaacaaatagaagaattgcaccatacgatgcagctgaaatacaatgttatcatycttccactctgaacatttctcaggatggtttatgtcccagcagttaatggcttgctattgttggtgtaccaacacaatgctattagcaacacagaattctcaggctttctgtttagactatcttcatgtaggctagccagaatttagatatttgtaaacggaatttgaacagtggcctttcttcacaatataaaattcagataagtgtaactggtcatggcccaactcttgtttattaattaaggctttataatatggcaccatttttggaagctgcagyttatgcaaagaagaatactaattacattctgcattttctgtaataatggggcagtgttttggacaatgcagtttatccagacaatgcatccggctcataatgtagtttattaacaaggaggctctgaatgtttcatgggagattgatacagctgtgaaagggtggcataaataatattcctggccaggctgggggcagtggcaatatgttgcatgctgttaacctcaagagatctccgaatagcttttatgtatgcctgctatatatttgttgaccattgctggatacaaaggaagctaagtgatctgggaaaatctatttggtaattttcttttcccattctcttagcacttgctgaggccttaaaaacaataggcctttgcatttgtatggattgtttttccttaggctccaacaagaacgtcactttaatattgttatcatcatggatttcttataatggtcatttgtgagaatcagaataggctaccattttttttctataagatatttttcttattgaaataattcacatagcacaatgtttatccgtttataatgtgaaacttggtggttttagtataaatacaaagttgagtagccattaccactatctaattctagaacattttcatcactctgaaaagaaacccctagccattaacagtcactgtccttcctctcctcctatgtcctggtgactgccaatctacttgctatctctgtgaatttacctattctggacatttcacataaatggaatcatatgatatgtggtctttgtgactagcttttctcacatagcataatgttttcaaggctcatccatgttgtgagatgtaacagaacttcatttctttttattgccaaataatgcccattgtgtggatatgacacattttgtttatccattcattagtaaatggaaatttaaggttttttttcccacattttggctgttaagaataatgtggttatggactttttaatttgtatgtgtgtgtgtacttgtatatttatttcctcagaggtatatacctaggagtagacttgctgggtcacacggtaactctatgtttaactttttaaggaactgccagatgctttttgaagcaccattttataatcccacttgccaatatgagacttcaaatttctccacagcctagaaaacacttgttattgtctatctttttgatcatagccattctagtgagtgtgaagtggtatcattgtagagctgatttgcatttccttcttgactaatgatgttcaacatttttttcatgtgattataggccatttgtatttcttctttgtgagctaccattttaatctccattttagaaatgaggaaacaatggcactgagaggaaacaagatttattagggtacctgcatgaggtaatagcccatcagtattggaatttaagttctctcacttagctatgcaaaagcatagacattgagtacctagtaataaaataagctataagtgatttgcatttagtcttaacttctttatttacaaatgacagaaacctagctctaactgtggcttaatgaaagtaagaagattttggcttgcctatctataaagttaagagctttttgcctccagaatgattggatgcagcttctcaaagatggcatcagaaatatgtctctatcatctcttagttttctttccattgggttggtctcacgcataggcatggtctcactttgtagtggttagatggccgctagacgctcaaagtttttatcttaccagctcagaatgccagcaagattttttttaaattcttccctttcacaatagttccttcagtagttctcaaatcttagcattgagtagtactggactgacttgaattaatgattggctccctgaatcattcatcggtgaaatacattgattggtcatttgctcattctcagtggggagtgaagttagctccatctacaccatctggagtcagaactggagaaggggattccccagaggaaagtgaggatgatggtaccagcacaatgaggaatgcatgctagcacaagtgaaactcatagatgtccattgtgctatgcagttttttccttgggccttgatcatttatcatttactggtttcctgtctgtaaatttagaaaagatacaggctctctgaaaagtaatttctggtctcttacaagtgaagggttaatcaaccaatccacataattttctccagtactgagagatcatttgttttaataaatgcaaataaggtttcttatagttaaaggtaattggcttttcattgtaattcttgatgctggtcattttgtgtctgagttgttcctaattgctttggttcagagtctgagaaatgaaatagccccttgactataactgtaactacaattataacaatttatttatttaaatcagcaatccctgcaaagtcatttacagtttgtttatttcagtatgttttacaaggtgcaacaaaagcagcctcatcacatagcaaatctttcttacaggattaaaagttaatgggtaaggtaagtctggcataggcattaaagtggaagcattgtttcttcttgactggtcaactttagagacaacttttcccattcgaagttatctatcctctaaaatatacagagattgaggccaggtgggatggctcacccctgtaatcccaggactttgggaggccaagatgagtggattgcttgagctcagaagtttgagaccttggtaacatggcgggatgccggtggtgccatgcctgtggtcccagcttcttgggggctgaggtgggaggaccttctgagcctgggtggcaaaggttgcagtaagctgtgttggtatcactgcactccagcctgcactcctgcacaaagcaagaccctgtctcaaaacaataaataaattaaaatatagagagactgagatgcagcagcagttgtatgttgttctctggcttttgaataataaattgtatgtgtaccttcatatgataggatcttcagctctcatgccaactctatttcttaatagaaataaacaagatggacacgatacatctaggataccatgttaaaatggtttctaagactgcattcagccttagaagaaaagaacgttgtgatcacttaatgatgtctgtcacaggcccaggagagtgaaacaatggcgcttgcattgtatattttccatccctgcttacatcttgaaaggaagtcccaatgctgaaagtttgtaggattgggacagttgctttgatacttcagaccaacagacggattcttctttcattattcagataaagtgttttatgttgcctgtccacctaagtgttttaatcctcaagattaccttaactatggagacttgacttagacttaatattttgatccagaaatgcatcaagtatagaataaaaacttctatcctagcaagactaggaatacaaaatatttactcacagtatacatgtactgtctgctgggtgtgcaacattctgctaagggaatgtgaatgtggcaggagaccaagggtcctcggcattagaaatctatagtccaggtgtaattagagaaagataaagggctcaccaatggaccacagagcatacatactaaaggctaaaagagtaaaacagtttggtaatgaggaatgaaggatagagtgatctagggaaaattatatggagaaatagtttcttcagcaacatctgaaaggaagtgatgggcatcggttggtggaaaggatggttggttgaggtgggtgtagtggtgaaaaagactgaaagctactgaccaaggaatgacataacccagaggtctcgatctgtcagctcactggcctaaaaacaaaacaaaacaaaacaaaacaaaaaccacacaaataaaaaaccagatgtgtgctacacaggaatatagaaataaaatatattggaacaataaaagatttcaagcaaaaattagaaaatactagaaaatctggaagtttcacataaaatgcaggttttcttacttttctgtaataactgaaagatctgacaacattctgcctgaattcctagttggcaagaaatggctgagagggagtagcgattgccatgatacacgagtggtttgtcgcagtcttcacctctccctgcagtctcccaacactgaagtcaaaggttaattgctctctagcatcatgcttgcactgttgagactattcataaaaacttgtccagcaaagtttgaaagatgaaaaatacattttcagaagtctttgttaaaaaaagatgggggtgagataggatggggaaatagtgcatttcatatgcaatcaggccaggcgtggtggctcacgcctgtaatcccagcactttgggatgccgaggtgggccgatcacctgaggtcaggagtttgagacctggccaacatggcaaaaccccgcctctactaaaaatacaaaagaaattagccaggtgtggtagctcgcatctgtagtcccagctactccggagactgaggcaggagaatcacttgaacccggaaggtggagattgcagtgagccgagattgtgccgctgcactccagcctgggtgacagagcgagactttgtcaaaaaaaaaaaaaaaaaaaaaagcagtctttgcagacgctgccactgccgggagcaccctactatcagccatggtcaaccccaccgtgtacttccacattgccattgacacggagcccttgggccgcgtctccttcgagctgtttgcagacgaggttccaaagacagcagaaaactttcgtgctctgagcgctggaaagaaaggatttgggtgtgagggttcctgctttcacagaattattacagggtttatatgtcagggtggtgacttcacatgccatatggcactggtggcaagtccatctacaggtagaaatttgatgaggagaacttcatcctgaagcatagaggtactggcatcttgcccatggcaaatgctggacccaacacaaatggttcccagtttttcatgtgccctgccaagactcagtggttggatggcaagcatgtggtctttggcatggtgaaggcatgaatatcrtggaggccatggaacactttgggtccaggaatgataaggccagcaagaagatcaccattgctgactgtggacagctctactaagtttgacttgtgttttctcttaaccaccagaccattccttctgtagctcaggagactaccyctccaccccatttgctcgcagtatcctagaatctttgtattgtcgctgcaattccctttgggttccatgttttccttgttccctagctggattgcagagttaagtttatgattatgaaataaaaattaaataacaacaaaaaaatgcaatcaagtgtaattgttacagtaggtagctagtcagctagtcagatatgagttggggcagtaaagggacaccccacatcccaccaggaatgtcaggcgaccatcaggtgatggtcaggcagttgttaagatggttctctcaaataataattggttgcagctggcaccagggaacaatagtctcccaacagacagaagaaacctaaaaccggtgatcagcagcttcctaataagatctcaggaggtgggtgcgtgggatcaagtatgtgcactaagaggcaaaatggtggagtttaactggtgtatgaccttatagggacgcttgataggtaagggaagcatgcctcaagtgggtatgcataccactgcagtaaacacactgtgcatgcaggccacccagcacgtgaacagcccactccatgggaagactcaggggagaagggaggcaagaccctggaagtatgccaatatatgaaaccccaagtcaaaaggtcaaaccatgcactcgatctctcaagtcacycacttggccctcctccaagtgtactttacttcctttcattccagctctaaagctttctaataaactttcactcctgctctaaaacttgctttggtgtctccttctgccttatgccccttggttgaactctttcttctgaagaggtaagaactgaggttgctgcagacccatacggattcactgctggtaacattctttgatgacgcatgactcagatatgttcggccagtaacgtactgctgtcttatttttattttttatttttatttatttatttatttttgagacagagtctcgctctatcacccaggctggagtgtagtggcgagaccctggctcactgcaaccttcgcctgccaagttcaagcaattctcctgcctcagcctcgcaagtagctgggattacgggcgcgtgccaccacgctgggctaatttttttttttttttttttttgtatttttattagagactgggtttcactgtgttagcctggatggtctctatctcctgacctcgtgatccacctgcctcagcctcccaaagtgctaggattacaggcgtgagccactgcacttggcctgtcttatttttcttaacactagacttctctgttcatttatttacagtacctcccagcacaaaaggcatttgagtttgcgtttttcctaggattagcaaaaagtgccaggtaggcgaaggcagtagggtggtgatggcggcagtggctctggaggccgcagtgcgagtcctggcctctgctccagccccactgtggtgacgctcgctgagctgctgttgctccagaacactctcctgaccatggtcttgggctatttcatcagcatccacgcacatgctgaagaatgcttaagtgagtcacctcaggcaccaagatgggcctcatcttcgaaggtggcttcctgggcatcaacgtggagattacaggacctaagaataaaaggatttataaaggagacaaagaatccagtgggaaatacacattttctgctcacatggatggaacaaatacattttgttttagtgaccgagtgtccaccatgactccaaagatagtgatattcaccattgatattggggaggctacaaaaggagaagacatggaaacagaagctcaccagaacaaactagaagaaatgatcagtgagctggctgtggccatgacagctgtacagcacaaagaggaatacacgaaaatctgggagaggatacacagagccattagtgacaacacaaacagcccagtggtccttcggtgcttctttgaagctcttgttctaattgccatgacattgggacacatctactacctgaagagattttttgaagtccagagggttgtttcaaaagcctcttcctgatgattccaaactcatagtttactgtttaccaaacaccttggtgataacgtcataggccattaatttctatgttttaattttctgaactatacagtcacagcttatgtttctttgtgattaatagaaattggaagaaaacacctttttaggaaagtcatagtgaaaatttgacaattgattggcataatttcctaattaaatgctgcctccattatataggtccttccagaaattaaacactggaattgaaatataggaatatatatatatatatttttaaaatcttcttttccttttgttttgataataaaatgcagttagttcaggaaatcagcacaaagcctgatagtactttactgaaatgactgcattctgtgtattccctcattctgtggtttaagctattaaggattcattttgttgagtccttatgagaaacaatagtatgaatcctgacattttctatgcatgctcatggcagagctctctggcttgggtgtatgctgccaggctgggcacttttatactttgttttcaagttttgcttttaaaggtaagacttgccccagcacctattttcccccatacattttacattgaaccttaggactcagtcacctccacttaaaattgatgacacaagccgcatacaaccattttttgtctttattttttgcgtaactttctaaggagtctctgttaaagccagttctgtggttgtcccagtgaatggtggctcttttcatttccacactggcgcatccactttctccactcttggaatgtaggaagtatgcattcatgtaattggaaaaatctggatttctgaagccagaaggttaaagcctgttaaacttcattgcagtgatatacagccgctattttatttttgatccgtggccttcgggccactgtttaaccagggcactgaacatcagtgtcagcactagggtttttgtttttgtttctcttgggtctttcttttttggcatatgtgaattttgttttgtgtaaaacgaaatgactttctcttgctctctgataatgagtttaaaattaaaggagcatctggttttgatgtggggatgatccaggattatgttgtgactgatgtatattagttatttgtacatttctggagatctttgcaaggggaaaactacaagtaatgagttttatataagtaatttaaatttgttacaggttttcaggtttaggataagcaaccttgggtgagaacacctatgacactttgttgatgaggtgattgtttcaccttaggacaactgttgcatgccaattgtgtgtgtgtgtgtgtgtgtgtgtgtgtatgtgtgtgtgaaaacacttcaaaattgatttaaaagatgtaaattttaaattggtcaagtatctaatatgccccagatttagtaaataaacaataaacaattttttttaaaaaaacgacgcaaaacaaaataaaacaaaaacaaacaaactgcgaggtagaatttaatgggaagagcaaagagggtagtagaaaatttcaatctggctggaatacaaacgtctgtttttatctcattttacctgcaaaaacttgaaggaaaggcttaaatggtaaactgaagaatttagttttgacctgtctgaaagggtgggtattgagggtcagaagtattgttaacagaaagattaatgagcattaaaagaaaggagttaatgtggatctgccagaaatgaagtaaccagactagttttccttttgacagggttattggagtagaagataaagttgagtttgagaaatagtgtatttcagcaatgtgtatgtatctcatggtatttttgtggtcaacactgagaaatgtgacatagttgatagcacaaccacgaatttagagctggtagaagaatttttacattatgtcctgcattttaaagttttgccacaatgtttaagctctgttatgaaaatcaaaataggcattttccttcctatttggttatggacatactatgctccttttattttatttatttatttttgagacggagtctcgccctgtcgcccaggctggagtgcggtggcgtgatctcggctcactgcaagctctgcctcccgggttcacgccattctcctgcctcagcctcccgattagctgggaccgcaggcacccgccaccatgcccagctaattttttgtattttttagtagagatggggtttcaccatgttagccaggatggtctctatctcctgaccttgtgatccgcccgcctcggcctccgaaagtgctgggatcacaggcgtgagccacagtgcccagcctatgctccttttaaattactgttcaatgaagcaaatgattttatccaagttttaattgataaaatacatttggataatattttagtaataggacaaatgctctttgatcttttggatgaactttactttatagagtcacatagtaagttatctttgctttcctataatggggctcctgcgtcattaacattgtatactgatatagttttctgaccatacaaactctaccacagcatcacagtggagtcactatctgcttctattgctgttagctggattagtcttatcataattatgtctttgccatagctgctctggcttccctatctctttcttgtttatctcagttaaaatatataaaagtgtattaacatttcgatacactgaattctctggagcgttgtgccctatattaaattttagtttcctaactatagagaaagagtggagggacttggaacatttctgatactgagcttttattatattgtgagcttttattacattctgagctttaaggatccgtctttctcggtatgggtagaagtgggcaaactgaaagggaaattgttttctgcattctctataatggtttttatttaagaatgataaagcaatactcactaagcccagatcagttccacaacagacagtactgaaaatcccagtggaaatgcagtgatgtttctgtattgggaggaaataaacttcaaaatgttatttggtgtataaagttattataaatatattgaagacagcattgcctagtgtaaaaagactcaacttggagttaggttagccatgcttaacccttatgtgtctatttgcttctattctgaaaccatatagagacactattaggaggacaaacatagactacagggttcaaggtctcactctacctcttaagcaggtcaattagcactttacacatccttttcctcttatataaaatgggaataataatagtacttacttcatatgccttggtttaaataaattagttgtcatcttttaggtacctagagagctatataatgtaagactcaatacatgtcagctattattattgtatttatcattaaggacacagctagtatagggaaagagaattaaacttgactgacttttctgccataaagttatttgaatttgggaacatcaactgcttatctcgtctacattttctccactgaaaactgaccagactcagcccactacccatctgggaaaacactcccaagatcaagttgctctatagttttagtcttttcaaagttattttttacttgaattttgccctatagacaaacacacgaagggtagttttgaaaattgatgccatctattatattattgtttaatgattcctaattttcagattggaagtaattgacttcatatctcgatttctaatctggttctaattgacttattccatcaatcatctagtcactaatacaatttttggagtgttgacaaaaccctttcagcgatcaaataaatcttgattgatatcttgagtgataagatttcctaccctttgttgagttagaaggggagaccaatcctttgttgtcagcaacttgatcagaactgggaatgtcatctaccagtgctagattttggcttgtttatttttgtatatttygcatacgtgcttagctactgtttgttagaatttgctatccgacattacttgacctccactttccagtgccattccttccctcaatttttttaaatcggtttty

SEQ ID NO: 93848 - DNA, 14774 bp, Homo sapiens
  misc_feature (1)...(14774): n = A,T,C or G
aaaattagccgggtgtggtggcagatgcctgtaattccagctactcagaaggctgaggcaggagaattgcttgaacccaggaggcggaggttgtagtgagtcgagatcgtgtcactacactacagcctgggtgacagagcaagactctgtcttaaaaaaaaaaaaaaaaggttagggggtctcctggggcctgaagtggaatgaggaagtggaatagtcatcataagaggtacagtgggctgaacatcactgggggaccagaggccagggtcaggatgtaaccaggaaaggcttcctggaagaggtgagaaccgagtgtgatgtgtgcagacagaggtggggaaccacgtggggctggcctaagcagaacctcgggtgtagacgagtgtatgagcatcaacagggaccagtaaggaaaaataactgagcaccaaattctatggggtcacagagatagatgatactgggggtctgccctctaaagctgacaatctagctcggcagaaggttgagaggtgggggtaggaacacagaaataagtaatagctatcactgtgcacacccgcccccacgtgtcaggctttctacctacattgacacatttaagctcacaacatctctggaagatccagttattagccccatttatgaatgaagaaagaaaggctcagagtaaagcagattgctctaggtcttcctagcaggaagggctagggccaaggctcaaacctgggtggctcaaggtctaaatccagtgttctaacctgcacagctacgctattcagcctaccccagctggaccgccccctcccactgcaaggaaaccaaccctgacacccagccttctatgccttctatgcaaacctctaggtgcacttcagtcagaaatctttttttttttttttgagacggagtctggctctgtcgcccaggctggatcttggctcactgcaacctccacctcccaggttcaagtgattcttgtgcttcagcctcccaggtagctgggattataggtgcccgccaccacacctggctaatttttttttaagacggtgtttcactcttgtcgtccaggctggagtgcaatggcgtgatcttggctcactgcaacctctgcctcccaggtcaagagattctcctgcctcagcctcccaagcagttgggattacagatgtctgccaccacgtctggctaatttttttttttttttgtatttttagtagagacggggttttaccatgttggccaggctggtctagaactcctgacctcaggtgatccacccgcctcagcctcccaaagtgctgggattacaggtgtgagtcacagcgcctggccttttttttttttttttttttttgacagagtctcctctgttgcccaggctggagtgcagtagtgcaatcatgtctcactgcaagctctgcctcctgggttcaagcgattctcatgcctcagcttcccaagtagctgggattacaggtgtgtgtcagcacacccagctaatttttgtatttttagtagagacggggttttgtcatgttggccaggctggtctgaaactcctgacctcaggtgatccgcctgccttggcctcccgaagtgctgggattacagtcatgagccactgcacccagcctctctggtggtatcttttggaaagatatctttctggaaaactctttccatcccagcccaaacttgtctctgactcactcatttatttgagggtaggtgacttagatgtcatatcctacaggagggcagactgactgcccctccaaagccaaatgccattttgatcctcttctattgaccctgtaccacctcgatcaagacaattctttgtttttttttcttttatggtcaaaaaatttaagactagttccaacttgaagtagttttgtttcaacagatcaagataattccttgttttttttttttttgagacagagtttcactcttgtcacccaggctggagtgcaatggcacgatctctgctcactgcaacctccacctcccaggttcaagcgattctcctgcctcagccttccaagtagctgggattacaggtgcccaccatcacgcccggctaatttttgtatttttagtagagacagggtttcaccatattggccaggctggtctcgaactcctgacctcaggtgatccacctgcctcggcctcccaaagtgctgggattacaggcatgagccatcgcacctggactagatcaagacaattctaacagttaacaattattgagcactcattttgtgccaggcactgtgctaagagtgcagtatctcagagtggttaaacatggaggctttggggccagacttctagatttaaattctggctctgggtcaggaacagtggccgacacctgtaattccagaactttgagaggctgaggtgggaggatcgcttaaactcaggagtttgagatcagcctgagcaacatagtaagaccccgtctctaaaaaaaaaaaaattagctggatgaggtggtgtgcacttgtagtcctaactactcaggatgcttgttaggtgcagtggctcatgcttgtaatcccagcactttgggaggccgaggcaggtgaatcacttgaggtcaggagtttgagaccagcctggccaacgtggtgaagccccatctctactaaaaaattcacaaattagccgcgtgtggtggcgcacgcctgtaatcccagctactcgggaggctgaggcaggagaattgcttgaacccaggaggtggaggttgcagtgagccaagattgtgccaccacactccagcttgggtgacagagcaagactccatctcaaaaaaaaaatttgttatacaaaggaatgaataaatgcatattacattattacattcctattgtagagaagaggaagcatagctggtggcaaaccagagatttgaacccaggagttcctgatccctgtcttgaacactttctttttcttttttttttagagatggtgtcttgctatgttgcccaagctggacttgaactcctgggcttaacggatcctctggcctcagcctctcaagtagctaggactacaagcaagcccggctagcttagaccctttgtatggccccagtgtggggcctcatataccctttggctgtgtttgaggacgtgtttgacagatttgatgatcttgattgcaccctgaagtataaaaacttaggctactcgagaaagatttcatgctaaatcaggtagtaaagctctagtaatatgatcctaaggttttgtcttcatgaaactgcatgaccttaaggcatcggtttcagctaacctgcccaaggccacacaggctgtaagggaacaagatgtgagcccagccttctcacactagagtccctgtttgttctcctacccggacttttttgttgctgttgttgttttgagaccagagtctcgctgtgtcgcccaggctggagtgcagtggcatgatctcagttcactgcaaactccacctcctaggttcaagagattctcttgcttcagcctcccatgtagctgggactacaggcttgcgccacgacgccgaataatttttgtatttttagtggagacggcgtttcaccatgttggccaggctggtctcgaactcctgacctcaagtgacccacctgtctccgcctcccaaagtgctgggattacaggcgtgagccacagtgccggccttttttttgttttgttttgagatgggagttcaactcttgttgcccagattggagtgcaatggtgcaatctcagctcactgcaacctctgcctcctgggttcaagcgattctcctgcctcagcctcccaagtagctgggattacaggcatgtaccaccatgcccggctcattttgtatttttagtagagatggggtttcactatgttggtcaggctggtctcgaactcctgaactcaggtgatccactcacctcggactcccaaagtgctaggattacaggcatgagccactacatgcagcccccaggagctcttgatctgaggcataaagatgcttagagggtttccaaatatattttatggtcacctattctcccaacaatgtgtgctatactgtgtgtttacacataggtgtgtctttagaggaaagggttcaaagctttcattagattctttttttttctaataaagaaaaaagctttgttgcccaggctggtctcaaactctcaagctcaagcaatctgtccgcctcggcctctcaaagtgttgggattacagccatgagccaccacgctggtcctcattacattctcaaaggggcctattgaaaaaaaaaaaaaaaaaaaaaaaaaaaggccgggcacagtggctcacgcctgtaatcccagcactttgggaggccgaggaaggcggatcacaaggtcaggagatggagaccatcctggccaatatggtgaaaccctgtctctaccaaagtacaaaaaaaaaaattagccaggcatggtggtgcgtgcctgtaatcccagctattcaggaggctgaggcaggggaatcgcttgaacccgggaggcggagattgcagtgagctgagatcgcgccactgcactcctccagcctggcaacagagcaagattccgtttcaaaaaaaaaaaaaaaaaagtttactgtcattttatgttatatactttttttttaaagttttatttttaaagctgcttttagacaagtcgaaggaagaaagaaggggataaggaggaaagaattttgtagacaaaatttaacagaggtcaattttttttttttttttttgtctcccaggctggagtgcagtggcatgatctcagctcactgcaacttgccctcccaggttcaagcgattcctgtgcctcagccacccgggtagctgggattacaggtgtgccccaccatgcccaggtaatttttgtatttttagtagagttggggtttcaccatgttggccaggcgggtctcgaacttctgacgtcaagtgatcagccagtctcggcatcccaaagtgctgggattacaggcgtgaaccaccactcccggccagatgtcaatttttgtttccacaatttcaaggaagagaaagccagtgtgaccagaggtcaaaagatgagaatgttggccgggtacggtggctcatgcctgtcatcccactattttgggaggccgaggcagacagatcacctgaggtcaagagtttgagaccagcctggctaacatggtgaaacaccgtctctactaaaaatacaaaagaatttgctgggcgtggtggtgcgtgcctgtaatcccagctactcaggaggctgaggcagtagaactgcttgaacctgggatgcagaggttgcagtgagccaagattgcaccgctgcactccagcctaagcaacaagagtcaaactccgtctcaaaaaaaaaaaaaaaaaaaaaaaaaaaaaagatgagactgttgagtcaggattaggatccaggtctgctggcaccaatttcagtgctctttatactttctgttgctattcattcattcatccattcattcagcaaatttatatcaagtatctggtatgtgccaggtatgattccaaattacaccattcccagattattctgagaatgctgcagtgccaaactcttggtatcacagactttatattctagtgggggagayagacaaaataataatataacgacgaaggtgcaatgttatgtgctatgagaaaacgcagtcggaggatggcgaggaaggggaacggaattttagatagggcggtctgggatcagaacctccagatgcccgtccatggactccaacgaagggagcgattccaggtaccagggcaccctgcacaaacctctcttgagcttccgcctcgcccaggtggggacggtagggagaccggagggcacacgcatgcgcacgaaggaaacggtaaagcctgaagggaggtgcagagcgcatgctctctcttgcccgagatgccgaggaytttgacaaggactcygtcgtcccggatgatagtgctcaggttaatgccagtgggagggcggcgcccaatagtaacttcctttggaggttgtagtaccgcccccagagccaattttccacttccgcttccggcgctgcggcagtccagatcaaaaatggcggtagttggtgtgtcctcggtttctcggctgctgggtcggtcccgcccacagctggggcggcctatgtcgagtggcgcccatggcgaagagggctcaggtactggggccggggtcgacgggtcgagcctcmgccccactcgggcgagacagggagggactgtgaccttggcccgaggccttgcgggagggaaagtgagacccgggcccgccccataccggcgctgaacgtttgtggcttctccgcagctcgcatgtggaagactctcaccttcttcgtcgcgctccccggggtggcagtcagcrtgctgaatgtgtacctgaagtcgcaccacggagagcacgagagacccgagttcatcgcctacccccatctccgcatcaggaccaaggtacgcccttgtacatctcttcaagcgtccgttctcttttcgttatgtgtgccttagtgcaagttcttcattctctgaaggcatgggtgccaggcgtgtacagcttgtttatcctcacaaacagaaaatgtattttcttccattttgtggatggacagctgacacttgggattacgtctcaattctcttcttcaaggtcatacaataagtgctcttcagtttcccttttctccgattcatcctacctcctgccttctgagacagttctttttttttttttttttttttttttwacttctgagacagttctgaaacaggtgtccgttgtgtaaagcctggaggtttgggaaatccaattagagtggcaaagtctgaaggtggttcgcgtaagcgaacccagcagctacatgggaggctgaagcaggagaatcccttgaacctaggaggcggagtttgcagggagctgagatcgtgccactgcactccggcctgggcaacagagcgagactctggtctcaaaacaaaacaaaacagcaacaacaaaacatgggcatctggcagctactagttgcataatgaagagactgacagctttctctattccccaccaataccttttctcgactgttttatcattggttgttgatgtagatatattacaatgttgtgtcctctgttgtttgctgtatctttaacaagggcttattctgattcttcaatactggccatgcgcggtggctcacgcctgtaatcccagcactttgggaggccaaggtgggtggatcgcckgaggtcaggagttcaagaccagcctcgtcaacatggcgaaacactatctctactaaaagtacaaaaagtagccgggcgtggtggcgggcgcctgtaatcccagctactcgggaggctgcggtgggagaatctaggaggttgaacccaggaggaggaggttgcagtgagccaagatccagccattgcactgcagcctgggcaacaggagtgaaactccgtctcaaaaaaaaatagtaataatatacttgatcttagccaaaaggccgagaagtgatgaaaaaagttattattattattattattattacatcacctagcccatataggactggccttgtagaaacttaacctagactcttgaatttgttgagtctttgagcggcactcccatccttgtacaatgcaattagaagccaaacagtaaaggtttctcagcctcagcactgttgacatttggggctgggtaattcttgttggggggctatcttgtgcattgtgaaatgtttagccatatccttggcctgtacccactaggtggcagtagtacctgcgcaaccccactcccgcttccccctcccccgcccccatcacagtgtctcccgatactacccagtgtgccctgaaggggcaaaatcaccctgggttggagaccgttgccctaaagtaatgcttttcaaaggtaataggcaagataattcagggtgggctgcagtttcccagcccagatattgtttgaagtctgggatggtgccagaaatctgcatttaattaagcatctccctcccctaatactgccaccattttgatataggtgatttgaggattacactttcataaacacagcactggatatactagttactagggagaggatgatgagtaactaacttgagcttgcattttctgccatccatatttgtttctggaattaaaactgtcctgtagccaggataactttaagggctcccctggtagttataagagctccttaaataatgggaaggttgaactacaccagtagataaaggactaatttccattttgtttttatatatgatctgtcaccccgttataagcagttcatgacggkgttctttctaaattattttctggaattayctaactgacatcttcactccacagccgtttccctggggagatggtaaccatactctattccataaccctcatgtgaatccacttccaactggctacgaagatgaataaagagaatctggaccactacccgggcaccagggaccacagcactggtttggaccgttactctgcacatggaccagaaaaagtatatgggaccttaagctcaccttctttacttgtatcaaatgatgactggtatactggtctcccatccctttgcttgtggcaggagatggcttaaataaataacttaaayttagattggtcatgagctgagagttactttctttggttgtgttttttcgcagaaattagcatttgagcttcaagtcagtgtccaagttgaaaagaaattggcattagttatttctgtttccacagtgaaggtctaggctgctgtttagtgttacaggtccaattcagcccattgaataagtgtttataacagcccctcttggtttattgtgcctgatgtggataaagggaccaagtggagtggtgctaattaagcatcaagattagtccttggtcaggtgcggtggctcatgcctgtaatcccagcactttgggaggctgaggctggcagatcacctgaggtcaggagttggagatcagccgggccaacatgatgaaatcctgtctctactaaaaatacaaaaattagttgggtgtggtggcgcactcctatagctgggtgtagaggcttgaacccgggaggtggaggttgcagtgagccaagatcgtgccactgcactccagcctgggcaacagagtgagactctgtctcaaaaaacaaaagattggtccttgacgggcctgagatatcaaagacattgaatggctagcagaatgcctgcaatttacacctgaaagaggtatctgtatttctcaagaggaagtgcttgatctgggtctcatctttttcctgtcccattccactagcatttactgcagaatcttccctgtagtcataattttcttgaacatgtcaagttcttttttttctttttttttgagacggagtctctctctgttgcccaggctagagtgcagtggcacgatctccactcactgcaagctctgcctcccaggttcaagccattctcctgcctcagcctcccgagtagctgggactataggcacccgccaccacacccagctaattttttgtattttcagtagacacagggtttcaccatgttagccaggatggtctcgatctcctgacctcgtgatccacccgcctcagcctcccaaagtgctgggattacaggcgtgagccaccgtgcctggcctcgaatgtgtcaagttcttactttgaggtaatctccttcagggctggtagggtcagaaatcttaagagaaacaaagggagcgtgacacatttctgcttattggcttttctgtggaattaaaactatcctgctttaatggatagtaaatggtagtagtagtagttacaaaaccactctgagagggcaattattattattattattattattattatttattttttttttttttttgagacggagtctcgctctgtcgcccaggctggagtgcagtggcgggacctcggctcactgcaagctccgcctcccgggttcacgccattctcctgcctcagcctcccaagtagctgggactacaggcgcccgccactacgcccggctacttttttgtatttttagtagagacaaggtttcacatgttggccgggctggtcttgatctcctgacctcgtgatccgcccgcctcggcctcccaaagtgctgggattacaggcgtgagccaccgcgcccggccgagagggcaattatttgcaatcaaaatggtttattttattttattttattttttgagacagagtttcgcttttgttgcccaggctggagtgcaatggcatgatcttggctcaccacaacctccacctcccaggttcaagcaattctcctgcctcaccctcctgagtagctgtgattacaggcatgtgccaccacacctggctaattttttgtattttannnnnnnnnnnnnnnnnnnnnnnnnnnnnnnnnnnnnnnnnnnnnnnnnnnnnnnnnnnnnnnnnnnnnnnnnnnnnnnnnnnnnnnnnnnnnnnnnnnnnnnnnnnnnnnnnnnnnnnnnnnnnnnnnnnnnnnnnnnnnnnnnnnncaacatggtgaaacctcatctctactgaaagtacaaaaattagctgggcgtggtggcacgcacctgtagtcccaggaggcggaggttgcagtgagctcagatcgctccactgcactccagcctggtgacagaggagactccgtctcaaaaaaaaaaaaaaacttttttatttttttttgagatggagtctcactctgttgcccagggtacagtgcagtggcatgatctcagttcactgcaaccttctcccaggttgaagcgattctcctgcctcagcctcccgartagctgggactacaggcacgtgccaccacgctgggctaattttttgtgtttttagtagagacaaggtttcacatgttggccaggctggtcttgaactcctaacctcaggtgatctgcccacctcagcctcccaaagtgctaggattacaggtctgagccactgtgcctggccagagctggtttattttattttattttattttttgagacagagtttygcttttgttgcccaggctggagtgcaatggcatgatcttggctcaccacaacctccacctcccaggttcaagcaattctcctgcctcaccctcctgagtagctgtgattacaggcatgtgccaccacacctggctaattttttgtattttaagtagagatggggtttctccatgttggtcaggctagtctcaaactcccaacctcaggtgatctgcccacctcagtctcccaaagtgctgggattactggcgtgagccaccgcgcccagccagctggtttattcttaaggctcaaaggaacactttcgtggtaaggttcaagaggcaacaaggtatttcatattatattacattaaactggtaacgcaaaagtaaggcatatacagtacggaatagagaatctcattgtctttgccattttgtaataattaacggaatagagaatctcattgtctttgccattttgtaatataacagcctgcacttctgagtccctatagagctgttttggttgtggccagtctgagtttaggacagatgcattatacttcagcttgctgcctggcctcccttggctgggttccaaacatcttttataatccttggataatggaccctagccagtcataaaatataaatgaagaatgttttgaaatgacattaaggacaagtcacattaaatatgatgtagcaattggtaaagtggagaaaagacaatagaattagggccttctataaatcaagtttcttggtttatttttcagacagggtcttgctgtgtcacccagcctggagtgcagtggtacaatcacagctcactgcagtctccacctctcaggctcaggtaattctcccacctcagcctttagagtagctgggactacaggcacacaccaccatacccagctaatttttttgtagagacagggtttcgctatgttgcccaggctggtctcaaattcctgagctcaagtgatccgcccatcccagcttcccaaagtgttaagactacaggcatgagccaccatacccggcctgtaattcaagtttcatactactttgggtatctaataaaaccaaattactcaattaattgtggggattacgtgacattctgaggtaagtaagtgctctcctgatccttttttggtaccatagtgtatttgtatagcctattgtggaaattttagaaatcagtgaggttttggctgggtgcggtggctcatgcctgtaatcccagcacttcgggaggtcaagagttcaagaccagccaacatggtgaaaccccatctctactaaaaatacaaaaactagctgggcatggtgatgcatgcctgtaatcccagctacttgggagactgaggcaggagaatcattggaacccaggaggtggagtttgcagtaagacaagattgcgccactgcactccagcctgggtgacagaaccagactgtctcaaaaaaaaaaaatgtgaggtttctgattgccatactgtaccacctagcttaagacaagtcactttttcttcacctttaagttacaaaacacaaaactctccccactgtatatatgaggtttgtagggtaacagggtaatagttccataaaatgcactgagttccagaggcaaataatgatagaaactaaatgttacaatttattccatcttcaggattacagacattacagggcaggatgagtaaamaaggcaaatgaagcgagcaccttcagcttcccccctaccccgacatttaaccagatgcagcattttgacatttttaggatatgcaggttgacaattcactgacttgggttgagagctggcaatagcagatctttgcaatttaggttcttcctccacagctattccaagtatcttaattcctgaactgcacactgagagctctgaaatggtgttcactgcaacattcttgcagctttcacatcttaatctgacacctcttgtgaaggcagggaactgtgttaaaagctgtcttcctctttgctaatccaggccaccatcaatcttaaccattagttactatataaaaataaaagtgtgctcaaaagcactcactgaaactgttgtgcccagatcccttttcagagcattagttccctgagaggaaaaaaagaggtcctaaccaattgctttcataaatagtgaccccagtacagtgtatatgtcttttgcagcagaaatcaagaggtcaggcagctctgctcatcctgactagtttatcatcgtttgcatacaaggtatatttatgtaaagctgattccacgccaagtattgcaaccataatctcaaaaaaattgttcaattttagcacacagttcctgcaagataccacagcaggtgagaaatcatctcaaagagttcatcttttacaactgagaggaaaacatcgaaggaggaaataaaactcctctctcctaagttcctcatcaaatctgatggctatgttcacagagttagttgacaaaaatccagagtcctcaatttctggacttgcgaaatccttcaaggtgactgtcaaggtcaagaagaattttcaggcttttctttgccatggcccatgaactccagtccttcaataggaatctctttctcctttattgctttctggtaggaggagaaaacacattataaagacctacatgaagcttaagttgcaagctttgtaaataaaatatgacagtacaaaagtaaaatcaagctgattataaagacttataaccatgattcaaaccacatactttttaaaaaacaagtaccggtcaggtgtggtggctcacgcctataatcgcagcattttgggagaccaaggcaggtggatcacttgaggccagaagttagagaccaacctggccaacatggcgagaccctgtttatactaaaaatacaaaaattagctgggcatggtggcgcatgcctgtaagcccagctactcgggtggctgaggcatgagaatagcttgaacctgggaggcggaggttgcagtgagctgagattgtgccattgcactccaggctgggagacagagtgagactctgcctcaaaaataaataaaaaccagaagtaccataatgaataaatcaagtgtaagacctgagggagactggaaaaggagttgtgagggaaccgttaaaattaagtgaaatttgaaaaataatcatcactttgtgttagtgaaagacttaggttcaaatctgggttccaggacttactggctatgtgactaactgtaaatgggatgaagacagcaactacctcggggaattgctgtgaggatgtgttgggttaacttattggaagtgctttgcccggtgctgttcttaacaattcaaagcagttccacatccattgggccagaataaacatttcctggctgcagttgcggggactggtcaagagagagaaacaggctaacgaagggtttataacaacaaaaaaatgtgaccctccagtctgaattctgaagtataatcccgcccagaccccagcagtaatagtggaaaagtgcaccacctgcgaaagaaccaaggaaacctgatgctagtgaactcggattaatcacttcctatttctgg

SEQ ID NO: 93849 - DNA, 13794 bp, Homo sapiens
aggacctttagaatagaatttttataattctttctaatgagatggtggcctctctgcaagggatactcgtttccatttatagtggtaatgcagtgtttatttcaaaaattcataatttatgttttaaaatgtaagttgaattaaacaaaaatatgaattagacaaaagtgttggaaagcatggcaagcattttgatggtggcatacaaatgattggtctttggaggcacaagtctaatagctcttgagttcataatggcactctaagaagaacctgaccactattcttccttctccagaaactttcatggaatgaatatagctttttgttgttgttgtttgagatggagtctcgttttgtcgcccaaactggactgaagtggcctgatctcggctcactgcaacctctgcctcctgggttcaagcgattctcctgcctcagcctcccgagtagctgggactacaggtgtgcaccaccatgcccagctaatttttgtatttttagtagagatggggtttcaccatgttagccatttcaatctcttgacctcgggatccgcctgcctcaacctcccaaagtgctgggattacaggcgtgaggcrctgcacctggccaacatagtttaattttatctcaacttgccaatattctccaaacattgttttttgtttgttttcttctgaacaccttcttcaataaaccaaacaaaaaaactaaaacaaaaccaaccacaatgaacaacttgaacatgaaaccccaatatatatttgcttaaaatgtgaaaattatacttacatatgacagacagaatagagtagtagttatgaatgtaaactttccagccagaccatggagttcgaatcccagttctgccacctgtctactatgtgatcttagagggatagcttgacctttctgtgcctggaaagtagaattaataatacctacctcatagagttgtgggggttcaatgaaatgatatatgtaagctattagaatgttgcctgacatagaataaaaactcattgacattacttattatgatgattgttgtgcagcaaaataggtaccttataaaatactttaaaattataaatttaagattaagataggcggtaatcccagcactttgagggggctgagacaggtggatcacttgaggccaggagttcaagacctgcctggctaacatggtgaaaccccatctccaccaaaaaaatacaaaaaaattagccaggcatggtggcatgtgcctgtaatcccagctactcgggaggctgaggcaggagaattgcttgaacccaggaggaggaggttgcagtgagccaagatcgtgccactgcactccagcctgggtgacagagtaagaccctgtctgaaaacaaacaaacaaaaaaaagcacaaacaaacaaaaagagatcaagattatagaggttctgttatgtcccttcaccttcatgaattgtcttgtgatgtctggggtgcattcacccccactttggaaactgctggcttaagcaatgatagaaacatactatgtccctgggtattctgattcttgagatgctctgtaaagcttggaggactgtgggtgggtggattcttccacgcttggattatgcacactctcatttctacacaaacctcttggcttctctgcttgtaaacagtaatcaggtcaggctgaatgtggggccggtagtcccaagctcctggccagtcctactcagtcattcctaaggatggaggctgcatgggctctgcctcttaccttgcacctgccaccctgtgcttaagcaactcccgcacagcttaactcctggagacagtggccggtggggacagctgcatgtcagtctgtgctgtgaaaccagtcatccttgtaaccaaatgtgagagcggcagattaaagcagaattacctaaagaggtttgtaggacacacactgaccgagtcccctgctgccagcagctgctcttcttgacatggggccaacccagaaactttgcaggatgctctcagatgctccagcagccagagaggtgatgatggccctggaactgctgagagcagctggtttcatcagggctggctgaatgtctggatcaacagcgaaatctctgactctgtgccagggagtgggctcgtgggcgctgcgttgacaactgtgactagtaaacccagcgggaaccaggtctaattacagtagagctacagaaattgcccccacattccagctgtttaagtcagataattttagggttgagaaagaccctagagatcacctaatggatcccaaacctagttgcttacagcatcaatgagaagccttaaaatttttatagtgaattagctcagtcatataaaacagtggaggggctgagtcaccacatcatcctgtgttccacttagcttaagaaatggaggccaggcgaggtggctcccacctgtaatcccagcactttgggaggctgagacaggcagatcacttgagtttgggaccagcgtggccaatatggtgagaccccatctctactaaaaatacaaaaattagccaggcgtcgtggtgcgtgcctgtaatcccagctagtcaggagactgaggcaggagaaccacttgaacctgggaggcggaggttgcagtcagccgagatggcaccactgcactccagcctgggtgacgaagtgagacacatctcaaaaaaaaaaaaaaaaaaaagttccccaagcattcccagtgacccagtgatgagccaggattggtgaataaccgctctcactggggcttgcctgagtggactgagcacctgtgttgaagttaaaagacctgaggtcccatcctggtggtgccacctccctcctgtgtgacacctggcaaggggcatattccccaaaacctcaatttcttcatctgtaaaaaggggataaggacaataaacttcctttcgagctcatgcatgtatatgaagctctaaaacactacacagacataggacttaagggctcatgcagcctagggttggtcacctccagtgacaggaggctcattactttcagagacagcctccccccacccttttttctgaaagctctgatggacaaaacgtccttccttattctgagtagaaatctgttccctgtcattttctcctattggatttaattccacccctcagggaaccacagaataaacttaatccttaatttgcagaccagttttttgaataatcgaagacaatatagccctttggctttccttctctacctcaattctaggcttctccacacactgtactgagaaagtccctttatgaataagcaatatttccagaaattaccataggcatggctacatttcagcaaaccggagaggctgtgttcctggattagtgattcaggaaaatccatttagcctctagttaattaaatcgcccagtcacatcaagtcgtcttgttaaattaatcacctgtgctatgggatctacttattaaagtatttgcttagtaagtgtataacatctatgcaacccttttatgtgccaggcactgctcagtgatttgcatgtacttagttctcacgataaaccctgaaaggtaaccactgttatttccattttacaaatgaggaaactgaggctcagagaggttaagaaggtgcccaagatgatgcagccagtaagtgacacagtagggtttggactcaggtctggctgactctaaagcctgcgtgggcctgacacagtggctcatgcctgtaatcccagcactttgagagggccaaggtgggaggatcacttgagcctaggaggttgaggctgcagtgagccatgatcattgccagcctgggtgacagagtgagaccctgtcaaaaaaacaaggccgagtgtggtggctcacgcctgtaatcccagcactttggaagactgaggcgggaggatgggttgagcccaggagttcgagatcagcctgggcaacgtggtgaaaccccatctctacaaaaaattcgctaggggtggtggtgtgtgcctttggtcccagctactggggaggctaaggtgggaggattgcctgagcccaggaggtagagactgcagtcagccaagatcacaccactgcactccagcctgggtgacagagcaagaccctgtctcaaaaacaaaacaaattaaagcccatgtactcaggactgtggcaatagcctcctgaggtagaaattctaaaacaaacgaacctagaatttcaaaataccctcttaactggaactaaatcaaactgcgatttcattcaaaattatttgatttgaagaagctgttccttttgctttcaagaatagggttgtttggtttttttttctttttttttttgagatggagtctcactctgtcacccaggctggagtgcactggcgcaatcttggctcactgcaacctctgcctcctgagttaaagcgattctcttgcctcagcctcctgagtagctggaattacaggtgcccaccaccatgcccagctaatttttgtatttttagtagatacagggtttcaccatgttgaccaggctggtcttgcactcctgaccccaagtgagacacccacttcggcctcccaaagtgctgggtttacaggcgtgagccaccgtgcgcagctggtttttttttttaatttgaagaaaaatgtacgtaacatggaaatgcacagatctgaaatgtacaaatttggtgagttttggcaaacatataaatctgtgtgtcttaaattccaatcaagataaaatagtttcatcactacagaaagttttctcatgccccatccagccagttcccagccccaggggtgactgaccactgttctgatttctgatacgaagactgatttttgcctatccttggcatgtcatgggtggactcatgtagtgcgtactcttttgtgcctggcttcttttgctaaacatgttttgagcctcagtctccttgtgtgtgcatcagctgttcctttttcatggctgagtactactccattatatgaacataccacattttctacattcctcttataacaggttttaacactttgatacatcatatagaggtaataatatgtaaatcactcatttattcmttaggcaaatttgtctttccagagctttctctatgcaaggtactattggaggtgctaggagactttggtgaaaaaaacgaagcccctgctctcacagggcttttcttctatagtaggagagaaaaacaatatagaaaaaaattaaaggaatgatcaaggcagtagtgggaactgcaatgaacataataaatctgagcgaaggtaccagggtggcttgtaaggacgttgggtgttccatttttttttttttttttgagacagggtctcattgtcacccaagttggagtgcagtgttgccgtctcagcattgcagcatcaacctcctacctcagcctcctgagtaactgggactacaggcaccacgcccagctaattgttatttttgtaaagacagggtctcactatgctgcctggggtggtctcaggtcttctttagaagtcacgcaggcccacgtgagggacctggaagtgaaccggggtcgtgcaaacagtggtacttgaacagtttcacagctgatgaaactccttggcattgactcattcatcattaccctctcttcattttttagatgagaaaactaaggcatagaaagattagcaacttgtcccaggacaagtgtcaagtccaggtcctgaacccaggcaacatagtgctgtggttaccacacatgctttggaatcagacagagccaagttcgaagtcctctttcacctggatgtccttgggcatgtcacactctgagtctcagttttctcatgcatcacatgaaggggataccgtctaactcaaagggttgttaaaagtgaaagataatcttaggtaaagaatttagcgcgctgtccaccgccgctgcctgagccgactccgcgccgactgccgcgatggaggccgccgtccaattcttggtccagagccgggacgtggtctttggcctcraggccatcgaggctcagtacaagtaccagacaacgcgcgtcagaagcaagggcggcgtcctcgaggtgcacctcaagtccacgcacttcaccttccggaccgcccggcccgcatgtgcccaggctacgggtcatgcttgtcgcctgcggtggtaacaacggttccacgctcaccgccgcggtgctggccaacctactgcgtctgtcctggcccacgcgcaggggtcgcaagggggccaactactacggttcactgtctcaggtgggcaccgtgagcccggtcttggacgccaagggccaggaggtgttcgcgcccttccgcggctgctgcccatggtggcgcccaacgacctcgtgttcgatggctgggacatcttgtcgccgaacctggccgaggcgatgcggctcgcgaaggtgctgattgagggctgcaggagcaactgtggccgcacatggaggccctgcagccccggcctttggtatacatcccacagttcatcgcggccaaccagaacgcgcgcgcggacagcctcatcccgggcacgcgcgcgcagcagctagagcagatccgccgggacatccgatgacttccggtctagcgcagggctggacaaagtcatagcgctgtgaacggcgaacatggagcgcttctgtgaggtggtcccaggtctcaacaacacggccgagaccctgctgcgcaccatcgagcttggtctgaaggtgtcgccctccacgctcttcgccgtggccagcatcctggagggctgtgccttcctctgggtccccacagaacactctggtgcccggagcccttgagctcgcgtggcagcgccaggtttacgtgggcagagatgacttcaagtcaggccagaacaaagtcaagtccgtgctcgtggacttcctcatcggctatggcctcaagaccaagtcgattgtgaattataaccacctggggaacaacgaccggcagaacctgttggcgccatcgctgttccctctgaggcggtgtccaagagcaacgtagtggacgacatggcgcaaagacacccagtgctctacgcgcctggcgaggagcctgaccgctgcgtggtcatcaagtacatgccgtacgcgggtgaccccaagcgtgcgctggatgagtctaccttggagctgatgctgggcgtaaccaacacgctggtactgcacaacacgtgcgaggactcgctgctggccgcccccatcatcctggacctggcgctggtgaccgagctgtgccactgcgtgagcttctgcaccaatgacaacaccgagccacagaccttccaccccatgccgtccctgcttagcatctcttcaaggcgccgctggtgccgccgggcagcccggtggtcagtgcgcttttccgccagctcagctgcatcgagaacatccacagggcctgtgtggggcttccgccacagaaccacgtggtcctggtgcacaagatggagctcccagtgcctggcctcaggtgagtcggacccgtggctgccgcctgccctgtgtcgaacaagaaaggaccggtacccgctgccaccaatggctgtaccagtgataccaatggacacccacaagtggaggaaccccagatgcacaccacctgaggccctggtcacacagcttcccggcctttccttgctgccccccaggacccaacctttccaggcccccacaaagacagtaaagccggtgccactctcaaaaaaaaaaaaaaattagctcttcgcggtcgggtgcggcggctcacgcctgtaatcccaacactttgggaggccgaggcaggcagatcacttgaggtcaggagttcgagaccagcctggccaacatgatgaaaccccgtctctattaaaaatacaaaaattatctgggcatggtggcgcatgcctataatcccagctacttgggaggctgaggcaggagaatcgcttgaacccgggaggtggaggttgcagtgagccgaggtcatgccattgcactcccgcctgggcaacagagcaagactctgcctcaaaaaagaaaaaaaaatctttgtgttcatgttcattaattcattcaactcatgtgaatgtatcatctaccactaggtggggaggatacaacggagaataagcagacacagccccatctcatgcagctaatggcctatcattagaataaataaatttgataaaaaatgtagataaagcacatggaatgccaacttaacatagtcttggggaagtcagggaaggcttcctggaggaagggatgtttaatctgagtttacccagtgaaggaaatgtgaaggtgggagaggcttctttgtagttgcttttgggtgtgattttggttttataaatcagatacacttgcttgagaattggaaggcacgtgcatggtgccatgagtagtatatcattgctggtttttctggaacacgtttcattgtctgggcatcagcttcttgggagtcgagaggcagggtgaggctcatctattttttgttggattggatctctcaggtgtggtgtggctctaaatctaatactcagagttttagcagctgaagaggtgtgttcctgaagccagcagcttcagcagtcctgccttcctagtggtggcagcgtccctggtaggctggtcctggggcctggtctagagtccactgccccagcccttccagtgatatttgtaaattctttttttttttttggaaacggagtctcgctctgttgcccaggctgcagtgcagtggtgcaatctcagctcactgcaatgtctgcctcctcggttcaagagattctcctgcctcagcctcctgagtagctgggactacaggtgcctgcaccatgcccggctaatttttgtatttttagtagtgatggggtttcaccatgttgactagggtagtctggaactcctggcctcaagtgatctgctggccttgacctcccaaagtgctgggattacaggcataagccaccatgcccacctgtttgtaaattcttaatttcctatttgaaatccctttctgcttaaaataattggagtggtttcgatttcctgctactgacccttccttatactactgaggtacaagtagattaatttatttagttgttattttctgagcacctagaatgtgccaggcactagtttttggctctgaaaatataacaatgaacaaggcaaaggtcttgcacttttgtcttattatcacggctgttatattctctatcagagctgtccaatacaagcataatgtgagttacatgtgtgttgaaaaaattttagtatctggccgggtgcggtggctcatgcctgtaatcccagcactttgggaggccaaggtgggcggatcacctgaggtcaggagttcaagaccagcctggccaaatggcgaaaccctgtctctactaaaaatacaaaaattagccgagcgtgatggcaggtgcttgtaatcccagctactcaggaggctgaggtagaagaattccttgaacccaggaggcagaggttgcagtgaaccgagatcacaccactgcactccagcctgggcaacagtgcgagactctgtctcaaaaaaaaaaaaaattagtatccatattaaaagaacaagtgaaattaacctaacacatccaaaatattatcatttcaacatgtgcttaatataaatattaattaatattttatgtacttttttcatgttaagtcttggaaatttagtgtttagtttttacttacagtacatctcgattcaatgcaaaatttttattggaaatacttcatctgtattacatttcattacatttatagttgaaaaagtagactcatcactaagaggttccagatatacttaaatattttccactaaccaaaaaaataccaaaaacaatttttccttaatatttgcattcatattgacaaaacttgttcatcctttctagaaggatttgactttggagcaaaagtatatcagtttcaaaactatatctgttcaagttaagtaaattcaccaactcgagtcaaatctgaagcatactacataattgaaaaataactcaaaatttatcaatgataatcatgtccttcacatttttttctgtctttgcagcttaacttacataacatgtttcaattaaatgaaaataacttgcctattaatttcatttagaaaaaagtataaaatcattgtattgatttgtattttaagtttcagtttcaacattaattaaatgtctagctatgtaacaaataagcttttccttaccttggagtttcaaatttagctcatccattcatccatgtgcagtgtaattttttctttcttttctttttttctttcatttttttgagatagggtcttgctctgtctcccaggctgyagtgcagtggaacaacctgggctcactgcaatctccacctcccgggctcaagtgatcctcccatctcagcctcctgagtagctgggattacaggcatgcaccaccacacctggctaattttttgtatttttgatagaaacagggattcactatgttgccccggctggtctcaaactcctgagctccaaccatctgcctccctcagcctcccaaaatgttggaattacaggcatgagccactgcacccggccagatatgcagtgtaattttgatgagagaacataaatcatgctgccattttttgtcttttattatgggataatttgccaagcttccctttgtttaaagaaaatcttgaattggagttaaaaatacagtaaccctttgtaaagctcttccgtgactcaaagagcattgacaaagaccacaagatcattaaatctgtcatctcctatttgtttcaactgtttcttaagctgaagacgattcatagcatttgaatgaatacaatgaacaatattaatctatgatgcttttcacagagtcggctgcagaaaactaagcacaactattttcaaaatgtatcacctaatgggctaagcaataaggaaaatattagtctcttatttgaaaattctaataaatccaaatttttgattcagcataatggaactaccatttgtggtgaaagaaactaatttttttcttatctggctggaattcttctttgacagttataaaagatttaaaaatatccatgccgcgtgttaagtttcttttaggctatgaattgacatttcttcataaatttgaagtcctttgagacaaagtacccaaagtattaattgggcagtgtctattatatcaaatgactcatctaaagctaaagtacttgtgatttttcaagattattgattggtctttgctattgttagaaaagtcttcatattttatggacaattatttgagggctcaattgaagagctttctctttttgtgaagtatcttttaaaatcttttcctcagaattttctaacaatatttccattgttaaaaaataatttattttaccatttcttcacctaaaagtgtttttcaactgagtactgtggcacgtgcctgtcgtcccagctacttgagagactgagatggggaggatcacttgagcctggaacttcgagtccagtctgggcaacatagtgagatcctgtctataataagtaaataaatatattttaaagtgtttttcttttgtgtataaaaagaattccagtctttttatagctggctaagtttataagcacagatcctgtttagatttgtttaacaattattttaaaattaaacattattgatgacctggcgcagtggctcactcctctaatcccagcactttgggaagttgaggcgggcagataccttgactcaggagtttgagaccagcctgggcaacatggcaagacttcatgtctaaaaaaaaagaaaagaaagaaaaaaaatagctgggtatgttggcacatgcctttagttccagctattatacttgaggctgaagtgggaggatcacctgagcccaggtaggaagaggctgctgtgagctgagattgtaccactgcactccagcctgggtgacagaatgagaacctgtctcagataaaataaacattattgcttgatatcttctcacataggagaaaaattaaatactcaacaaatttttgtcgaatgtttaaaacactcaacaaatttttgtttaatgttaactctgtttttaggtaactaattttgttgattcttttttttttttactattgagaggaaacttcttatcaaatccactatgcatatgctgaaaatgtctcttaatattgtccactttattattttatttaattaatttatttattttgagacggagctttgctcttcttgcccaggctggagtgcaatggcaccatttcagctcaccgcaacctccgcctcccgggttcaagtgattctcctgcctcagcctcccgagtaagctaggattacaggcatgtttcactaagcccagctaattttgtatttttagtagagatggggtttctccatgttggtcaggctggtctcgaactcctgacctcgagatccaccctccttagcctcccaaagtgctgagattacaggagtgagccaccacacccggccactttattattttaaaaagatttttttctctcacaaaaaaaaaaaaaacaacaaaaaaacaccaatttgctgcagcaaattgcaattacctttcgtcatctttttttggctttactcttcaggtgctagtttctgcatctccactcaattctgcatcagtagaatgcctttgcttaaaacttttaaatttgcccatactttttttaagctaaacaaatttaattgcattataattaaaatcagtatttcgatctacctcttactgtctgcagaaaatatttgttttttgttttgttttgttttgtttcgcccggcctgcagaaaagatttgaataggccgggtgcggtggctcatgcctgtagtcctggcactttgggaggctgaggtgggcagatcacttgtggtcaggagttcgaaactagcctggccaacatggtgaaaccccatttgtactaaaaatacaaaacaattagccggggatggtggctttaacccaggaggcggaggttgcagtgaggcgagattgtgccactgcactccggcctgggtgatagagcaagaacctgtctcaaaaaaaaaaaaaaaaaaatttaggattttactctgtagtctttattccttcaggactggcttcaagaactgagttcctagagtcaggataaccatcgtgctcattccctctcagctgagtgcttgaggttcaccactctgtaccccacaaaccaacacagggccagcatggagcagacatgaaaaacaaatattgagttgaatagcaccaaatgaaactgaacttcaagctgaaggtccaggaccctcgctcttctccagtgactcacactgcaaaactttctctcttttctttttgtcctttaccatcgaatctcccaagacctgatgattcttccctctctggccctctaaatgcatcttctcctctgtgctccctgcatttttgtgtaacccttgtaaacccaagtccagatttctgcccctgttcctgactggtctccgggctctccctgaccctgtggacagctaagttaatgccattcaagcttcccaaacaggaattccttctggcaccctctgccgacctgcgtgactgcctcctttgccaaagatacaggtcaaattctttagcctgtcacgactagcctggcaa

SEQ ID NO: 93850 - DNA, 30422 bp, Homo sapiens
ttagaagagtgccaactacagggcaaaacccccactagtaccaggcagctttgggagccccaggaggagggtggaccttggtgcaggtgtgcaagaatggcccactggggagggcaggacagaagcagtaacagcagactgcagtggggagcaggtctgagcccagtggacagtcttgggtcctgatggatattcagggaaccagggcctgtgttcctgaccttgaggctgtacagaccccagggagcaagcccagactggatgaagctcagaaggaaggaagtaggaggcaggatttggcctgagacttgctgtgcgctgtctctgatcatcccaccctgtcctccaaagagagagtgcctctggctgtgcgtcagtttccttgtctgtaagatgggaggaatcctgtagttgggagaggttcagggagcattcttggcacaaagcaagtgcataattaacattggctgagagtcgggcaccgtggctcacgcctgtaatcccaacactttgggaggccgaggcaggaggatcacttgagagcaggagttcaagaccagcctgggcaacatagcaagaccccctgtttctacaaaaataggaaaattgacccagcatggtggcacacgcctatggtcccagctacttgggaggctgaggcaggaggatcaattgaacccaggaggttgaggctacagtgagctaagatcacactggtgctctccaaggctctgggcagccacagagtgagatactgtctcttaaataggccaggtagggtggctcatgcctataatcccagcactttgggaggccgaggcgggtggatcatttgaggtcaggagttcaagaccagcctggccaacatggtgaaaccccgtctccactaaaaatacaaaaattagccaggcggtagtagtgtgcacgtgtaatccctgctacttgggaggctgaggcaggagactcgcttgagcctgggaggcggaggttgtgatgagcccagattgtaccactgcactccagtctgggtgacagagtgagaccctgtatcaaaacaaaacaaaacaaaaacaacaaaaacgtcagctgtaggaaggaaggatgattataggagttggggcatcaaatgggggcagaggtggctgcagcacctgccctgtctggctacaaacagcccagggacttcccagcccttcatgtcttctcccttgcaggtcttagcacctaggctgtaaattcagagaccacacctgcccagtgggtgtggctctgggtgtcagagagtagtggcatccatggggccactgggtgtcagacatccatggggccctgggtatcagagctgagctttatagaggtgacaaaatcaaaatctgtttgccaccacctcctcataatgtagcctaatctgggcatgggttcttccctgtctgataagtggcgggtacatggcacctcctagtagcttttatttgccttcctggggacacaaatgaggctgggcaccttttaaaatgaagaaggcatctgggcatggtgactcatgcctgtaattccagcactctgggaggccaaggcaggtggatcacttgaggtcaggaattcgagaccagcctggccaacatgataaaaccccatctctactaaaaatacaaaaataagccaggcgtggtggtgggcgcctgtaatcccagctattcgggaggttgaggcaggagaatctctggagcccaggacgaggaggttgcagtgagctgagaacatgccactgcactccagcctgggagacagagactccatctcaaaaaagaaaccaaacaaacagggctgggcgcattggctcacgcctgtaatcccagcactttgggaggcccaggccggtggatcacttgaggccaggagttcgagactagcctggccaacatggtgaaacccccatctctactaagaaaacaaaaattagctgggcgtggtggcaggtgcctgtaatctcagctactcgggaggctgaggcaggagaattgcttgaacccggcaggcagaggtttcagtgagcccagatggcgccgctgcactccagccttgatgacagagcaagactccgtctcaaacaaacaacaacaacaacaacaaaaaaaaaaaaaaacacaagcaaacaaaaaagcgcagaaggcacttttcccaggtgtggcctcctaactgcccagccttccagagcaggtgtgacgtgacctatctcagaagagtgaattccaagagagagggcgcggaacccgttaaacctgccaaccccgggcaggcgtgatgccattatgcagtttacatgccctggtctcttccacccgggtggccttaaaacctcagctgtggtacagagtgatccactggcacagcaccatcaactgggccacatgtcagaggccacccccagctgataagtggcctaattggattttcttttgagctgaaattcacaaaacaaaaaatgaaccactttaaaatgaacaattcagtgagtttcagtatattcataatatgtgcaaccacaccctttatctaatttgtgcacattttcatcccctccgaaaggaaaccctgtccccttcagcagtcatgccccatttcccctcccacagctcctggcaaccactaattagcttcctgtctctgtggatttgcctgttctgggcatttcacataaatggaatcatacgacatgtggccttttgtgtctggcttctttcactcagcatcgtgttttttatttcatccctgttgtagcagggatcaggacttcaatctcttatcaggacttcaatctctctctttttttttttttttttgagacagagtctcgctctgtcatccaggctggagtgcagtggcatgatctgggctcactgcaacctctgcttcctggatttgagcagttctcctgcctcagctccccgagtagctgggattacaagcatgcgccaccatgcccaactaatttttgtatttttagtagagagggattttgccatgttggccaggctggtctcgaactcttgacctcaagtgatctgcctgcctcagcctcccaaagtgctgggattacaggcgtgagctactggccaggacttcagtctttctgatggctgaaaaagactccaggcagggcacagtggctcacacctgtaaccccagcactttgggaggctgaggcgggtggattgcttgaggtcaggggttcaagaccagcctgggcaacatggtgaaacccccgtctctactgaaaatacaaaaagtagccgggcgtggtggcaggtgcctataatcccagctactcgggaggctgagacaagagagctgcttgaacctgggaggtggaggttgcagtgagccaagatcctgccactgcactccagcctgggtgacagagcgagactctgtctcaaaaaaaaaaaaaaaaaaaaaaaaaaaaaaaactcaagactccactgatggaccacatgttgtttatccattcatccattggacacttgggtcggtgatcaccacccaagcagctgaaaagaacactgtgaatcatgctgctatgaacttccctatgcaagcatttgtttcaacacctgttttcaactcctttgggtagatacctacaagggcaatggcgggatcatagggtcattctagtccggatttgaacccgggccctccagcaccagaattcactctattgcgtccagtgaaccccggaagcacccggtttaaaaggtctgggggctcagggtatctgtatgtcttacacatgggaaaagggtgggagggttcagtttccctgggtgagtggggcggggctagagctcacatcctcccagcagcctgaattctggagggccagtacctggtggaggaggggatgggcggggaccctgtcacaggatggtacttttttttttttttttttttgagatggagtctcactctgtcgcccaggctggagtgcagtggtgcgatcttggctcactgcaacctctgcctcccaggttcaagtgattctcctgcctcagcctcctgagtagctgggattacaggcgcccgccaccacacctggctaatatttttgttttttgttttttttttttgagatggagtctcactctatctcccagactggagtgccgtggcatgatctctgctcactgcaacctccacctcctgggttcgagtgattctcctgcctcagcctcccgagtaggtgggattacaggcacccgccagtatgcctggctaatttttgtatgttttagtggagacggggtttcgtcatgttggccaggctgatcgcaaagtcctgacctcaggtgatcccctcactttggcctttggaaggtgctgggattaccggcatgatctgcccacttcggccttccaaaatgctgagattataggggtgagccaccccgcccgcccaggatgggacttttggttccggctccttcccggccgacaaatcccttcctggggccatgacttggtgaacccagggacccaacagggtgagcatagactctgaatcaaagtccaaggatgtaccacagtaagaaagtgtgtgcatccagaaccgaggccagtagtgccacatttgacactatgacatttccggtaattgccctccatacagttttaatcatgcatttgctctgagggttcactccccagacctctcccatccagagtacccaggggctatttcttacattttacaggtgaggaaactgaggcacagacaggccacatatacacctcggcttcctcctcgggaagaaacagggatgaaggaggaaggaggggtttcctgaaaccatagcccagctcacacacctggacttccccaaccccagagctcccaacgctgggtccaggctagaatctcctagagattcagaggcagcacagggcagggttcgaatcctagccaacccaaccctaaaaatctacaaatctgaggccaggtgcagtggctcacatctataatccagcaccttggggatctgaggcaggaaggtcacttgaggcccacagttaagaccagcctgggcaacatatcaaaaccccatatctagaaaaatgacaaaaattagccaggcatgctggcgggtgcctgtagtcccagctactcgggaggctgaggtgggaggattgcttgaactggggaggtcgacattgtagcgagcggagatcacaccactgtactctagcctgggtgacaaagcgagatcctgtctctcaaaacaagaaaaaaagaaaaagaaaagactacaaatctgtctgattgttgacttccagaacccttccaaatgccagcaggtggcatctggatgtctgggggcacatcgtaggttttcgggtcctggaattattttcaatatagagatggaatctcactatgttgcccaggctggtctcaaactcctgggttccagcgatccgcccccctcggcctctggaagtacaggagtgagccactgcgccgaccccagcttcaggaatctttgaactccccgcagagagcagaggtgccgcaaggtttaacctgcctccctccctccttatcgccatgggcttatccaatcatttcttcacggaacacacgtgggccaacgctgaccgggctctgtgccgggaacccgcaaggcgctgcttgttcatctccagccacggggagctcattccctagcagcgggccagacccaaggtggggtcgtgagccccgagaggggcgagggtggcaagagcgggatggcagaggtggcagccgggaccggagaggggaagaggcatggccggggagggaggagccggcagagaacttcgcctgggccaccaggaaactcagccgagctgggaagagggggactggcaagcggccaaggcggagggaggcaggaaggcgtgaggcccggtgggagggaggaagcgggagaggggcgggagctctggctcaggtaaaaactctttcttcggctcgcgagctgagaggagcaggtagaggggcagaggcgggactgtcgtctgggggtgagtgtcggcagcccccggaggatctggcggaccccagtggtgggggtttgggggtggggaagttgtggctctggagaagcccctgccggtctccaccgcgcataccctgcagatgtgggaacattcgggagccccgagtctcgagaacccggttgccctcacccatccgtaattgtctccggcgttcccaaggccagctcggacctgggtcggggaggaagcctcccccacagctggcgacccgggaccccggcgcccctcccagattgggcgggatcagacccccgaggcggatgccgcttagtcagacttggctgttactgttacctgtgttgttgagattattggccccttggttgggagtatctgggcaagccagcgctggggtccccggttgggtttgggaactgcaggtgacccccagtctctccctgcggttccggtgctgcaggccctgccaggtggctgggcggcattccaggggccctggctgcgtggcatggacacattgctgaaccggcctcagtttcccctccgtgaggtggaacaatgaaccagctgggatgaggatgcccgaagcgtttagtcaaaggaaatttttgtgatgaggtgtactgctggccactgggggcccttgcgtgactggcgttaggtctctgagcctcagtttccctgtgtgttaagggggggtctcatggcatgggaccttggcgaggatgagttgagtggataggagctgtggccactcagtgggtgcccagggacagtcagctgtcatcataattatattaattatgtctgtagccactgttcagattcaytcctgttccaagaatcccgaccatcttttcctctgggtcagatttaaactttttgtttgtttgttttatttgtagaggtgggggactcactttgtcacccaggctggagtacagtggctccatgcactgtattcactgcagcctcaacctcctgggctcaagtgatcctcccacctcagcctcccgagtagctgggactacaggtgcacaccacaggcagctaattttaaaatttttttgtgtgtggagacggggtctcactatgttgtccaggctggtctcaaactcctgggcccaagcaatcctcctgccttggcatctgaaagtgctgggatttcaggcatgagccactatgcccagctctgatttttttaaatggacacttctcaagaggaaactgaggtcgcccctcaacttgggcgggggactcctgcagtccagatctgggattcagggcccatgggaagccacctggccgtctaggtctggggccagccctgggggccatcacttcctcccactggcctgttctcaaggtgacaccaggcagggctggtgtcaggaggaagaggtgtggcccccaggtcaggcagctgggcccccayatggcctaggtgagcagttgggtgtttgctcagtccagcctggacaccctccctcactctcacccctagggtgtggcatttcctggcaggtgctctgggtgtgggagaaccaaaagggggccttggtgcttctctgttccaggccagagttcaggaatccagacaagccaggtcagcccaggaggagcaagtaagggctcactgagtgacatttcctcctgccaccagcctctgaggcccagagcaagcaggaatttgctcactcccccaaccccatgagccagggaggatgcctattgtggaccctcttcctggtgggaatctggcttgccttgattgctcctcatgatggtgaggtcactaccaacgtggcaaactaaaggaaatctcatcagctgggagttaaagacaggaactaggctcccacccaacctttcttaggtggatttctaggcctctctgtgcctcaattttcctatccataaaaatggagctaatgcagccctacttctcagcacacatatagagtttagatggacagatggtggccaggctgcacacaggacctggcatattgatcctagtcctaattatgcagctcattatgttatcatttatagcatgtatctttgcacacagaaataatatcatgaatatttctgagctctaagtacaagacttggagaagagctctgaccagcctgaaggygtgggggtccaggaagtccccagaggaggggcccaggagacctcagttcccccatcactcctggattgtgggaagggtctgaggttgaactgcgatgcacggcctggcttcccagcctgtttccccatctrtggagtgagcccaaagatgccctttgagactccactgggccagggctggtgttattcaggggcccctttccagtctcacataggtgccccaggcagttcctgcaatggggtagggctggcatggatgacatacaattagtcatccatgacagagcctcgggacctagaaacccgggacaccaaagtctaaagtgcatgtgtcaccgtgcccaaccccacccctttttccatacccaggcactccctggtgcagatattgagtatatattgacagagaactcactagtacacatggtttcactaaagcagggtccggccattgtgaacttaaaggatttactgggctatttcttcttcttttcttccccttctgtttgcaaaagcaactcctgctccttgtaaaaagggaccagcctatcattactgggaaacccaaactggtaagaactggtgaggaaccacccacaggggctggcagatcagggttcaaatcccaccaacccgccctggcctcagtcggctgtgtgaccttgggcagagttgcaccctctctgcacagatcrtccacctggaccctaggctcccctctggaaggctcagtgagactcctcgggttcctccacaggccaggggctcacaccctctcctgcaagcgtccccaacttccaccctggagtttcttcacccctagaggttgcactcctctggaaaattgtcctgtttgccacttctctgtcccctgttagtggtgtatcagcgtcctgggcacacgagtrtttctctccatcatcttggctgtgtcctcggaaccyagacccagatgtggcatacgctaggtgctcagcacttgctcagagcagtcacaactctgcaggtgataagggtggtggcagctgctattaaatctcattgtggctgggcgtggtggctaacacctgtatttccagcactttgggagaccgaggcgggtggatcacctgaggtcaggagtttgagaccagcctaggtgacgtggtgaaaccccatctctactaaaaatacaaaaattagctgggcatggtaacgcacacctgtaatcccagcttctctggaggctgagacaggagaatcgcttgaaccctggaggcagaggttgcagtgagccaagatagcaccactgcactccagcctgggcaacagagtgcggctctgtctcaaaaaaaaaaaaatctaattgtggctgggtgcagtggctcacaactgtaatccctgcactttgggaggctgaggtgggaggatcacttgagcccaggagttggagaccagcctgggcaacatagcgagacccatctctacaaaaatgaaattagccaggggtggtgatgcatgcctgtggtcccagctactcaggaggctgaggcaagaggatcagttgagccctggagttggaggctgcagtgagctatgatcgtgccactgcaccactccagcctgggtgacagagcaagatcctgtctcaagaaaagaaaaaaaaaatctcattgttggcgcttcacatatgtgccacttggaraaaaggccactgcttggagctaccacttgaccctctagcctttcccaggactcaaatccgtatgtagtcaaacgggattcttccagaagcttctctcaccctccacctcttgccttgccttttggcggcctcagaatgttccacacctccatccaaatcccaatttaggatgggtgagaattggagaaacagcggccacagcaatgctgatagtcaggtggtggttctgccaccattccagctttttttttttttttttttttgagatggagtctcatttacccgggctggagtgcagtggcgcaatctcggctccctgtaacctccacctcctgggttcaagcgattctcctgcctcaggctcctgagtagctgggattacaggcgccctccactatacctagctaattttttgtatttttagtagaaatggggtttcaccatgttggccaggctggtctcgaactcctgacctcatgattcgcccgcctctgcctcccaaagtgctgggattacaggtgtgagccaccgagcccggctgaccatcccagctttgcagaggaggatgctaaggtctgggtggccccagctactcggcccaggtcccatggaaggtcagtagctgggtcagaaggcccttcctcaayggctgtcgggggtccccatggctgcttcaaaggcatcagctcacagaccagtcctcccagctgcaggcaaggcagagactgagagccagcgaccrggcwggttaggggtatccaggcctgggagtccctgaagagcgatccagaagtagccctatctgggcctcagtttcctcatctggaaagtgggagtttcacagggagaattaccttaatgctatggagacctctgagtcagtgtcaggacatcccccgccccctgtgccactccccatcacctgtggtctccaaatagtcttgggagtgaggggggcagatctagccccaggtggtaccagcagggtccttgatgactttcacatgccccacatctcttgcagacagtgacaagaacagggttgagactgggcgcagtggctcactcctgtaatcccagcactttgggaggccgaggcgggcagatcacttgaggtcaggagttcgagaccagcctggccaaygcgctgaaaccccgtctttactaaatatacaaaaattagctgggtgtggtggygcacacttgtaatctcagctacttgggaggctgaggcaggaggatcgcttgaaaccaggaggcggaagttgcagtgagccaagatcacaccactgcacttcagcctgggggacacagcaagcgagactctgtctccagaataaaaccaaagaaacagggmtgagggcgacagaggtgcctggagccacttgcacctggggcaagggcccagccttgactgccccctgggagtggcagaggacatggggccagggtgcagctgccaatgcctacgattctgctgagcagacaacccttctgcatatttagtggtcattaattttcaatgagtcattaatacttagtatcacctgtgcattgaagcatgaatattcagtgaccatgaatatttggtatctgaagactgtttgtggcttgttaatattcctcatgatactattaggccgggcgaggtggctcatgcctgtaatcccagcactttgggaggctgaggtgggtggatcacctgagattaggagtttgaaaccagcctggccaacatggtgaaactctgtctytactaaaaatacaaaaattagccgggtgtggtggtacatgcctgtaatccctgctactcaggaggctgaggcaggagaatcacttgaacccaggagggtgcaacctccaggttgcagtgagctgagatcgtggcgctgcacttcagcctgggcgacagaggctctatctaaaatatatatatgtatatatatatattcctcatgataatattcaagtatcatgtatgtgacttgcaactttaaaaaaaattcagtatatttgggcacaacttgcaacttttcattattgctttgcaactattttgtatattacgaatagtaggcacctcctctgtagttaatggattgttaatgttcagtacttcactaacatgcagcactttttttgtttgtttgtttgttttgtttttgagacagggtcttgctctgttccccaggctggagtactgtggcgagatcatggctcactgcagccttgacctcctgggctcaagcgatcctcccacctcagcctcccaagtagccaggacyacaggcgcacaccaccatgcccggctaatttttgtattttttgtagagatggggttttgccatcttgcccaaactcttgggctcaagtgatccttccttctcagcctctcaaacagctgggattacaggtacaagccaccatacccagctgttttttgtttttttgttttgagacaggatcttgctctgttgcccaggctggagtgcagtggtgctatcatagctcactgcagccttgaactcctgggctcaagcgattctcctgcctcagcttcccaagtagctgggactacaggtgcacgccaccacacctggctaatttttacactttttgtagagacagagtctcaccatgttgcccaggctggtcttgaactcttgggctcaagtgatcctcccacctcagcctcctgagtagctgggactataggcactcaccaccaccacaccaggctaattaaaaaaattttttttggctgggcatggtggctcacgcctgtaatcccaacactttgggaggctgaggtgggcggatcacttgaggtcaggagtttgagactagcctgcccaacatggtgaaaccccgtctctactaaaaataccaaaagtagccaggcgtggtggcacatgcctgtagtcccagctattcaggaggctgaggcaggataatcgcttgaacctgggaagcgggggttgcagtgagctgagatcatgccattgcactccagcctgggtgacctagcaagattctgtctccaaaaaaaaaaaaaaatcattgtagagacagggtcttgctgtgttacccaggctggtcttgagcacctaagctcaagtgatcctcctgcctcagcctcctaaagcactgggattacaggtgacttatcttgactgaatcacgggtgcccaaggcttactagtctcccaagctataaatctgtcttctgaggcagaacgtgtgcggcaggggactgtggctgctgcctcgtggagtgggggcgaggctgcagtgagataggaggtgatggctatcgtactttttcccttctgcaacaaactaggtagcatcctgtgggagcacagttgcaggagataagatgcccagccctggggcttcaggctggctgggcagatggacaggagagaagcgaagagatttcccatgtctgatggtggtgaatgctacagacatcagcagtgctggggctaggtgttttagcctggaggtcgaagcctctcggaggtgacatttcaggggaagcctaaatatgaagactacggaaagagctggaaaggaagggggtcctaggtggaggcagtggcaggtgcaaaggccctgaggcagggctgagcttgggtggtttttgtttgttttgagacagggtctcgctttgccaccaggctggaagtgtgatcacagctccctgcagcctccacttccagggctcaagtgatcctcccacctcagcctcccgagtagctgggactaaaggcatacaccaccatactcagctaatttttttactttttttttwaatttttagcacagacaggtctcccttttttgcccaggctggtcttgaactcctaggctcaagcaaccctcttgcttcagcctcctaaagtgcaaggattataggcatgagctactgcatccagcctgagcctgggtgttaaaggatttttttttttttgagacagaatctggctatattgcccaggctggcgtgcagtggcacgatctcggctcactgcaacctccacctcctggattcaagtgattctcctgcctcagcctcctgagtagctgggattacaggcgtgtgccaccacacctggctaatttttgtatttttagtagagacagagtttcaccatgttggccaggctggtctcaaactcctgacctcaggtgatctgccctccttgacctcccaaagtaccgggattacagacgtgggccacagctcccggccmtgtttaaggaggctggtgcagctggagcagatgagtgagggcagagattgtgtgggaaagatggcagcagagaggacccacatcctgcagccacaccccaggcggtggcttctgggtcttggcaggggaaataaatggcttttctgtgcatttgaggaagtgggttctggaggatggcaaaatcgcactggcacgtgaagtgcaaacagctccaggcaggaccgactggtctggcagcgggcggccaggcgagggtccccaagagtcagcctggatgtcactgctggacactggtggcaccgtgtctggcttggggtgaagttttttcacccaccttgaacaggagtgcagggtaggcgctgtaacatrcagggaacatatgacaattgcctgttggcaccaggcayggtgactggtgcctgtggtcgcagctactcaagaggctaaggcaggaggatcacttgagcccaggagctggaggctgcagtgagctatgatcgccactgcactccagcctggacaacagagcaagtgagatcctatcactaaaaaaaaaaaaaaaawwtttttaattagctggcaaggtggcttatgtctgtaatcccagcgctttgggaagccaaggcaagaggattgcttgaggccaggaattcaagaccagcctggacaacatagtgagaccctgtctcttaaaacacagcacacacaatcaatacctgttgggccttcctggcttataggccatggtgtgccaacagctctcacctggataccagactgagcctcccactgcccagaggttcctcattctgctccttctggtccttctttttccaccccctaacatctggacatctgggctgtgatcgaaacattgatgactttcttcatcttattttccttttttttttcttttctttctttcttttttttctttttttttttttttttgagacagagtcttgttctatcgcccaggctggagtacaatggcttgatcttggctcactgccacctccgcctcccagattcaagtgattctactgtctcagcctcctgagtagctgggattacagacacgcaccaccacacccgggtaatttttgtatttttagtagagatggggttttgccatgttggccaggctgatctcraactcctgagctcaagtgattgcctcggcttcccaaagtgctgagattacaggcgtgagccaccgtgcccagcttttttttttttttttttttttttttttgagacakagtcttgytctgttgcccaggctggagtgcagtggtgtgatcttggctcactgcaacctccgcctcctgggttcaagcgattttccttcctcagcctcctgagtagctgggattacaggcatgagccatgagccaccacgccctgctaatttttgtatctaatattttgtatttagtagagacgggggtttcaccatgttggccaggctggtctcgaactcctgacctcaggtgatccaccactttggcctcccaaagtgctgggatgacagctgtgagccactgcacccagcccttcaccttattttctaaacctgcmtactctcctataccccagcagccagcctctgtctaggccaccaaactcttccacctagatgttacccaatctccccccacccagcctcctgagtagctgggactacaggtgtacaccaccacactcagctaattttgtttcatttttttatttagcagagacagggtctcccttagttgccctgccctgactgaaatgtccctaatcccttagtgaccacagggatttttttttttttttttaatgacagtctctctctgttgcccaggctggagtggtgtgattatagctcactgcagcctcaaactcctggggtcaggcaatcctcccacctcaacctcccscatagctaggactacaagtatgcatcatcacgccggctaacttttgtattttgggtagagatggggtttcaccatgttgcccaggctggtctcaaactcctaagctcaagcgatcctcctacctcagcctcccagagtgctgggattataggcctgagccaccttgcccagcccacaggggacttcttaaaggcataaatcaatctgatccctcccctgctcatagaccctccatggctcctcattgcttctcacaggaaacataagacattctttctggcgtgcccattctattcttgtaccctagcagggtcccataactccaccatcacctcctttctctcgccctgtcccaaccacgtcagcctcctcgctctgccaccagcaccctaaatttgtatccatctcagggcctttgcacatgctccactctgtctggaatgcccttccccacagtctgctcaagtgaattcccatcatccttcaggacctccctgatcctaggttgctcaggtcccctgtggacctgcctcagtaacaattagtatggctgtcactaattgttagtatcatttacaatttttttttttgagacagcatcttgctctgttgcccaggctggagtgcagtggtgtgatcatagctcactgcagccttgaactcctgggctcaggtggtcctcccacctcagcctcccaagtaamtgagacctcaagcacatgctaccacagcctgctaattttttgttttgttttgttttgagacagagtctttctctgtcatccaggctggagtgcaatggtgtgatcatagctcactgcagcctccacctcctgggttcaagtgattttcctgcctcagcctcccgagtagttgggactacaggcacccatcaccatgcctggctaatttttgtattttcttttttttttttttgtagagagtgggtttccccatgttggccaggctgctgttgaactcctgacctcaagtaatccacctgccttggcttcctaaagtgttgggattatgggtgtgagccactgcgcccagcctaatttttgtgttttttgtagagacggggtttcaccatgctgcccaagctgttctacttattgttatattgagggcagggctggcttggtcacagctgtatccccagcatctagcatacagtaggtgctcagttaacactctagggctgatgagcactgtgacagttaacaggattggactcatgcacgttcacggatattcacctgtctgtgccccaggtggccgagagttggccaggttctctttgagggatgtttggtgccatccatgacgcagtcccttgtgacagattctgggaggccctgaggtgttggaagggagtctcccagtgaccccgagttgagggacgtatgagatgggcatactgcacccatcaaagttctgggttccggctggggacggtggctcatgcctgtaatcccagcactttggaaggctaaggtgggcagatcatgaggtcaggagatcgagaccatcctggccaacacggtgaaaccttgtctctcctaaaaatacaaaaattaactgggcgtggtggcgcgtgcctgtagtcccagctactctgaaagatgaggcaggaggatcgctcgtatgcaggaggcggaggttgaagtgagccgagattgtgccactgtattccagcctgggcaactccatctcaagaaaaaaaaaaaaaaaaaaaagtcctgggttctgatactgctccatgctgtaagtgggaatagctggggaatcaaggtagccaggatggtggactcatggtcactgaggcggtcaccacacagctaatatgcatcaagcccttttgcagtcagggagcagtggccccagtgtgtgtgtgtgtgtgtgtgtgtgtgtgtgtgtattggagcaggaacctcagcacccccatgtcctaataaggaaactaagacttcacacagaaaggcagggcacagtgactcatgcctgtcatcccagccctttgggaggccgaggcaggtggatcacttgaggtcaggagttcaagaccagcctggccaacatggtaaaaccccgtctctactaaaaatacaaaaaaattagccaggcatggtggctcacacctgtaatcccagctactcaggaggctgaggcaggaggatcgcttgaacccatgaggtggaggctgcagtaagcggaaattacaccactgcactccagcctgggcaacagaacragagagagagagagagagagacgctgtctcaaaaaaaaaaaacaaaattaaaaaatttaaaaaattaatccccagcagggagggccagggcacctgtcagagccaacaggggttggagtgctttgaaatgggtcttgcaaggggtggaggagttaagtggggggtgaatttcaatattttgccaacctgagcaactgtacaggtgcaaccagatgttgggggccacaggaaaagcgctttgctcatggcgagtgttcagtgagttttgttttccacaggagccgcccaggaggctcctcaggccgaccccagaccctggctggccaggatgaagtatctccggcaccggcggcccaatgccaccctcattctggccatcggcgctttcaccctcctcctcttcagtctgctagtgtcaccacccacctgcaaggtccaggagcagccaccggcgatccccgaggccctggcctggcccactccacccacccgcccagccccggccccgtgccatgccaacacctctatggtcacccacccggacttcgccacgcagccgcagcacgttcagaacttcctcctgtacagacactgccgccactttcccctgctgcaggacgtgcccccctctaagtgcgcgcagccggtcttcctgctgctggtgatcaagtcctcccctagcaactatgtgcgccgcgagctgctgcggcgcacgtggggccgcgagcgcaaggtwcggggtttgcagctgcgcctcctcttcctggtgggcacagcctccaacccgcacgaggcccgcaaggtcaaccggctgctggagctggaggcacagactcacggagacatcctgcagtgggacttccacgactccttcttcaacctcacgctcaagcaggtgcgctggactggggtcacctgatcggggccacctgtccttcttgtccaaattaccacccactcctgagggacccaggggaccagaagtcctcgtcagtccatcacagcccattctgcccctctgctgtcctcaccagcctcgtggagacccaaaatggtcttcttctaggagaggctagggggaagggcagaggagctaggttactagcacagagctcaagcctgatgatgcggattcgaatccaagctctgcctcttacttggtgttcgaccttggaggagttcattcacctctctgtgcctcacttttctcacctggaaaatgggatgtgaatgagtcccacccacctctaagggctactgtgaggtttacaggagatggagtttataaggcacccagaccagtgctggatgtccaactcaacttggcaatgacgggggacacatctccttgtttatttttatgtttatttatttttttttaatggagtcttgctctgttgcccagcctggagtgcagtggtgcgatctgggcttgctgcaaccacctcctggtttccggcgatcctactgcctcagcctcccaagtagctgggattacaggcactcaccatgcccagctaatttttgtattttgagtagagacggggtttcaccctgttggccagggtaatctcgaactcctgacctcaggtgatcttcccgcctcggcctcccaaagtgctgggattacaggcgtgagccactgcgcccggccaacatctccttgtttatttgttccggttctgtctccccatgaggctgggggccttgtctgtttcactcactgctgtgtccctaatgcctagaatagattcaggtgcacagcatgtgctcagtcaagacctttttgatggacaagaacccatgagaggtagctaggcttggtggctcatgcctgtaatcccagcactttgggaagctgaggagggaggatcgcttgagcccaagagtttgaggccagcctgagccacatagcgagacctcatctttttcaaaaaaaatttaattaattaatttttatgtttttttaattaattttttttttttggatggagtctggctctgtcccccaggctggagtgcagtggtgcaatctcggctcactgcaacctccacctcccaggttcaagtgattctcctgcctcagcctcctgagtagctgggaatacaggtgcatgccactatgcccagctaatttttttgtacttttagcagagatggggtttcaccatgttggccaggctggtctcaaactcctgacctcaagtgatcctcctgccttggcctcccaaagtgctgggattacaggtatgagccaccacgcacagcctcgtctctatttttttaaaaaaagaagccatgagaggtgagaaaatcctgcccatctgcagatgaggaaatggaggggctctaagaacccctcctaggtcctcgagtagagcaagacaagtagagacaacattttcaaggaggaacagggaactctgcaggttcctgctcataggaggtacagacaggcctgggttcaagtcctctggtagctgtttctctgcgggtgacctcactgcagttttctctggagagcctctgttccctcatctgtaaataagatagaggaccacttctgcctcctaagggtgcattcaggattcaaggtagggtaagcaccaagcacagcrcccggcaacaaacagatacccagcctgtgtaggttactgtaggggaaactgaggctgaggcgggtaggggccatggcctcttaacatgctgtgttctgaaaacacaaamgtggctaggcacagtggctcatgcctataatcccagcactttgggaggctgaggtgggcggatcacttgagaccaggagttcgagaccagcttcttgggaggctaaggcagcaggatcgcttgaaccctggaggcggaggttggagtgagttaagattgtgccactgcactccagcctgggtgacagagtgagactctgtctcaaaaacaaaaacaaaaaaccctttaaaagtgtgtgataaacatcagcttgacaaatatgaacccagcacccgtgaagcactggcactatgctgggtgctgagggagatggcatgaacagaaaagagagacacaggcccaaggagggaagtccagtgtttggtgggagagggggatgttaacaatcacacaggtcaggcacggtggctcacacctgtaatcccagcactttgggaggctgaggcaggtggatcacctgaggtcaggagttcaagaccagcctgaccaacatggtgaaaccctgtctctactaaatacaaaaaattagccaggtgtggtggtgcatgcctgtaatcccagctacttgggaggctgaggcagaagaattgcttgaacctgaaaggcggaggttgcagtgagccgagattgcaccactccactccagcctgggcaacaaaagcgaaaactccatctccaaaaaaawaataataataataataaaataaaaatcacacaaaggccaggagtggtggctcatgcttgtaatgtcagcattttgggaggctgaggtgggaggatcctttgaggtctggagtctgagaccagcctgcgtagcatagcaagatcccatctcttaaaaaaaaaaaaattattagccaggagtaagtagyggcatgtgtctgtagtaccagctacttgggaggctgaggtggaaggatcacctgakcccgggaatttgaggctgcaatgaactatgatcatagcgctacactctagcctgggcaatagagcaagaccctgtctcagaaacaaacaaaattcatacaaatgattatttaacaacagggcttggccaggcagagttggaaggaatagcaatacatgtaaatgtaacaattttccagcatttcttggtgcttcatggagcatggtctccatggattccccaacactcctagaggcacatgataaggcctgtttggagagttgaaaccaaggcacagagagggtttcccaagtaaccccacagggcagggccttaacccaggctggattgtggacacttcctttcctgggcttagtgggctggagtggctaatagagacccaaggccaatttctccagccctcaagcaagcatgccctgtccaccctgcctgcaggtcctgttcttacagtggcaggagacaaggtgcgccaacgccagcttcgtgctcaacggggatgatgacgtctttgcacacacagacaacatggtcttctacctgcaggaccatgaccctggccgccacctcttcgtggggcaactgatccaaaacgtgggccccatccgggctttttggagcaagtactatgtgccagaggtggtgactcagaatgagcggtacccaccctattgtgggggtggtggcttcttgctgtcccgcttcacggccgctgccctgcgccgtgctgcccatgtcttggacatcttccccattgatgatgtcttcctgggtatgtgtctggagcttgagggactgaagcctgcctcccacagcggcatccgcacgtctggcgtgcgggctccatcgcaacrcctgtcctcctttgacccctgcttctaccgagacctgctgctggtgcaccgcttcctaccttatgagatgctgctcatgtgggatgcgctgaaccagcccaacctcacctgcggcaatcagacacagatctactgagtcagcatcagggtccccagcctctgggctcctgtttccataggaaggggcgacaccttcctcccaggaagctgagacctttgtggtctgagcataagggagtgccagggaaggtttgaggtttgatgagtgaatattctggctggcgaactcctacacatccttcaaaacccacctggtactgttccagcatcttccctggatggctggaggaactccagaaaatatscatcttctttttgtggctgctaatggcagaagtgcctgtgctagagttccaactgtggatgcatccgtcccgtttgagtcaaagtcttacttccctgctctcacctactcacagacgggatgctaagcagtgcacctgcagtggtttaatggcagataagctccgtctgcagttccaggccagccagaaactcctgtgtccacatagagctgacgtgagaaatatctttcagcccaggagagaggggtcctgatcttaaccctttcctgggtctcagacaactcagaaggttggggggataccagagaggtggtggaataggaccgccccctccttacttgtgggatcaaatgctgtaatggtggaggtgtgggcagaggagggaggcaagtgtcctttgaaagttgtgagagctcagagtttctggggtcctcattaggagcccccatccctgtgttccccaagaattcagagaacagcactggggctggaatgatctttaatgggcccaaggccaacaggcatatgcctcactactgcctggagaagggagagattcaggtcctccagcagcctccctcacccagtatgttttacagattacggggggaccgggtgagccagtgaccccctgyagcccccagcttcaggcctcagtgtctgccagtcaagcttcacaggcattgtgatggggcagccttggggaatataaaattttgtgaagacttggagatctttttttttttttaagcaaatttacaagtttcaacagacaagtccacattcatccctaaaagtctcattttccagtagaaaatatacactggtaaaaacggggcatggggccgtggctcagggctgtaattctagcacattgggagaccaaagtgggaggatcacttgagcccaggagttctggatcctgtctctgcacaaaataaaaaattactcaggcgtggtggtgctcacatgcctgtagtcccagctatacttgggaggctgaggcgagaggatcgcttgagcccaggagttggaggctgcagtgaaccatgattgcgccactgtactccactgggcggcaataagaagacaaaaacataaaacaggacatgtgtgaggcaaaagctgcaggaatttctatcaggcagatctgacctcatcccacccaccccctgctcagatacccttcatagctccttattgctttcagctcataaccccacatatccccacagacagattcttttttttttttttaagacggattctcattctgttgcccaggctggagtgtagtggcgtgatctcggctcattgcaacctccgcctcccagattcaaacaattctcctgcctcagcctcccaagtagctgggattacaggttacaggcatgtgccaccatgtccagctaatttttgtatttttgatagagacggcatttcaccatgttgcccaggatggtctcaaactcctgacctcaagtgatccacccgccggcctcccaaagatgctgggattacaggcgtgagccacagtgcctggccagccaaagatagattcttgcttccaggttgtcagcagacttaggagcgggaggtacagggtgagatgctcttagctggattggatgctgggcccaccttggccttctgcttcagcaaggccccctctgaataccatcccagccaccagcagcctccctctccttaccaggcttgccttccctggttggaacctcagatctactgctctctgtagctcatcctttcctcccctcctcaagtgcttattatgcacctgccatgtgctacacgccttgccctgtactcctcctccctcctgtgggaagggtcagctgatacagacccaccttatggtgaggaaacaaacctgaaaatgatcaaatgggaagttcccgggagcaataagagctttgagcagaatttttttttaaattttattttattttatttatttttgagacagagtctcgctctgttgcccaggctggagtgtggtggcacgatctcatctcactgcaacctccgcctcctgagttcaagtgattctcatgcctcagcctcccaagttgctgggattacaggcatgcgccaccacgcctggctaatttttgtatttgtagtacagacagggtttcaccatgttgtccaggctgatctcgaactcctggcctcaagggatccacctgcctcagcctcccaaagtgttgggattagaggcataagccactgcaccagcctgagcagaatttaaatgggataacagggccaaacacagtgactcatgcctataattccagggctttgggaggcagaggtgggaggatcacctgagcccaggagttcgagaccagcctgggcaacatagcgagaccctgtctctacagaaaaaaaaattagcccagtgtggtagtgcccacttatggtcccagctactcggaaagctgaggtgggaggatcatttgagcctgggaggttgaggttgcagtgagccaggaccatgccactgcactccagcctgggtgagagggagaccttgtttcaaaaataaaatgaggctgggcatggtggctcacgattgtaatcccagcagtttgggaagccgaggtgggcggatcacctgaagtcaggagaccaagaccagcctagacaaggcgaaaccccgtctccactaaaaatacaaaaattagcagagtgtggtggcatatgcctgtaatcccagctacctgaaaggctgaggcaggagaatcacttgaacctgggagacggaggttgcagtgagctgagactgagccactgcactccagcctgggcgacagagtgagaatctatctcaaaaaaaagaaaaaaaaaataggccagccgtggtggctcacacctgtaatcccagcactttgggaggccgaggtgggtggatcacaaggtcagaagattgagaccattctggccaacatggtgaaaccccatctctactaaaaatatgaaaattagccaggcgtggtggtgtgcacttgtagtcccagctactcaggaggctgagggcaaaagaatcgcttgaacccgggaggcggaggttgcagtgagccgagatcatgccactgcactccagcctgggcgacagagtgagactcagtctcaaaaaaaaaaaaaaaaaaaaaggtggttaaaaatggctgctctggggactggagggagctgggaggatgagacaccatcctgcaaatcaggcctggatgagatggggctgcagggctttctgacaggcacatctgacctcattctgcccctgctcacacagcctctgtggctccctattgccatcaggggagagtcccagctcccctgctccactggattgagtagtgtctggcaagaattcatgtctgagaattcatattcatattctgagaattcatattctgagaattcacctcagaatatgggcttatttggaaatagggtctttatagacagacatgaggttatcatggattagggtggaccctaaatccgatgactgggccaggcacgtggctcatgcctgtaatctcaacactttgggaggccgaggtgggcggatcacctgagttcaggagttcaagaccagcctggccaacatggtgaaaccccgtctctactaaaaatgcaaaaattagctgggtgtggtggcgggtgcctgtaatcccagctacttaggaggctgaagtgggaggatcacttcagcccaggagttggaggctgcagtaagctatgattgtgccactgcactccagcctgggtgacagagtgagaccctgcctcaaaaaaaaaaaaaaaaaaaaagactaatgtgttttgtgatgatcattttctgacatttgttttgtgtctaatgtctaccattctaagtcctcaatgctaaggactcccatgggccttggtagagacctcggttcaagtcctgcacttacccttccctgtctgaccttggcaagcagccctctccctgggcctcagtttccccactttgcgttgcaatgcctctctagttatcaagctcctggaagtgccggtgggtccatggctgctgggggacaagcccacacagggactgactgaggcttgtccctttttctagagaaaatgcaggaagctgctttgggtcgtttatttactaagagacagcaagaaggggtgttacacatgcagggagcggagcgtctggggctcccctggagtgaggacatttggctgtcagtgtccagcatctgtgaaagcggggatcctccaagccagggctagggtgtgatttattctgcagttgactccacaggctgcaggtggcattggtctggggtagatagtgagcacccatcccaggaggtaatcaaaggcctgtagatgcgagactttatggtgctgtgtggcctcaggagctcaccagaccagaccctctgggcctcaggccactctgaggctgcacccaaggaggaatcagtagggacagagggtcagcaggtcttgttgggtacagccactgaggcagcagtagcgtgcagggttggtggcagctgcacggtggtggcggtgatggtgagaggtctggggcaggggctgcaggccaggtcccagcgtgagattactgtcggccaccagcccatggagcagatgtcgtctctccagccactgtagcaactcacctggggacagagtgaaactcagctggaacggaaacgacagaggacatgctaccccatgctgcatgtgcacgaatccacacacatcccactgagtaacccaccaaacactcatgcatgcagataaaaagtgagcactggccgggtgcagtggcttacacctgtaatcccagcactttgggaggccgaggtgggcggatcacgaggtcaggagtttgagaccatcctggctaacacagtgaaaccccttctctactaaaaaaaaaaacaaccaaaaaattagccgggtgtggtggcgggcgcctgtagtcccagctactcaggaggctgaggcaggagaatgacgtgaacccaggaggcagagcttgcagtgagccgagatcacgccactgcactccagcctgggtgacagagtgagactctgtctcaaaaaaaaaaaaaaaaaagtgagcactggcccggctcagtggctcacgcctgtaatcccagcactttgggaggccgaggtgggtggatcacttgaggtcaggagtttgagatcagcctggccaacatggtaaaaacctgtctctactaaaaaatacaaaaattagtcaggcgtggtggtggacgcctgtaatcccagctactggggaggctggggtgggagaatcacttgaacccaggaggtggaggttgcagggagctgggatcatgccattgcactccagcctaggtgacaagaatgaaactccatctcaaaaaaaaaaaaaaaaaaaaaaaagcgagcacttattaagcacctactgtacgccaggcacctggttaatcctctcatccactcaactcatgtccacactcacatccccagctgcgtgggtccccatatgccacctgagtgccccatgccctgcccagggagtgtcgggggtcttggagctacagatggtgtcagtttccccaacaggtccaagggtccgtgagacacccagagcaggtcagagacccacccacagactcctcgtggtacagagacatgcaggggtgtacatgtgtctgtgggtccacttcctggtcacccacgcatgtgtggtggacccacagacacacacacacccctacgaggacacacccttgcagaccgcctcccctggatccctaacaccgcaagtggagtggcacacagagacatgtggacacgtgttaacacatctgcacaaacttgtcgtatatccctgcaccagggccaggactagggtacagacagggaggcacgaagccatcaggatatttttttgaggccaggcaccgtggctcacacctgtcatcccagcattttgggaagcctaggtgggtgcgttgcttgagcccaggagttcatgaccagccttggcaatacagcaaaacctcatctctgcagaaaatacaaaaattagctgggcataattctgcatgcctgtagtcccagctacttgggaggctgaggtgggaggatcgcttgagcctgggaaggcaaggctgcagtgacccgagatcgtgccactgcactccagcctgagtgacagagcaagactgtctcaaaagaaaaaaaaaaggacttatgaaaatttagagggttgtttaccctctacccaatctgcagtttacaattgacaccagtggttctcaaaccagggtgattttgtttccaggggatacttgtctggggacagttttagatgtcacaacttggatggggtgtgaggctattcatggcattagggggcagaagacagagatgttatctaacaccctacaatatacaggacagccccactaccatatacatccccaaatgtcagcatcagctttttttttttgagatggagtctcgctctgttgccaagctggagtgcagtggcgtgatcttggctcactgcaacctccacctcccgggttcaagtgattctcctgcctcagcctcctgagtagctgagactacaggtgtgcgccacaacgcccggctaatttttgtatttttagtagagacgaggtttcgccacgttggccaggctggtctcaccagcctgagagtagctagtcacagctactcaggaggctgaggtgggcagattgcttgagtctgggaggcagaggttgcaatgagccgagatcacgccactgcactccagcctgggtgatagagtgagaccctgtctcaaaatatatatatataataataataatattaatatttttcccttttttgagacaagggtctctgtctcaggctgagtctcatattgcccaggttggtctcaaactcctggcctcaagtgatcttccctcctagcctcctgagtagcagggattacaggcatgagccaccacatccagcaaggtaagtattttaatgcaatacttttaaaataaaatttaaaatatttgtaaaaaggccaggcacagcggctcacgcttgtaatcccaacactttgggaggctgaggcgggcagatcacctgaggtcaggagttcaagaccagcctggcccgggcacagtggctcatgcctg

SEQ ID NO: 93851 - DNA, 21667 bp, Homo sapiens
atgtccccatttagccatctccatggagctcctgctggagggccctgaaccctgcactgcgtggctgcccagccagctgcctcctgtcctgggaggaggcctcctgggtgtcctcatctggtgtgtctactggagggtcccacaggagaggcagcagaggggtcaggggaggtctcctgccgggggttggcctctcaagcctcaggggttctagcctgttgaatataccccacctggtggtggcccctccgatgtccccactgatggctctgacaccgtgttggtggcgatgtcccagacaatcccaccaggacggcccagacatccctactggcttcgctggtggctcatctcgaacatccacgccagcctttctggggccggccacccaggccgcctgtccgtctgtcctccctccagcagcaccccctggcccctggagtggtggggccatggcaagagacaccgtggcgtctcatgtgaactttcctgggcactgtggttttatttcctaattgatttaagaaataaacctgaagaccgtctggtgcctgctgggagcccattcattgagtgtccctatgtggcacagaacccttgctgagtttcagaaggcaggactcggccagccgggcatagtggctcatgcctgtaatcccagcactttgggaggctgaggtgggtgaatcacttgagcccaggagttcgagaccagcctggccaacatggtgaaaccctgtctctactaaaaatacaaacaaaataattagctgggcatggtggctcacacctttaattccagctactcgggaggctcaggcaggagaattgctggaacctaggaggcagaggttgcagtgcactccagcctgggtggcagagcgagactctggttcaaaatagaaagaaagagagaaagggggagggagggagggaaagagcgagagaggagaggagagggagggagggagggaatacaaaaaagtagccaggcatggtggtgcgcgcacctgtaatcccagctaccccagaggctggggcaggagaattgcttgcgccgggaggtggaggttgcagtgagccgagatggtgccactgcactccatcctgggtgacagagcgagactttgtctcaaaaaaaaaaaaaaaagaaaagaaaaagaagggaccctgtaccatgtggccccatctgcaagaccaaagggaccttggggcaggggcactcgggttggccctctcgctggcctgccgagggggaggcacctccctgcagtgtctgggcctcacaggccctcgttgaccttgtggttgcaggggagggatggccagcctgcctgtgggttcctgcaggtgttgcaggatggctcagatcacggtatgtcctggcacctgtggctgccctggcagtgtcctcttccatgtacaggccggctggtgtgagagctctgggtgaaagtcgctaggcctgctggggtggccgtctgagctgggattcgaacccaggactccaagctcaggagtctatacagtattcctcccaatcgctgggggatatgttccaagaccccaaatggatgcctgaaactgaccataatactgagccctaaatatgttttgtttcttttctttcttcctttctttcctttccttctttttctttcccttcctccctccctccctcccttcctttccttcatcctttcctccctttctaattttaatttaatttaattatttatttatttttgagatggagtcctgctgtctcccaggctggagtgcagtggcacgatctcggctcactgcaagctctgcctcccaggttcacgccattttcctgcctcagcctcccgagtagctgggactacaggtgcctgccaccacgcccggctaatttttttgtatttttagtagagatggggtttcaccgtgttagccaggatggtctcaatctcctgacctcatgatccgccctcctcggcctcccaaagtgctgggattacaggcgtgagccaccgcacgtggcctaatttatttatttttaagacaaagtcttattctgttgcccaggccagagtacagtggcatgatcatagctcactgcagccttgacctcccacacacaagcaatcctccatcagcctcctgcgtggctgagactacagatatgcaccatcacgcccagctaattttttgatttgtttgcagagatgaggtcccactgtattgcccaggctggtcttgamctcctgggctgaagccatcctcctgccttggcctcccaaagtgctgggattacaggtgtgagtcaccgtgcccagtttatactggtttttcaatctcataaccaggaggctactaagtgacaaatgagtgggcatggggggagtggtgtctccagcatggatctgctggacaaaggggtgattcatgaccctgggcgggacagagagggatggagcaaggcagtccgagatttcatcatgctcctcagaacagcacgcaatttgaaacttatgaattgcttatttctggaattctccatttaatatgtttgaactgtggaaacctcagaaagagaaactttgaataagcagggactactgtactctcaactgactctcacctctgctgtccccctcgcgtgtcataatgttggcatcttgtttgttgtctctacctcaggggacaggaggtgacagagcatttgctgggagaggacactgagggggtgaccctcgtgtgcagatgagcaagtgaatttttttgttttgttttttgctttttggtttttttgagacggagtcttgctctgtcgcccaggctggagtgcagtggcacaatctgactcactgcagcctccgcctcctgggttcaagcaattctcctgcctcagcctcctcagtagctgggattgcaggcacgtgccaccacacacagctcatttttgtatttttagtagagacagggtttcaccatgttggccaggctggtctcaaactcccgacctcaggtgatccacccaccttggcctctcaaagtgctggaattacaggcgtgagccatggcacccagctgggcaagtgaattctgactaatctctctccaacctcgcaaccacttcaggaagtgtcaccatggtccccattgtacagatgcagaaactgaggcacaagaaggggaatggactcattgccaggggctccaggtgagacagtggcccagtgaactttcttgttccaaagcctctagctgcaatagtgtctaggaagttccctccaagttggccagaaaataatcccaatgactcttaggcttgaactctgttagttttttttattaattaacagactttttgggttttatttatttatttatttatttatttatttatttattgttttgagacagagtctagctctgttgcccaggctggagtgcagtggcgagatcacggctcactgcaagctccttctcccaggttcacaccattctcctgcctcagcgtcccaagtagctgggaccacaggcgcctgcaaccacacctggctaatttgtatttttactagagacagggtttcatcgtgttagccaggatggtcgtgatctcctgacctcgtgatccacccgcctcggcctctcaaagtgctgggattacaggcgtgaggcaccgcgcccggcctatttatttatttaagagggagtcttgctctgtcgcccaggctggagtgcggtggcgcgatcttggctcactgcaacctctgcctcccgggttcaagccattctcctgcctcagactcccgaatagctgggattacaggcatgagctactacgcctggctaatttttgtatttttagtagagatggggtttctacttcatttgagaggccggtctcgaactcctcacctcaggtgatctgcctaccttggcctgccaaagtgttgggattacaggcgtgaagcaccacgcctggcctattcctttttttttttttttttttttgagacagagttttgctcgttgcccaggctggagtgcaatggcgtgatctcagctcaccacaacctccacctccggggttcaagccattctcctgcctccgactcccgagtagctgagattacaggcatgtgccaccacgcccagctaaggctttgtatttttagtagagacagggtttctccatgttggtcaggctgatcttaaactcccgacctcaggtgatccacctgccttggcctctcaaagtgctggaattacaggcgtgagccaccacgcccagccctcctttctttttgaatagtcctggcaccgttgccaaagatgagttgaccatatatgcataggtttatttctgcatcagttccaatcatttatttatatgtctatccttatgccaataccacagttttggttattgtacctttttattgtttgaaatgagaaagtatgagtcctcgtattttattcaatattgttttggctattttggggccatttgcaatttattattaattttaggatcaatttgtcaatttcaacaaaaacattgtaaatttgaaagggattacattgcatccgtagaccaatttgtggagtactgccatcttaacaatattatactttccaatccatgaacgtggaatgtcttaccatttatttagatcatctttaattttttttttcaccaaagttttagttcttttgcttgtttcgagacagggtctcactctattgcccaggctggagtggaatggcaggaacacagctcactgcagccttagtctcctgggctcaagtgatcctcccaccacagcctcccaagtagctgggaccacaggcagctgccaccgggtccagccttggcttcccaacgtgctgggattacagctgtgagccaccaagcccagctacagctctcaagaagtacagtcttgtacttcttttattaaatttatgcctactttatactttatgatgctatggtaaatggaattgttttcttaatttgctactgattttaaaatccactacctgtgtgagttgaactgcgcttacacacatcactgaaatatcccactctcagaagtggcccagcctccccaggcccaccaggccttcttccccttccagccctctgtccaggcaagaactcgattggaggcctttctgggcactcagagggacacaccaccacactaggagggttagcttaaaaaattcaacaagcatggccaggcgcagtggctttcgcctgaatgctaccactttgggaggccgaggcaggaagatcgcttgagcccaggggttcaagatcagcctagaccatatagcaagagcccgtccgtccggaaaatgtaaaaaaaaaaaaaaaaaaaattcaacaagcatattttcatcccctacttttttttgagatggagcctcgctctgtcgcccaagctggggtgcagtggcacgatctcggctcactgcaacctccgccaccccggttcaagcgattctcctgcctcagcctcccgagtagctgggactacaggcgcccgccactacgcccggttaattttttgtgttttcagtagagacggggtttcaccgtgttagccaggatggtctcgatctcctgacctcgtgatccgcccgcctcggcctcccaaagtgttgggattacaggcgtcagccaccgcgcccggcggtgcaggaattttaaaactcaccaaaatacgccctccttcagaaaatccctgccacctcgataggacgtcctcttcttgagctcccctctccggccctccctgatacagcaaggttgagcattcgggcactggcttcccgaactcacttcgactcaggcacagcaggcaaagattcaatgggtagggccggaccgactgcccgaccttcgcggtgcttcacttgcctcactgcgcatgtgccaaagacaatcacccaaagtactcgaaaccaagcggcagggccggcccttgcgcaggcgtactagcgacggccgtagggagcgcttcctcctccccgccgccgccctcgccatggccgcgccggccccgggcctcatctcggtgttctcgagttcccaggagctgggtgcggcgctagcgcagctggtggcccagcgcgcagcatgctgcctggcaggggcccgcgcccgtttcgcgctcggcctgtcgggcgggagcctcgtctcgatgctagcccgcgagctacccgccgccgtcgcccctgccgggccagctagcttagcgcgctggacgctgggcttctgcgacgagcgcctcgtgcccttcgatcacgccgagagcacgtacggcctctaccgggtgagagctacgggggccgccggggatcacgccgagagggccacagccaccgcctacaccccggctacggaggccgccgggggccatgccgaaagggccgcgcccactgtctgcacctcggctacgggggccactgggtatcatgccaagagggccgtgcccactgcctgcacctcggctacgtgggtcgctgggggtcatgccaagagggccgcgcccaccggttgccctcggctacgggggccactgggggtcatgccgagatggtcacgcccactgcctgcacctcgactacgggggccgctgggggtctagccgacagggctcgcccgcctcctgaaccccgcctacagtgggtcccgcaggacctcactgcgccctctgcctttatctaggcagggctagaaatggtctacttgcagtccgtcttcctgcttcatccggtggccaggcagagggaacggcacgggcaagggcctggaagggaatccgagtggcccatgtcaaacgatgcccataactcagccccgtagcggacgggggcacgaggaatcaggtgtagagcctgartctcagggtcctgatctctaaccccagcgagttctcggggatccctgggcagctttgccgctctgatggctctgcttccaggctgttcatctttggctttgagcctcaggattctatagaatcagaggagcgcgctcttttaaagacagggtaactgaggcttggaggagccttggcctggccgagggaagagtgggaggggcgggctcaaaggccaggaacctcaagtcacttgagtctggcagcgtcaagggacaccccatgctgggtgtgccgtcttctctttgcatagaatcttgagctgatgatggttttgtgggttttttattaagagaaaaggcttactgaacgctttatatgcatcaattcatgagtccgtaccacagcctatgagatgttacactcatttcacagatggagaaactgaggccagaagaggtgagcttacctgcccaaggcatctagtgaccagaggggcagccagggtgtgatcctgcctcatctgacttcgtagttgggtacacatttaacttccgccttcctgtgtgtgttttccaagagcatcattaaaaagttttggccgggtgcggtggctcacgcgtgtaatcccagcactttgggaggccgacgtgagtagatcacctgaggtcaggatttcgagaccagcctggccaacatggcaaaactctgtctctactaaaaaaaaatacaaaaattggctgggtgcggtggctcacgcttgtaatcccagcactttgggaggctgaggcgggcggatcacgaggtcaggagtttgagaccaacctgaccaacatggtgaaacctgtctctactaaaaatgcaaaaattagccaggtgtggtggtgcgcacctgtaatcccagctactcgggaggctgaggcaggagtgaggcatgatcagtgaaccgagatcatgccattacactccaccctgggcgacagagtgagactgtcttaaagataaaaaaaaaaaaaagcaggtttttggccgggcgtggtggctcatacctgtaatctcagcactttgggaggccaaggatggtggatcacctgaggtcaggtgttggagaccagcctagccaacatggcragaccccatctctactaaaaatacaaaaattagctgggtgtggtggcgtgtgcctgtaatcccggctacaggggaggctgaagcacgagaatcgcttgaatgtgggaggcagaggttgcagtgagctgagatcatgccactgcactccagcctgggcgacagttgagactctgtctcaaaataaataattgtgaaatgctgcagagtgctagggaatagggagtgagcattcgtcaagggctatggggtgggaggtcctgagaaggtgccatttgagctgagagctggagcatgtgcaggagctggccatggtcaagctgtggcaagagggctcagctaaggccaaagccgtgtgatgggagcaaacctgaagccaggacttgctccttctgccggttctctgtgaggggaatcatatcggttccctagggctacataacgaatgaccacaaactgagcggcttaaagccacaggaatttattctctcaccgttctggaggccagaagtctgaaatcaaggtgttggtggggtcacgccccatctgaaagctctttgggaggatccttcattttctcctcatcttctgggggctctgggcgttccttggcttggggtcacaccattccaattcctgtctctgtctgcacatggccttcttggattctgtgtgtcttctcatcttatataaggacgccagtcattggatttagggcccacactaatccactatgacttgttcttaactaattacatctgcaaagaccctatttcctyccttccttccctccttccctcccttccttcccttccttccttcctcccttcctatactttcttttcttttcctttccttttctttctttttttgagataggatcttgttgtgttgcccaggctggagtgcagaggcatgatcgtggcttactgcagccttcagctcccgggctctatcaatccccctgcctcagcctcctcagtagctgggactacaggtgtgcaccaccaggcccagctaatttttttttttgagttggagtttcrcccttgttgcccaggctggagtgcaatggcgcgatctcagctcaccacaacctccgcctcctgggttcaagtgattctcctgcctcagcctcccaagtagctgggattacaggcattcaccaccacgcccagctaattttatatttttagtagaggtgggatttctccatgttggtcaggctggtctcgaactcctgacctcaggtgatccgcctgccttggcctcccaaagtgctgggattacaggcatgagccaccgtgccaggccgctaattttttatttttggtaaatacgaagtttcactatgctgcccaggctggtctcaaactcctgggctcaaccgattgtcccacctcagcctcccaaagtgctgggattacagccgtgagccaccatgcctggccattttctgttgtttataagcctcgagtttatggtgttttgtgatagcaggctgcatagattaacacagggaccttggacaaagcagagtggtctttccaactatggatacgattgtgtccctccccagctcacacaccctccttggctccccaatgccctcagtgtggagctcatactcctcaggtcagcattcagggcagtcagcccctgcgtttacttcgtggctcaccttagcattgcctcagctcactgagctagactctgcacaaacacraggcaccgagacatggacgccatctcagagcagaccagggcccctggggsgcctctcagtgggatagggctgcagctttctccttgatccaagtgcttttgagttaaatctgctgccaacgactccaccattcacaggccagggcatctactgtgcgctagccacaggtgctgggcctgggcaarcctggcccccactccctgtagtggggcaggtgcaggcgggggtggctgctcggaggaggtggcctgagggatgtatatgagtttcccaggcagccttaggagggagggtggggatggagaaggttacccttctccatggagggtggtgaggggctgagttttatcccaagggccgtgggaccctggaggctttgaaacaggacaatgggctggctagacaggtgcaggctatggccaggaaaccccccaaatacaacggaattgaaagactcctgttggaatgctggcccccgcaggaaccaccatgatcccgattcacccaggagggccaccctcccgtccagccccccaagagcagcagggctccctcttgcccttgaacctcctctgccctgacaggcggcgtcacccagggctcaggatcctggcttccagcattccagaggtgactcaccaaccaaagtgtcactcaccaaccgaaggaccttgcacaaatgcaccagcctccccatgcctcagtctccccatctgtaaatgagtgttatgacggtactgtcataaactccctggaggatccaggtggtcacgttactgttggtgacattgtccctctgttggctgcagacgcatcttctctccagactgccgatcccagaaagccaggtgatcaccattaaccccgagctgcctgtggaggaggcggctgaggactacgccaagaagctgagacaggtgagccccgaggagcggccgcaagggagtcacatccacgaagcggccacaccccgggcaacagagcggccttctgattgtcaccagcaggaactgccccagggatcactggcagatccctttgaggaatcccctcttcgaggccacagccctgccctggggagcctgaaggccactcggcctctgttgcccaggtaacaggcctgggtcctcacatcttggggaaatatgatgggtatggctatggctttgatcacaggctacattgagcactgtttcctgcgttacagctacttgtatttctttttttttttttttctttgagacggagtctcactctgtcgcccaggctggagtgcagtggcgtgatcatggctcactgcaagctccgcctcccgggttcacaccattctcctgcctcagcctcctgagtagctgggactacgggtgcccgccaccacgcctggttaatttttttgtatttttttagtagagacgggryttcaccgtgttagccaggatggtctcgatctcctgacctcgtgatccgcccaccttggcctccaaagtgctgggattataggcgtgagccaccatgggccttttttttttttgagatggagtcttactstgtcactctgtcacctaggctggagtgcagtgatgcaatctcagctcactgcaacctctgcctcccgggctcaagtgattatcctacctcagcctcccaagtagctaggactacaggtgcctgccaccacgcctggctaatttttgtatttttagtagagacagggtttcatcatgttggccaggctggtcttgaactcctgacctcgtgatccacctacctcggcctcccaaagtgctgggatttcaggtgtgagccaccatgcccagccacagctacttgtatttttttatctgacaactgtttctgtgtcctctgagtctcccctgcccctgccacctacaacctctcaaggctgtcttctccccacgcccaggcattccaaggggactccatcccggttttcgacctgctgatcctgggggtgggccccgatggtcacacctgctcactcttcccagaccaccccctcctacaggtgagcacaccaatgcggggttccaccctagtcctgagcccagtccctaacatctgggacttccagagggagagccacctgccgggtggggtgtctagagccagggttcaagtcagcctccaccaacatacctgcctgctgggctcaatccttycaggtctcagttgagccccttaaaacagggaccttaaactacccaccatgggattgttagtaggatgggatggaacagtggctggaccaggcctggtgtgtgtaagtgtccaagaagctgaagtgacattgtccttctgcctccatccctgggcttcctccccaaggagcgggagaagattgtggctcccatcagtgactccccgaagccaccgccacagcgtgtgaccctcacrctacctgtcctgaatgcagcacgaactgtcatctttgtggcaactggagaaggcaaggcagctgttctgaaggtaacagctgagggttctagtcctgggaagttcatgggcatgtgggccccagggacagaaaatggccccagacattattgtgctgaagcatcagatctgaagaaaactcagtcattcttgggttgaaaggtaacttgaaattgcaattagaaaaaaaggaaaaaaaaaaaaaaaaccccagaaaattgcaattaaaggctagttaggtattaaccgctatgaaatgaaattgatgagatgaggccaaagctgcattcagaggtaaattaatagcattcaaatgcatttaaaaaaaattattaagtagcaaactattgaaataaatcaagtgctttcctgtagaattagaaaaaggacaataatataaatctacaaaagtcagtggcaggactaagtgaaattaaagtcagaaattaatgagttggttaatatattttaaactttaatggtaagtagatctaaaagatagaaaagctcctgacaaggctaatcaagagaaaaaaaaatsacgtggtattatgaataaaaaaaggtactgttatgtaaagtattttaggaaaatacaaattcattacagcattaaaaataaactaaataattaaaaaggttttagttgccttcattgaaaagaccaacaactacagaagaaactggaaatatatttttattttttttttgttttttgtgttattgttgttgagacagagtctccctctgtcgccaaggctggagtgcactgatgtgacctcagctcgctacaatctctacctcccaggttcaagcggttctcctgcctcagcctcttgactagctgggattataggcgcctgccaccaggcctggctaatttttgtatttttagtagagagggggtttcaccatgttggccaggctggtctcaaactgctgacctcatgtgatccacctgccttggcctcccaaagtgctgggattacagatatgagtcaccgtgcctagcctggtttttacttttctaagtggttggaaaaaagtcaaatgaagagccaggccatgcttatcatcccatctactcaggaggctaaggcaggaggattactcgagctcaggagttcgaagctatagtgaaatgtaattgcaactgtgaattaccactgcactggggaacatcacgagaactcatctccaaaaaaaataaatcaggcggggcgcggtggcttatgcctgtaatcccagcactttgggaggctgaggcaggcggatcacctgaggtcaggagttcaagaccagcctggccaacatggcgaaaccctgtctctactaaaaatacaaaaattagccaggcgtggtggcgtgcgcctgtagtcccagctactcaggagcctgaggcaggagaatcacttgaacccgggaggcggaggttgctgtgggccgagatcatgccattgcactccagcctgggcgacaagaacgaaactcagtctcaaaaaaaaaaaaaaatcaaatgaataatactccttgaccttgtgaagattctatgaagttcagattacagtgtccagaaattgttttgtttgtttgtttttttgagacagcttctcaccctgtcatccaagctggagtgcagtggcgccatctcagctcactgcaacctccacctcccgggttcaagtgcttctcctgcctcagcctcccaagtagctgggattacaggcacctgccaccacgcccagctaatttttgtatttttagtagagacagggtttcacaacattggccaggctggtctcaaactcccaacctcaagtgatccgcccccctcrgcctcccaaagtgctgggattacaggcatgaaccaccgcacccggcccagaaaagttttattggaacatagcaacacccgcttatgtatatattgtctgcagctgttctggggccagaactgcagagctgagtggttgcaatagagactggatggtctgcagagcttaatctattgactctggtcttttgctgaaaaagggtgccaaccrcagtattaaacagttacagaccaggcacagtggctcatgcctgcactttgggaggctgaggcaggaggattgcttgagtctaggagtttgagactagtcttggcaacatagcaagaccctgtctctacaaaaaataaaaaattagctgggcacagtgccatgtgcctgtggtcccagatacttggcagactgaggcaagaggatcacttgagcctcagagattgaggctgcagtgagccttgatgccgtcactgtactccagcctggatgacagcgcaagaccttgtctcaaaaaaaatgcaaatagttacagtgggcggggcatggtggctcaacgtgggagttcaagaccagcctggctaatatggtgaaaccccgtctctactaaaaatataaaaaattaggccaggcgcggtggctaacgcctgtaatcccagcactttgggagacctaggcgggtggatcacctgagttcaggagttctagaccagcctgaccaacatgatgaaaccgtctctaccaaaaacaaaaaaattagccaggtgtggtgggaggcgcctgtaatcccagctacttggggggccgaggcaggagaattgcttgaaaccgggaggcggaagttgcagtgagccaagatcgcaccatcacgccatcacactccagcctgggggataagatcgagagttcatctcaaaaaaaaaaaaaaaaaaaaaaaaacttagccgagcgtggtggcacttgcctgtaatcccagctactcaggaggctgaggcagaagaatcgcttgaaaccgggaggcggaggttgccgtgagccaagatcgtaccactgcactccagcctgggmgacagagtgagactccatctcaaaataaataaataaataaataaaaatagttacagtggatagaaaggaagggactcttgtccctgctgtttggcactaggacagctgagctgggcattgtcacattttgaggatacaagagtcttatttatccttggttggggagccaggagagtgccgaggggcggtgcctgggccgcaggcagggccttactcttctgccctcttcttcagcgcattttggaggaccaggaggaaaacccgctgcccgccgccctggtccagccccacaccgggaaactgtgctggttcttggacgaggcggccgcccgcctcctgaccgtgcccttcgagaagcattccactttgtagctggccagagggacgccgcagctgggaccaggcacgcggcccatggggctgggcccctgctggccgccactctccgggctctcctttcaaaaagccacgtcgtgctgctgctggaagccaacagcctccggccagcagccctacccggggctcaacacacaggctgtggctctggacatccggatattaaaaggagcgttgctggaagtctgcactgtctcgcggtgtttgatggcagcaggcctgggggcgccctggcctgggttctgatccatagccctcatctgtggggaggaaggcggggcctgcttccctggggcatagccaccatggatgaatttcctaagacaacaggctgggcacagtggctcacgcctgtcatcccagcacttcgggaggatgaggtgggcaaatcacttgaggtcaggagttcgagactagcctggccaacatagtgaaatctcttctctactaaaaatacaaaaattagctgggcrcggtggctcacacctgtaatcccagcactttgggaggccgaggctggtggatcacgaggtcgggagttcgagaccatcctggctaacacagtgaaaccccgtctctactaaaaatacaaaaaaaaattagctgggcataggtggtgcacgcctgtagtcccagctacttgggaggctgaggcaggagaatggcataaaacccaggaggcgaagcttgcagtgagctgagatcgcaccactgcactccaacctgggagatacagcgagactccatctcgaaaaaaaaaaaaaatacaaaaattagccgggcgtagtggtgtgcacctgtaatcccagctacttgggaggctgaggcacaacaattgcttgtaccagggaggcggagcttgcagtgagctgagatcgcgccactgcactccaccctgtgtgacagagcgagactcggtctcaagaaaaaaaaaagctgggcacggtggcttacgcctgtaatctcagcactttggaaggctgaggtgggcgggtcacccgaggtcaggagtttgaaaccagcctgatcaatatggcaaaaccctatctctactgaaaatacaaaaattagctgggtgtggtggcatgcgcctgtaatcccagctacttgggaggctgaggcaggagaattgcttgaacccaggaggcggaggttgcagtgagccaagactgcgccactgcactccagcctgggcaacaagagcgaaactccgtcttaaaatgaaacaaaacaaaacaaaaaaacaaatgtattctgtcttagctatagagatcagaagtccaaggtcaaggtggcggcagggctggttccctctggaggctctgaggcagaacccatcccaggcctctcctgtccttggcattccttagcttgtggccatatcactccagtctctccttgtcttcacttggacttctttctcttgtgtgttctcgcctcctatttatttttttgatacagggtctcgctctgtcacccagactggagtgcagtggtgcaatcacagctcactgcagcctccatctcctgggctaaagcgatcctctcacctcagcctcccaagtagctggtgctacagatatgcaccaccacgcctgcctacttgtacaaattttttgcggagacggggtcttggtatgttgcccaggttggtctccaacccctgagatcaagcgatcctccagcctcagcctcccaaagtgttgggattacaggcatgagccactgtgcccagcattcttttcttataaggacacctgtcattggatttaggatcgccttgcacccagggtggtttcatctcaagataccaaatgagtattccaaataagttccaaataaatgcttatttggaataagtattccgaataaggtcacatgctgagtttcctgggtcaggacgtagacatgtcctttgggggacataagtcaaccctctgctgagctccagctgcactgacagggcgaagcactgcattcagccatgctgcggacctgctcagagccttgaaagcaccagagagtctagtctccatgtgctgggctcctgcacattttcccagaatgcatctgctcatggcccacccttcagctttctctaggccccagggacgacagtgtgggaggctggtgggtgcatgggggctgcccagccacgtgcaagtttctgtggggggatccagaggaggcacccggctgagcaggagatgggaattgaaacctgcgcagaggcggctgtgcagggtgagagtggagccgaaaccacagaaagtgaagtttgcttcaacgtcttgtcccggcaggccactcagatgtgagagtgaggaagtgggatggggcctgaccggaaggaggttggtaaacagcaaagagagctgagcggaagctcagctgtggggctggttgagggcaggaggccgtggcccccagagcggcaggcacggggctgcgaagtgaagggaaattgagctgccagcacagggaccccacatggatggttgtgcctggggctgtcaccatctcctactctttgcgagagtgacaactcttcctgctccttttgccttcggagtgaaattcacccttcccasaaggctccacgtggcccctttcacctctccctctccccagcaacatcagcccctcactcagtctccctgcagcgcacccacttcctgctgttcctggagcccgctgagcacattcccaccccagggcctttgcctgtgctgagcccgctgcccggtatctcctttcctgcagctttttgcatggcttgggccctcgctttcttttttggggggacacggtcttgctctgtcgtccaggctggagtgcagtggtgtgatctcagctcactgcaacctctacctcacgggttcacacaattctcctgcctcagcctcccaagtagttggttctacaggcacccaccaccactcccagctaattttggtatttttagtagaaacattgagtttcaccacgctggccaggctggtctcgaactcctgacctcaagcgatccacttgcctcaacctcccaaagtgctgggattacaggcatgaaccactgcgcccaactcctcgcttcctttcatctccgtgacccctccatgcccatcctctatcccctcctgctgcatttttcttccttgcccgtctcatcatctgatggttttcttttttcttttttttgagacagagtctcgccctgttgctcaggctggagtgcagtggtccgatttcagctcactgcaacctccgcctcctgggttcaagtgattctcctgactcagcctcctgagtagctaggattacaggcgcccaccacaacgcccgctattttttgtatttttagtagagacagggtttcaccatgttggccaggctggtctcgaactcctgacctcaggtgacccgcctgcctcggcctcccaaagtgctgggattacaggcttgagccacaacagccagctgaaaaaacataaatttttttaaaagaagaaatgaatcctgggctgttagtgaagattacattcagatattactagaggcttaagcaaaacagaggtttagctctttctctggagagacaccattcagggctggtagagcaatgtcacacattcttcaggaaccccagctccttctacatcattgctttgccctgtcatcagctggattctgcctcatggcccaaggtggctgcttgtgctccagccattgtgtccacgttccagctctagcatgaagaagcttcccaggattcaccgaagacacttctgctcactcctttatggccagcctgggttgcacagccccacatagcagcaaggaagtctggaagatgagtctccattggacagccatgggctccgttatgatcagggattctactactgaggccaataggagcaatggacattgagggacacgtgttctctattcatcgatgacctgcccgcctgcctcaggggctccctggggatcttgccatctgaggggccacactctggactttccttcctccagcctggagcccctgactgctgggaagtgttcagtgtccttgagaggtcttcagggacccaccccactccccagccaacgctggatccagagctcagtgcttgacactcccctcatcagaaaacctgtgatggctccatttgatcacatttccgcttggagtgtagactgcatgccctccctccctccgtccctcccttcattcattcattcattcattcattcattcatgcacacgtttattcatgcattcattcagcaaacatcgagggctgctctgtgccaggcacaaaacaggtgaaggggtggagacgcccaactaaccaaaccaggtcaaatgctgggacataaaggtcgcgcccaaccagtccaggggcacagggacggctctccaaggggctggtatctggtcttttcacctgaggggtgaagcttgggcgaccacgtgcaggaggcgggagcaagagttctctaggcactggacaagaccgcgggggtcagagggacatgggggcttcgggagctgcagggggctgagtggagccagagggctcttggagcgatgaggctgggccctcagtggtgctttcccaaagggcaatgggagagcttcgggaggtcagcacggagagttttggggtgctaaagatggggtttgggcccaagaaaagggacaccttcgctgggtgacgtggctcacacctgtaatcccagcactttgggaggctgaggcgagaggatcacctgaggtcaggagtttgaggccagcctggccaacacagggaaaccccatctctactaaacaaaacaaaacaaaattagccagaaatcgcttgaacccaggaggcgaaggtggcagtgagccaagatcatgccactgcactccagcctgggcaacagagtgagacaccgtttaaaaaaaaaagaacactttaggaggtcaaggagggtggatcacgaggtcaggagtttgagacaagcctggccaacataatgaaaccccgtctctactgaaaatacaaaaaattagccaggtgtggtggcgggcgcctgtaatcccagctactcgggaggctgaggctggagaatcacttgaacccgggaggtggaggttgcagtgagccaagatagtgccattgcactccagtctgggcgacagtgcgagagtctgtcccaaagaaaaaaaaaaggacacctttaagagacacttaaaacgtgaaatatgccaggtgtggtggctcatgcctgtaatcctaacattttgggaggccgaggtgggcggatcacttgagtccagaagtttgagaccagcctgggcaacataggaagaccccccgtgtctacaaaaaatacaaaaattagccaggcatggtggtggcgtgtgcctgtgggcccagctactctggaggctgaagtgagagggtcacttgagcacaggagttccaggctgcagtgagccatgatcgtgccactgcactccagcctgagcaacagagcaagaccctgtctctaaaaaaaaaaaaaggaaaaagaaatggagtccaggtgatggactggtgggagggacagtgttgggggcctgaagaaggaatcaaggatgaagcttcagtgcccccaagtctctctgctcacccctgccaggccacccatcctctaagaccttggcatctgcccccctgccccagcactgacctcagggacagtctgggagtgcctgtccagctctgtctccccagcctggggactcctaggagctgggccagggctgtatcctctctggggtccagcctcaccgggcacagggtaggcacagtgctggtgggggggtgtggcaccaggaactagatgccgcatccctgcccatccccctgttccagcccccatacacaacgactgctggccggtcctgccagatgtctgccctgccaccctcctccaagacgagctatgattttctttctcccacaccccacaacctaaccccggggctgtccccgcagcctctacagaaaccactggctctgggcaacacgggccccaggggagtggggaggacgcaggtgcagcgtggggtggggcaggggcggggcctctgaacccactgtgaccaagcctctcacccgccatccaggtgcccctgagccgaggaacgc

SEQ ID NO: 93852 - DNA, 36933 bp, Homo sapiens
aaaatgtaccaaatccctggggtaaaagctagggtaaggtaaaggatagactcacatttacaagtagtgaaggtccaagagttctaaatacaggaaatttcttaggaactcaaataaaatgccccacattttactacagtaaatggcagtgtttttatgacttttatactatttctttatggtcgatatacaattgattttttaaaataatagcagatttcttgcttcatatgacaaagcctcaattactaattgtaaaaactgaactattcccagaatcatgttcaaaaaatctgtaatttttgctgatgaaagtgcttcattgactaaacagtattagtttgtggctataaatgattatttagatgatgactgaaaatgtgtataaagtaattaaaagtaatatggtggctttaagtgtagagatgggatggcaaatgctgtgaatgcagaatgtaaaattggtaactaagaaatggcacaaacaccttaagcaatatattttcctagtagatatatatatacacatacatatatacacatatacaaatgtatatttttgcaaaattgttttcaatctagaacttttctattaactaccatgtcttaaaatcaagtctataatcctagcattagtttaatattttgaatatgtaaagacctgtgttaatgctttgttaatgcttttcccactctcatttgttaatgctttcccactctcaggggaaggatttgcattttgagctttatctctaaatgtgacatgcaaagattattcctggtaaaggaggtagctgtctccaaaaatgctattgttgcaatatctacattctatttcatattatgaaagaccttagacataaagtaaaatagtttatcatttactgtgtgatcttcagtaagtctctcaggctctctgagcttgttcatcctttgttttgaaaaaattactcaaccaatccattacagcttaaccaagattaaatgggatgatgttaatgaaagagcttcgccaattaagaagggccatgtaaatgtgggtaacctgattgttttgtcaaaaatgctaaagcggggtggggggtggcgcagtggcttatccctgtaatcccagcactttgggaggtcaagacgggtggatgacctgaggtcaggagtttgagaccagcctggtcaacatggtgaaaccccatctctactaaaaatacaaaaatttgccaggcatggtggcaggtggctgtaatcccagctactcaggaggctgaggcaagagaatcgctggagcctgggaggcggaggttgcagtgagcagaaatcttgccactgcacagcagcctaggcgacaagagcaaaactctgtcaaaagaaaagaaaagaaaatgctgaaggagttactcagggtcaagaaagttttcagaatgtccgtaagataacatcatcatgggacactacctgttgctgggtgctctgcggcttttacactgatgctgattgtgtgagatccagaaaaagaaaatggagttctacatgcccatctcacagcagggtcatcaaatcctgctagtgacacagaagctgacatccagctcccacccgccttcctcccaggttcggggagcaggtagagtgggagccattaggtgggctctgccagtgttgtcatagagtggcaagtcctccatgggatgggagtggcatgtgggagccttctgcatcatgcactatgaaaaaagaaaatttactatggggcaagtggttcatatagttaagtgattgtatatatatatatatatatatatgtattccagtgtagaaagtattggctgggtctgtaatcaagtattccacagaagtgccttcataggtgctgaaacaggattatgagagtgacagacacaggactgaagacagggagaaaatgtgcatggctgtgagaatatattgctttgattctttgacttctcatgatatatgaaaacaaataaagtgggggggggtgacttcaataatatcacgaacatatttaaaatgaaattctgagcatggagaaaaatttcaaattctggtataaacaaataatctaaaaatatagataaggaaaaaatgttttcatttttttggtcatattgatttgggtcatatatgattgaccaaaaaaaaagatatttctaaaatcctggtgctttttcatttaaaaatagacaaccaaagaggaaaatgaacaatgatggaaattcgtggaagaggaaactaaaatggcaaaatagcatattaaatggcactgagccttggtgtgatcaaaaaaaaaaataaagcaaaatgagatattactgcttacctattagcttatgctgttggtagaaataaatgtgcattgtcataggtttctgacaaacaatttgtgatttttattaaaattttaaacatgcatatcccaagcaatatcacacttgggaattgactccataattataattatctgtgtataagaatatagaaacaagactattagcagcagccttacttgtagaagaaacaaaaatttttaaactctctgattgattgacagaataaggaatgataacggaatgataactccctattttgaatgggaattttttttttttttttttttgagacggagtctcgctgtcgcccaggctggagagcagtggcgcgatttcggctcactgcaggctccgccccccggggttcacgccattctcctgcctcagcctcccgagtagctgggactacaggcgcccgccacctcaccctgctaattttttgtatttttagtagagacggggtttcacagtattagccaggatggtctcgatctcctgacctcgtgatccgctcgcctcggcctccgaaagtgctgggattacaagcgtgagccaccgcgcccggccttgaatgggaatcttattaaaaaaaaaaaaataggggactgggcattgtggctcatacctgtaaccccggtgctttgggaggccgaggcaggtggatcacttgagctcaggagttccagactagcctggacaacatggcaaaaacctgtctttacaaaaaaacacaaaaattagccaggcatagtggcatgcaactgtattcccagctacttgggaggctgaggtgggaggatcgctggagcccaggaggcacaggttgcagtgagccatgatggcaccattgcactccagcttgggcaacaaagcaagtcctcatttcaaaaaaaaaattttatctaaaaatctggagaaattaatatgaagcatcagaaagtataaaaagcaaggtacagaataatgtgtattacatgatccaatttttgtgaaagaaaaaacaaaacaaattaaaattcctatttattagtatataggttcatatgagcatggagaaagacatagaaatgtataaaacaggctgttcccctcagaaacctggatctgaaaagagttgaaaaactaaagttaacttttgagccataactgttttgaactaatattatgtaatttctttacatactatttttgaaagtcttgaatagaggcaggacaatgaactttaacaatttcttcaagaatgtcaatcgcattctttaatcatttgtaggagcttgacatcaatattgtcagttatgatgagatttatgactttattacttttttacctcataaagaaacagtaatgaaagattctagctgccaacatgtatatgtaattgtgaactaatttaaaggtactgtaattgagattttaatcacttaaaaaaaaaaactgaccacataaaggtcaaaataatataaactatcacagccacctctaaagccttgggatgatattactcatagagtcatagaaatgtttttcttacggtgaaaccccgtctctactaaaaatacaaaaaattagccgggcgtagtggcgggcgcctgtagtcccagctacttgggtggctgaggcaggagaatggcgtgaacccgggaggcggagcttgcagtgagccgagatcccgccactgcactccagcctgggcgacagagcgagactccgtctcaaaaaaaaaaaaaaaaaaaaaagaaatgtttttcttactggatcattcaggaacctaagattatcaatggcagacatataagtctggatataagaaaattctcctaggccttaatagaaaactttcagagctattaaacatgaaattattataaggtcaaatagatttttggctatagactcgcaagattaatgcaaacaagcttttggagttacttggttacctgggtagtcctggattttgccttttttctcccaagacgcttataattggattttttttttgagacggaatctcgctctggcccaggctggagtgcagtggcgcgatatctcgtctcactgcaagctccacctcccgggttcacgccattctcctgcctcagcctcccgagcagctgggactacaggcgcgcgccaccatgcccggctaattttttgtgtgtgtatttttagtagaggcggggtttcaccgtgttaaccaggatggtttcgattacctaacctcgtgatccgcccgcctcggcctcccaaagcgctgggattacaggcgtgagccaccgcgcctgcgctcaattctcaagagatttttttttttttttatgatatcatagtcttctttcatgcatatatcttttctctttgtaaataataacagcttttaaaaacattttgtattttttcacttcatggattatttcttctaacttcttttttctttgctttgtttctatctttcctattacaaagctggaatcactccacatttctgatgatcttggttgtcttctgttgcaggatggggcactaacgagctatcgggaagctctgaatacatgggtggcatctgtgtcatgtgagatttgctatagaactctctggtgggattaattgctggggaatataatgtcagtaagggtgggtattttctcttgggctggtcagatttttcaaaggatgattttggaagtttccgtgcagaagacacatgcccagctgccagcactctggggcccaagagggcaattgagaattgaaaatcatcacagcagagtagaaatccaatagaaacataaaagatctcaataaatttatgccgtggtgtaccttttctccagacgataactaatgaagtgcccccaaactgatgattcaaagaaaggtgtgatatctgacaagctgatgctctcaccctggggagagggaagggattccccaggactagggtgaggaggctccaggatggcaggtgtggccagaggcaaagcacctcccgcccacatgggagtaagtcaaaggctccagagagatacgcagctgggaataaaatttccagagactgtatcaacaatcatggtgtgtctcaagcaatttaaacggaaataaagttgacgtgttctcaaaaatatgctaaaaaactcaaaagtggctttaaagctgacatagacatataaaatatgtgtctatgaaaataatagtagaacctacctcatagagttattctgaggtttacatgagtacataatttgaaccaaccatttggaacagcaactggcacatgctgagagtggcaaggatattacctattattctttaggttattaaactctagagttaggcttcgtggaatcctggccccaccactagctgtgttacattgggaaattgatgcaatctctctaaacctcaatgtcttcatctgtacaatgtgcatggcaatggcatttacctcataagttaatgctaaacattgcactaaatgaggcaatgtatgctcaaaaatgagcatagtcagcactccataaatgttagctataaatagtaataatttgtgctttttacaaaaatttatattttaacttcaaaaaggaaaacaatctccaccattaaagaactctttaatttttagatacttttatattgcgacaaacataccatttgtattactctgtattgttttaataaacacttggtatttctacatcatctcagtaattacatgtttaagcatctgccaagaacattttcaggataatttaaaatacatcaatacatcatcaaaacacttttggaacattcagatggtttgtagtttggttctcacagagaagactggatggtacatctttgtttttggattgggcttcttaggttatttcccaactcccttcacaggaggaatgtaagcaaacattttgatctctcacacatgctcttcttggcaggattccaggctccacagccgctgcaagaccagcaagtatttccgctccctcgacatcttgggcttcagtaccaaaatcaaaatgaaatgctaattgagtaggrattgatggctttgaatgtggcattttcaaaaatttctctaggaacttaaaatgtattctatttattgcagtgtgctatagagtatgcatctattccattctcaagttctgtttactgctactaaagtccctctcccaattttcattttgcacctcatcccaaaacatgctttaaggttgttatttatgcacatacatgaactgttacaattctttctagcaatctttacaataatattaatctcattatcttaccaagttatttaacccccaaaatgaaggatttgaactgaagataatttctgcaagttacagtattctttgtcaggcccatgtaaattatggacctctgcggaaaagaagacagttggatctcttgcagggatgctggtctgtccttctccaggctttggagtcacatcttcgcactgctcatcattacctgtataattatattagagatgccaatccttgccttccactaaccttccaagagagcttgtggtaatttgttacrtcagcaatagaaaattaacacacctctgttgcaaacatggccatctargatctgcgggtaggcacatctccgtctttgatctcagcctggaaaagctcatcaattttaagaagccataagattagattaggttcacctggataatccaagctaatcttcccatcccaagacctttaactgaatcatatctacaaaatccatttttgccctgtaaagcaacatatttctagattccagggattgggagcggacttctttgagggccattattctgcctaccaggcagaggatcactcccccaaagtgaatcaagtatatcatctccctggataagctaaatttagaatatggtactttgtgaaaatgtaatatagaatcaggttggcttgcagagacacacatagagagagaagtagaggaaagtgatgccctgtgatccccagagattgacagggttacctgtggacattccagatgttgctccagagggcctgctatggccctytgatactagaacactggctttcaataatgtggcaactgctcttcccacctgcccatctaaacgtttagaaggtgggacaaagagtaagcacagagtagttgccagatggtattaagaaagatctcctgactgtatggagtttatcccaaagtgctttcggtatttcatggagccatatgctcaaaatgtgatggaagctcataagtggataccacatttccaaattcattatggccttgaaaacaaggtggtagtggctataattcccttaaatgctaggtctccatatgcgagagatgattaaacagaaaaatgaataaaagggtgtatgaaagggaaaaaatgtattcaatattatttgtccatactgttgattgcatatatacctttcaattccatctcatctttcttgataaatcctttttggggggtaactgataattttattttgggattgataacaggttttttacttttatttatttattttttctatttcaataggttttgggggaacaggtggtgtttggtcacatgaataagttctttggtggtgatttctgagattttggtgcacccataacttgagcaatgtacactgtacatagtgactaggttttatccctgacctccctcccacccttatcactgaatcctcaaagtccattgtatcattcttttgcctttgtgtcctcatagctcatctcctacttatgagtgagaaaatatgatatttggtttttcattcctgagttacttcacttagaataatggtctccaattccacccatcttgctgccagtgcmattatttagttcctttttatggctgagtagtattccatagtgtttgtgtgtgtatgtgttttatctagtcaatgatcggtgggcatttgggctgactctatattcttgcaattgtgaattgtgctactataaacatgcgtgtgcaagtatctctttcttataatgacttcttttcctctgggtagataccaagtaatggaattgccggatcaaatggtagattttcttttagttctttaaggaatcccctcacttttttccatagtggttgcactagtttacattccaaccaacggtgtcaaagtgttccctgtttactgtatccacaccaacaagtattattttttgattttttgattatggccattcttgaagtagtaggaaggcatcacattgtggttttgatttgcatttccctgatcattagcgatattgagcattttttcatatgtttgttggccatttgtttattttcatttgagaattgcctactcacatccttagcccacttttgaatgggattgtttgtttttctcttgctgatttgtttgagttctttgtagattattgatattagtcctttgtcagatgtatagattgccaagattttctcccactctgtgggttgtctgcttaatctgctaattatttctcttgytgtgcagaagctttttagtttaattaagtctcatctatttatcgttgtttttgttgcatttgcttttgggtttttggtcataagtctctgcctgaaccaatgtctagaagggtttttccaatgttatcttctagagtttttatgatttcaggtatttgatataagtctttgatccagcttgagttgatttttgtgtaagttaagagatgaggatcctgtttcattcttctacatgtggcttgccaaccatcccagcaccatttgttgaatagggtgtcctttccccactttacgtttttgtttgctttgtcaaagatcagttggctgtaagtatctgggtttatttctgagttctctattctgttccattggtctacaagcctgtttttatacgagtaccatgctgttttagtgactatagcattatagtataatttgaagttgggtaatgtaatgcttccaggtttgttcttttcccttagtcttgcttttgctatgtggggactttttggttccatatgcattttagattgtttttactagttctgtgaagaatgacagtgctattttgatgggaattycaataaatttgcagattgcttgtggcagtatgttcattttcacaatattgattctacccattcatgagcaggagatgtgtttccatttgtttgtgtcatctatgattttttcagcagtgttttgtagttttccttgtagaagtatttcacctcctttgttaggaatattctaaagtatttaaattttttttgcagctattgtaaaaggggttgagttcttgatttgattctcagcttggtcactgttggtatatagcagggctactgatttgtgtacatcctgaaactttgctgaattcatttaccagttctaggagctttatggatgagtctttagggttttctatgtatacgatcatgtcatcagcaaacagtagcagtttgacttcctctttactggtttggatgccctttatttctttctcttatccgattgctctaagacttgcagtactgtattgaataaaagtggtgaaagtgggcacccttgtcttgttccatttctcaggggaaggctttcaaatttccccattcagtattaygttggctgtgggtttgttgtcaatggcttttattaccttaaggtatwtcccttttatgccgattttgctgagggttttaatcagaaagcatgctagattttgtcaaatgctttttctgcatctattgacatgatcatgtgatttttgtttttaattctgtttatgactggtctcacatttattgacttgtatatgttaaaccttccctgcgtccctggtatgaaacccacttttcatggtggattatcttttggatatactgttggattcacgtcactagtatttttttgagaatttttgtatctatgttcatcagagatactggtctgtagttttctttttttgttatgtcctttcctggtttggtattagggtgacactggcttcatagaatgacttaaggaagattctctctttctctatcatttggaatagtgtcgataggattggtaccaattcttctttgaatgtttcatagaattcagctgtgaatccgtctggtccagggctgttattggtctcttcagagtttctattacttcctggtttaatctaggccaggtgtatctttccaagaatttatccatctcctctaggtttcctagtttatgcacaaaaacttgttcatagtagccttgaatgatcttttgtatttttgtggtattggttgtaattyttcccatttcatttctaattgagcttatttggatcgtccrtcttcttttcatggttaatcttgtcaatggtctatcaatattatttttcaaagaaacagctttttaaaatttatcttttgtatttttttgtttcaatttcatttagttctgctctgatcttggttatttcttttctgctgggtttgggtttggtttgttactgtttctctagctccttgaggtgtgacttgagattgtctgtctatttgtgctctttcaatctttttgatgtggacatttaatgaatgctatgaactttcctcctggtatcactttgctgtatcccagaggttgtgataggttgtaacactattatcattcagttcaaataactttttaatttccatcttgatttcactgttggcccagtgaccattcaggagcagataatttaattttcatgtatttgcgtggttttgagggttccttttggagtttatttcaaattttattccactgtggtctgagagagtacttgccataatttcaattttcttaaatttattgagacttgttttttcacctatcgtatggtctaccttagagaatgttccatgtgctgatgaacagaatgtatattctgcagttgttgggtagaatgttctataaatatcyrgtaagtccatttgttgtaggctgtagtttaaatccattggttctttgttgactttctgtcttgatgacctgtctagtgctgtcagtggagtattgaagtctcctactattgttgtattgctgtctatctcatttcttaggtctagtagtaattgttttgtaaatttgggacctccagcgttaggtgcttatatatttaggattgtgatattttcctgttgaaatagttctttcttttatcattatataatgtacctccttgtcttttttaacttctgttgctttcaagtttgttttgtctgatataagaatagctactcttgcttgcttttggttttcatttgcatggaatatctttttccacccctttaccttaagtttatgtgagtccttatgtgtcaggtgagtctcttgaagacagtaggtactttgttggtgaattcttatccattctgccattctatatattttaagtggagtatttaggccatttacattcaacgttagtattcagatgtgaggcgcaattctattcatcgtgccattgttgcctgtatactttgttttttttttcattgtgttgttgttgtataggtcctgtaagatttatgctttaaagaggttctgttttaatgtgtttccaggatttgtttcaagatttggagctccttttagcagttcttttagtgctggcttaataatgatgaattctctcagcatttgtctgaaaaagactgtaactttccttcatttatgaagcttagttttgctggacacaaaattcttggctggtaattgttttgtttaaggagactaaagaaaggaccccaatcccttctagcttgtagggtttctgctgagaaatctgctgttaatctgacaggttttccttcataggttacttgatgcttttgcctcacggctcttacgattcttccctttgtcttgactttagataacctgatgactatgtgccyaggcggtgatctttttgtgatgaatttctcaggtgttctttgagcttctgatatttggatatctaggtctctagcaaggccagggacgtttctcttgtttattccctcaaatatgttttgcaacttttagatttctcttcttctccagtaacaccaattattctgaggtttggtcatttaacataatcacaaatttcatgcaggctttgtccttttttaaatattcttttttctttgtatttgtttaattgtgttaatttaaaagccttgttttttagaagttcttttttctacttgtttgactctattgctgagactttccaatgcattttgcaattctctctgtccttcgttttcagaagttttgattgtttttctcttatgttatctatttcactagatattttctcattcacaccctgtattgtttttttgattactataagttggacttcacctttctctggtgcctccttgattggtttgataatcaaccttctgatttctttttatggcaattcagagatttcatcttggtttggatccacggctggtaatctagcgggatcttttgggggtgttgaagaatcttattttgtcatattaccagaattgtttttctggtttcttctcatttaggtagattacatcagagggaagatctaggactcaagggctgctgttcaaattcttttgtcctataggatgctcccttgatgtggtgctctccccttttcccaagagatggagcttcctgagagctgaactgtagttattgctttttctcttctagatctagcaacccagtggagctacctggctttggactggtactggggagtgtattcagagtcctgtgatgtgatccatcttcaggtttcttggccatggataccagcaccttctccagtggaggtagcaggagagtggagtggattctgtgagggtccttggatgtatttttgttaagcgtgctggttttgtgttcgttggcctccagccaggaggtgacgatttcaagagcacctcagctacggtagtctagggaggatcaggtcgtgggcaggaccatagcacccccaatagattatgtccttttcttcagctaccaggctgggtagagaaagaccatcaactaggggcagggctagacatgtctgagcttagactctccttggtcagggcttgctgtggctgatttgggagatgagggtgtagttcccaggccaatggagttatgttcccagtgggattacagctgtctctgccgtgtcacacaggtcatcaggggagtgggggaaagctggcagccacaggcctcacacagctcccatgcagcccagagtctgagggccggtctcactcccaccatgagccctcaacaaaaatgtgtttatttccttccagtcagctggtgagcagagctgagaaattgccccaggctataagccccgcaactgagaaagcaagctggctcacgtttcttctgctgtcccacagaggctggagcagcagtccaccgccttcaaagggtctgtggattctctctgctttcctggtatgtccctgcagtagttcttggagcaaaagttcacaatgtgggtctccatgaactgctctgttcatccaagtagcaggtgcaagttagtcctgcctcctatcctcctccattttgcctcctgatgacccayttttcttgatacatcttaataaaatacctttctttcaaggtttcctcaccctaaaagtagaagtcatttctttaatttaatcaacaaatatctgagcactcactctgtgccagacattgagttaagagctgagaatccataatgaaaagatggagtaggatcttcctcctttgaattccacgttgaactcttctcctggcacgaccacttcctgcttcacaggagggttctctgtcttgtctacctgaccacagccaatcccactgctaatctgtaaamccttaaagaggagacaycggatcttctggattatgggactgctcatagaacagtgcctgtcctaacataaatgagcataagaattcaacaatcactcattaaacacctacagtatacatggagctaggtatagttgatgatataaatgaaatttaagaacatccctgactagaaatttccagtagaaattaggagactgatctctacactaaatatagagggcgacaaaagggaacagacccaaaaccacaggagagatgctagcatgacagggatgcagagacataaagcacaacagtgagatggagttaatatacctccacragggtgaccttgtcctgcatctcaaattttgggtaggatttgaatgggccagagggacagaaaagaagagaaagagcatgatgagcaagggcttgaatgttaaatagattcctctttgggggaccagggagatacaagcttctaaagcacatacgccctgtattggagaatggggaggagtagatagatgagaaggttgaagccatattacgaagccttgaatgctgaacatcagatctggggctatattcttaccttgatacatttcagaagcaactgaaatcgtaggaccttccttgcttctctattgggtgaatgtttctcagtcttggtgtgagtctcagtgcctacgtagttaaagcttactgaaatgttccctttacaattctagagagatatgtcctttatgttgacatgttcatgytgacagactgcatctgattaaacagctgcctgtgcaatgcctccaagtgtggataaaagaaaaattaaactcataatcttggacagccatgtgtagactagttacattgatcaaagggcaatagaaatgatccagtgaggatttgtctgaatttcccacaattatttaaaatctacctcaaatacctgttcatctataatgcctcccctgaggccttcattctgaatagtacctctgtctctgtccccaaagcactaactgatccctgtgatagcgcacttcccagccaggctgatatgtagacttggctgcctgtgtatcttttccccatagactgtgagcttccttttatgaataataattgtagctagcatttagtagggtgctcctacctgttaaactctatgatgagtgctttacatagattatatcatttattcactaaacagtcctttaaaatggtgctatattcactaaacagtcctttaaaatggtgctatattcactaaacagtcatttaaaatggtattattcttcttcatcttacaggtaaacaaactaaggcaaaaaaaaaagtgaaataataagtgccagtacacagagctagtaaggaatagggtctgccaggtcccaaaaagcatgccatcacctttgccccatactgcctctggtacagatagaggtaatgtcttatttatcactgccatccactggacccagcttagtgcctgacacacagaggggctcagtcaatgctgattggtttgaggtggagcaaaaatgcttagcagggtgagcacctttgctgtgattgagtatctgattctctatgaagagaaggggagtcctgarccaaacacattcctctggctcctggctgtcatctttatttgcccggcttctttgctcttcctccttcctaactgcaccgtttggattcaaagctggagcttaatgcagataaagggaaaacagaactttgaatgaccactgtgggactaagagaggagaaacaagaaatttgacagatgaggaataaagtgaggagaagagaaaatgattaagctttatcactttaacttaatatttaacctaatgaaaacaaaatcttatttgaaattggaaaaatcaatgtattgattgctggttcattgccctcttctttatgatttgacagtctgtgaataatctaatgggtgtggcttaaagacctagatcatgtgtggaactggaatygggtgttattcaagcaaaaaaaawaaataaatacctatgcaatacacctgctttatgcacttgagcagggaagaaatccacaaggactcaccagtctcctggtctgcagagaagacagaatcaacatgagcacagcaggaaaagtaagcaaaaaatatattactgttggaactatattctcatcaatataacaaagaaagtaatacagtatttgatgaatcatttaaaattcatatctaaattagaaatgatacactgaaatatgatatgcaatatatgctataatatgtaatgtatactgaactacagtggaaatragctattcctaaataccttcaaaaagaatgtatagaatctgtatctatgaagtgtttatttcccacattaaagacatttgcggtaaagcgataatttattccaagctaatcatgattaatttgtaaagccaaagttagaaatgtctttcatcaagaagttttctttatattaaggtaccataatttaaatgtattactatttgtatttatattttttgtgaatacaagaaagttaagtctgatgaaagttttatgagaggatttgatttagaagactttgaaatacccttttaaccttaacataaaatagtttacaaaatgctcattggtctcacagcattagaatcatcaaggttaatcaagacaacatcaacattcaaattctgatttaaaagggtctagtaggacacaattcaggcaatttccagagtaatcctatggaacagtatcttccccatataaaagtcaatatggttttacrgaaaattaataatacaatttgaatcacttattagcactaggaacacagatatttggttttgccttccataaatatcttaattgttcaatgtgtttataggtgcacaaaaatacatgtggtaatacaatataatcaattgatattttaattgcctaattacaaaaatttgtgcaactatttccagtccttttttgtgttaggagtgtattacacagtaaaatatctcactatgataactcagtttaaaggctctgaggcttctctatacactctgtgacaaaacaggttcatatcaataagactggttggaaatcacatgggtggcccattgttactgttcttattccacctcactttactttcattcattactgattaatatgtacattccacatagaaaacaattagcaaaaaaattaaatttaccaaactcaacttaaaagaaataatgagttcctacagcaaaagtataaaccaatcatattaatgaaaataataactgatgaaatagacaattgcctcccctcttgggcacaacatcaataacttagyttgttgtcagcatttcatttatgtttatacatcctgcattatattttcctcaaatgctaaatagtgacaatactaacatctatttcataaagtagttgtgttgtgataattcaataaatgaatactataaagaacttaaaattgtatttgggatgtagaaataagtcaataactattagccactattattattgttgctatttaactttttgctaactttttactgacaccgagtagtgaaaacataaggctagattcatctttattctctggaaagccagctttgagactttagagaaattagttaatcactgagtcaatggatcctcaattatttcagctgtaaaataaagccaataattcaatagtactgtcctggtagcatccttatgagattttaaaataatgcatgttgtttatagcagcacaatttgcaattacaaaatacagaactgacctaaatgcccatcgacaaacgagtagataaagaaaatatggtgtgcatataccatggaatactactcagccattaaacagaataaaataaaataatggcctttgcagcaacttggatggagctggagaccattattctaagtaattcagaaatggaraaccaaacatcatatgttctcatttataagagagagttaggctatgaggatgcaaaggcatgagaatgatatcatgaactttgggaactcgagggggaaggttgaaaggggaggtgagggataaaagactacatattgggtgcaatgtacactgcttgagtgaagggtgcaccaaaatctcagaaatcaccactaaagaacttacccaggtaaccagaaaacacctgcaccccaaaaactattgaaattaaaaataaattttataaataaatataatgcaaataactcaccgagcacaggccacaatgtgcctgtcacatcataggcacctgataatcaggaactcctactattagtactttacttccaagtattctgatatttatttggcattgatcatgttgaacatcctgcaaagttgaataatttgacaaataaataatgacaacgaattatcagaagaacaaatttcaattgaatttttatcataattgcaattttgttgattctctctggaaagagttttgtgaattgtacatgcttaaccacaatgaagacagatattacagttcactgccaagcactggaaattatgtgtacatcttttatttttaagaacatctatggataagatctgctagctagaaattcaaacacacagtgtctccaattttgaaatatgtatgtgtaggtctgagtgtatacacacacacacatacacacacacacacacacacacccaactctaacctttgtaatttggggctcaaatcaaagctggaaggagtctctacacatagatcagataacagtacagcctctcaaagctaagttgcaaatgggtgttggaacaagtaacacacagaagtggtggagagagaaaattaaaagaggagaataggaaaagagagagaaagagatgtcatcccaggcaggaaggtaaatatatccttataaactcagatccttttggcctaagcagaaaattgagaaagaaaacagtgtattttatgtgaacagacactgactctgtcagcaaaaygaaggtgacttagaatttgatgtaccagccaataattgtgggtgaagagacattttcagcatagcattaggaaatgtcaggattaaacaactttggagaaaaacaacaacaacataaggatggccttaatgaatatattccattttatctcagtgtgttgttatagttaactgtttatctttccttatgttattgcttttttaaaatatatttttttctctttataaatcagaggtgatcatttctatagagcacttgttaggtaccagacatgggattagatgttgtatgtacaaagatgaaatgacacaatatctgactgcaagcgtgggagaacactggtgccatctctctgtttgcttttctaggtaatcaaatgcaaagcagctgtgctatgggagttaaagaaacccttttccattgaggaggtggaggttgcacctcctaaggcccatgaagttcgtattaaggtgaaatacatttttccatttgtatttaagttttaaaaactcagaaaagttaaaaaacggaaacaaccaaatttttatatgatcatccagaaaatagaatatacttgttgtcaaggaaaggtataaatataaatttttaaattttaaaaaagtgcacacagtgtaattccagtaaaatacaaaagaatttatgtgtttgtacagaaagaaaatttcaaagtgatatatatcaagacttcaaaatcaattagcattagatatttttatgtattaatttgcaacttctacttctattttttaaaggcatgcattcttttatattatttaagacttaactatttcaggatcagttacttcacagattattctaaactgtttacttcaagaatggaaggtagaggagggtttcagcctggtcaaccttgaggataaactgaatctttcatacttgggatagtagggattattagcaaaacccttgaaaacattttggaagcgcaatttcagggaactgggatttttaaattcacctgagactcacaatcttttataaacatcttctcttcactctgtagatggtggctgtaggaatctgtggcacagatgaccacgtggttagtggtaccatggtgaccccacttcctgtgattttaggccatgaggcagccggcatcgtggagartgttggagaaggggtgactacagtcaaaccaggtacaggattcacattcaggaaacatgatggttcaccatcctaagatttcccagcctgaatgaggaaacagaggcaaagagggacgaaagggcttgaccaaggtcaccgcgcagccaggacttcagggatttcctctttccctctcttcctgcctgactcaagcatgtatgtctttaggcacgcatgtattctacccttcaacaattatgtactgagcatctgctagatgccagtcaccaggttggagcctggagatatgtgaggatcaaaagggacacagtgcctactagtgtggcattcataatctagtaacttccgtgttagtgttggtgaacacggtcttctgtcagggcccagacacctagaaatgggaggagggaaaaaacataagtatggacattgttctgtgctgagttcacaaaatggasgctacatggctayggctgaatgagcatgaccttttcttaggtgacctatgcagccccttcaccaatttcctcttgcaacgtggtctctcttcctgagcaaggaatcaatgaagcagactaggtgaaaggaaatgaaagaaacatagaaagagccatccaccatcaacaatgtctgccttattactttcagccatgcttaaatgtaactggttacggattactaattataaagggagaataactaggacacttccatactatcattttcacataaattttacctataaaatgttatgggccaaccatttttcttggtcttgtggaatagacagcataggtaatttaaaataaaaattatgtttaattctaaaaaaatcacttttttttttttttttttttgagacggagtctcgctctgtcgcccaggctggagtgcagtggcgcgatctcagctcactgcaacctccacctcccgggttcacgccattctcctgcctcagcctaccgggtatctggggccacaggtgcccgccaccacacccagctaattttttctgtttttagtagagacagggtttcaccatattagccaggatggtctcgatctcctgacctcgtgatctgcctgcctcggcctcccaaagtgctgggattacagtctaaaaaatcactttaggcactagattggacctgccactttaccaaatacttatttgaactgtgaacagaaaaataaaatgaactgtccaatttgggtttcagctcctactaatttctttagtagtaataaattaataactactgaataataactaataactactaaactactaataataactactaaataatactaatartaactaattagttagtaataagttaataacaaaatgacacccttactttttacccatgctccctccactgtaacaggaaaagtagataattcacaaattatcagctaaaaacatttcaaagtcagttcttatcctaaaagtgcctaacttattgtggagggttgaaatttccagaggaatttctggaattgttctttgtcccatttttgatagttttcctcaaaaaaagaactgagatcattttaaaagcattcatttcataataaagataaacctagttactttgaaaagaattagttcaaaattctcatttttattgtaaatcaaactataacaaaaaacaggtcttaccaacatctagtggaactattataccctactttcaactaaaatttatatttatacttacagtaagatttatatagttaaggattaaattaaatgtttgtaaagcctccaggagaaattggtacaccacatgaaagtaactgttaatacagtggaagcaatttttctaatccatgttgtttcccatatttgcatgtcctctttaggaatcttcaggcacttataaacccaaactggaaacaaggctgtggcaggcaatgacaaatgacatatttgtgattggactgtatttcttggagacttttaaagacacatgtttctaatgttttaaagacatgtgagctttatgtttttgctctattaatacctggatagaaattgtaaaagaatttgttttatccctctccaggtgataaagtcatcccactcgctattcctcagtgtggaaaatgcagaatttgtaaaaacccggagagcaactaytgcttgaaaaacgagtaggtttctgatgctctccctgcgcagacattgagtttgcacmttagttatgktcctgtctcatgcctttgtgtgtctttgtattgcactgtccagtgtaagcaatcctcaggggaccctgcaggatggcaccagcaggttcacctgcaggaggaagcccatccaccacttccttggcatcagcaccttctcacagtacacagtggtggatgaaaatgcagtagccaaaattgatgcagcctcgcctctagagaaagtctgtctcattggctgtggattttcaactggttatgggtctgcagtcaatgttgccaaggtaagaatggcaatgggtgataaaaacagttacacgcagactgtcaggaacccaaagggaaggaatgtctcacaagaatcgaagattatttttgtagattttgaatgtcgactaagaatagaaacacaatccagaaagaattgagagcacatgctagaagtttcacctgtttatcagattaaaaagttgttgagagtttagaaaatgtaaagatttcattttcaataattactcttctgtatttgctctttatgagctcatgaaatattaggcctgagaactcatttagtaattcattctacaattagagagcacctacacatgcttcaggcaccataggttctgctaggctctgacagcaaaagtaaatgaaatgaagcgtttgcccttgaggagcagctagtctgtggatcctctactcccagaattaggatcaacaacagtagagtccaaaaccttacctgatgcacctccaaaccaaggctcacccactctgtggattcttagactgaaagtaatgacgcttcagtgatgcgtaattcactcattatgacatttcactgctaaaactaactcccctggcatgaacacacacatatattcagaagtggtaaatttcaagcagaaattctttaaaggcttcttatctgagtaggctgaaaatctagtagtatgctttattttatgaaaccgaggcccagagatataaagatatttgcccaaagtctcactgctggttaatatgagagctgagactaaaatatcttttactaatctcctgctgaatcttagatcatgatacataattattagcacttttaaatcacagtcacaagccttgtatttttctaagtaagttagaaaatggtgttgtcccccatagtattgcataccacttggtgaatgaatgaatgaatgaatgaatwgacacccttaagggaatataagaatgagattatttggaacaggaagagcatgttaygcaaaatgaaggcggactatgggagactaggtttaataaatatcccctggccaattaaaaaaatgtagatggcatcttttccaaatttctgtgactttagctcttagtcccttgttcaattgcctcgtctattttaacaggtgatctaagtgagcctacccaagaacagaagatgaggatactcataacaatakattttattattaaaatatagactaatgtttcattactgtgttattcactagtgtattttttaaagcagggatatactggtcatgactactgaacataaatgaaccaaggagttcattactgagggtttaagtggaatatttttcagtctcctggagtagccttttccacttattttgttttccaaatattgcctttgtgtatatatgagttactgaagctggctatcaagggatttcagcaatcgagagtcccttcaagattgtaatcactgccatctggatctcaaagatcatccagtcgcctggttcccagcctgaccttcccattggagtcacctggggactaagttccacctgcagagcttctcatttaattggcatgggctgtgacctggacagtgggatatttttaaacctgcccagatgaatccaatatgcagcagtttgagaaccactcaactagttcaactccatgaatttaaaaataaagcaactgaagccaaaagaggttttgataacagattgaacagaagagtttgagcagcttttgataaacactaagcatggcactttataaagtttttataatccatttttgcattttctgaaaacacaggtcaccccaggctctacctgtgctgtgtttggcctgggaggggtcggcctatctgytattatgggctgtaaagcagctggrgcagccagaatcattgcrgtggacatcaacaaggacaaatttgcaaaggccaaagwgttgggtgccactgaatgcatcaaccctcaagactacaagaaacccatccaggaggtgctaaaggaaatgactgatggaggtgtggatttttcatttgaagtcatcggtcrgcttgacaccatggtatgtaccatgacatgccctgaratttctgcctctrcaacytggaggatgcattkaggcwgyagaatatatgttttmtgtataaaggatatttttaatgatgaatggaaatttcccatcatctgtttgttacctggcttgtttaatttattgttatgaggaatcttttattctatcaactatgcaaacgtgtctcaagtcatatttcctctagaggaaaagcaaagggcttgtttttcttaactgagtgataayagattactttgttaatttttagttaaaaactgtaagttaaagtaaacataaataatacaagttctgttctcraattggaatgttttattttyctgccacattcttaacaaaaatgatttaataattttgcatatgttcttaataaattccaatttttttaaacatattagtatttggccaaaagaagtaagcaattttaggccaactattrttttattaacaaaaacatgccctaaggaaagtgaagctsaaatgcattactatattttatcacagaaactggacagtacctggcacaaaactagagcccaatactagtaggactgaatactttgaaaagtcaacagatttttatcaccccccaaatttcaaagctatatactcatggcattgtttatagattgcatgagacaatgcatgtaatatacttagcacagtgcagcctgtcatatggtaagctcccaataaatgtcttctttttatttgagacagggtctcactctgtcacttaggctgaagtacagtggcataattataactcactacagcctcaacctcctgggctcaagcaaatctcctacctcaccctccaaaaatgctgagaatataggaacgagctaccacgcccggcctcagttggcgttattgatatgaaatactatttccaatcttgcagtacttacatcatctttggcttattacatgatattgctttcaaacagttacaaatatcaaaggcaatgggaaacacatctctagctatatttcacctacccagaattctctagaatcctactgaaaaagtctccagagaccaacacgtttccattgccragattttctagaaggtccagcagtgtgggtaatggggagcagcaccctgagatcaatgctctcagcagccttgccctgggacaaatgccacagatgaatgaagtgtcaagagattccactttttccagggctatagcttttctcctaatgttcttttcctgtatcttcctccattttctcatgtggaacgggagtgtaccttatctcaagataccaaatatctgacagccacatgttctgaggatgtctggtctcccaaaggtcagaatccaaaatcaaagaactaatcattacatatcttggggcaatcctaaaccattttctaactatagaacrtgttcagaaagctcactggaaaagactttctgaacggtcttttgaggttccctaataatcagggtattttaatgtaaaacctatatatatttggggagataaaaacaatgtttaaaacatgtccatttgagaaatggacagtagaacaggaatccattacaaaaggagaccatcaagtggacaagagactactttggtgatataatcatttatcttgtttcccattaaaatatgtggttgaaagtaatgggttcaaaatacctatgtaataaatcaatgaaaaatgaattaaccaactcacagattgcytaagaattatgtgatgatgaaattgtatgsttatataaggaactggacttaatatatatttgtgatgatatctaccactttattcctttattaggaaaaattaagtgcactccaatttattcatccattctttcattaaaaaaccgttttctgggcatttcctaaatccacagcactatcccgtgcaaaaaaggggactgaaggagcaaaagacataatctcttccctctacacactcacaatccagttaagcctattacatgatattgtgcattatgaataggaactatgcgactccatgttaagaatgctaagtgttcactttattccagatggcttccctgttatgttgtcatgaggcatgtggcacaagtgtcatcgtaggggtacctcctgattcccaaaacctctcaatgaaccctatgctgctactgactggacgtacctggaagggagctattcttggtggtatgtagttaggcttcagagccaaattctcattaacctcagcatatctccccttttacaagtgacaaggcaaggttttgaaaagcagatcaaaaacaaattaaaattccttttctatctacagtctccaaatcaactagatatggaactaatgcaggcagaaggtcccaaaatcgacatttctgatgccaccattaacaaagtctgttcctcttcatctgttttcgtacttgtaactgtgtaaggcatgggaatttctagtaagacacagaaatctacaacaatatttcatatctacacccaaatttagacaactgttaaacttgttcctttgggcataacatctgtactatgatttctctgtgggagagagaataaccagggacccttgtttatctgtgatttttttttaagtctgagcctgtaaaagcttattgaggtactgtatctcttattaacctcagtcgttgcagtctggaagcagcatcttttctaaactttcatttatttggaaaatcttctcttcaattctcctacttaccctggttgaatctaacaatgataccatcttcttttcaggctttaaaagtaaagaatgtgtcccaaaacttgtggctgattttatggctaagaagttttcattggatgcattaataacccatgttttaccttttgaaaaaataaatgaaggatttgacctgcttcactctgggaaaaggtagattttttagttagttttctgttttgcttttttttctaccataggggattgtctagcagaaaatgaaaagrtggaaggatgagaaaaattagagtgccttggttcttccattaccagttcagtctttacatggagagcttgtaagagaagtttaaaacctctgtgagatgctaaaaacagttgctttgcatttcctattgtgctgaagccaaattatgttgattacagcaaatccgaatgatcagagacactcagccttctttaaaagagaacaatcacctttgccaaaaaaaaaaaagtctttttaaataaccataattataacatggtgtcattgaagcctctgcctaccacctatataaaactgacattaggtggctgtatatttaaataattttcaggacatcctcaacattttcattattggagtatgtgaaactatatttagtttgttttctaagtagatattactagttttttctttttccttttttttcttttgcagtttacaaaaatttttttatcaataaaagttattataaaagagaagtatactaaacactattgtaaatgtttggcttactttttgtctgaagcttagaaaactaagccaattctatttcctgtctctaacacttaactctcacaaccagctaataaaatgaattttgtcacctgcatttacatgaggcacaactggaaacaggcagttatatctaacttctgccttctagctccagagtctgagacttttctgctatcccattcttattttcacgagattttcaacttttaatagtgtttctttggcactcacaaaattattatagtagatactttaaccgacaacattcttgaggagggaaagaaactagcacccacagagcaccagctgttctactaagtgtcttacctgcattatcttatgtgattcccaggcaatgctcggtgtcagtctcaatctcactatcttagagaagagaaaactgagactcagagaaggcatgacttggtcaaaatcatcagatggtaggaaggagagccagaattcaaaggtagatcttgttgttagcaaatatctcacttctattaaaccacaccgcccctcaagagcgcatggatatatggaacacagtagccatcaaaggttagttatcattgtcatcattatcattgacatcatcatcgtgatcatcatcatcatcataggattgaaaagatgatggcaaatatagagatgaacaaaaccagaagatagtgttgagcaacataagaagtcatgaagcatgcctaaattcactttatgagaatgtcatatagtaatatgcatatgtaaatataattaatcctatcaataagattaaaaattgtaacactcaatattggtaagactaaggtgactaggcactttcatgtactttcagtagtaattgatacatccttttgggaaagcaatttggtaatatgtatcagaaacccttaaaaaaaatggatcttttgttccagcaattccatttctagaaatctattctacagaaataatcaactattcaaacacacatatgtgtttcagcatgtttacttgtttctgtaatatcaaacattagaaacattctaaatttcaacatgaggaaaatgatttaataaattccaatcatctattagaaatgaatgaagccatcaaaaagaaatgacattattgggaaattctcatgatataatttaggctcatataataaagaatataaattttatatacaatatcgcacattttcaacaacagcagtaaaacttgtacatatgcctagtaagaagttgatagaaattcaagtaaacattgagaatgattgtttctaggttgggggattatggattacctttactttcttctttctgctgtcttgtattctctgaattatgtgcatatatttttcttatatatgcatatgcaaatacatatatattttaaaaattattaaagagtcacaaagaccatcattttctaaaaatatttattcatgagaagttggtttatagaaagggcattagttctagtgtaaatgttccwtttgtaatcttcacaagaatgaagtatcttagaattaatacaaatcgactttattctctacttctaaaaatccttaaacatatctgtatcaaaggtcttttaaacttccagcatggttttaactttgttaaattatcagttctttcaggcaagttatttatcatcttataatttgtgcaaatttgtatttgagttttaatcccaaaactctatactagatatgcgaccagaccaagttacaaatctttctaagtctcagtgtttataatctctaaaatcaaaataatatgaaaatctacctcctagtgttgatgtttaggttgaagtttaagacagaaaatgcatgaagaatgtgacaaatagcaaaaacttatcacaagttattatccattgttgttttatattccttattataacaggaacgtgggcacacaacaatgattttttgaagatgctaacgtagtattgaagtctaaatgacaggcatactcagaatgttgtgagtgagcttaaagttgaagaaaacacaagagaaaaccaaaaaagatgagctttcctttgacttcacttgacccgaatgcatgggggtgggattagagtggctgagaacagacagattttcactaagtcatttcaaatgctccttggactctcacatggaagcatgtctaaatgctaatacaatgtctcttctttcctattgcagtatccgtaccattctgatgttttgagacaatacagatgttttcccttgtggcagtcttcagcctcctctaccctacatgatctggagcaacagctgggaaatatcattaattctgctcatcacagattttatcaataaattacatttgggggctttccaaagaaatggaaattgatgtaaaattatttttcaagcaaatgtttaaaatccaaatgagaactaaataaagtgttgaacatcagctggggaattgaagccaataaaccttccttcttaaccattctacttgtgtcatctttgccattgagaaaagctatttcctatgacttcctgcatttttggtatcttcataatctttagtcatggaatcccagtggaggggacccttcacttgccctgaatatacacatgctgggctattgtgcttgtagtctcctgcatctatctcaattttcactgtcggcattttcgcctttttttttttttaataaaatataccgaattcctagggtaaaagctgtagtagggtaaaggatatactcatatttacaagtggtgaaagtccaagagttgtaaatccaggaaatttcttaggaactcaaataaaatgtcacatgttttcttacagtgaaggagaatgtttttctgacatttatactatgtctttatggtcaatatacaattgatttttaaaaataatagctgatttcatgcttcatatgactaaggtacaattactaattgcaaaaactgaactattcctggaattatgttcaaaaaatctataatttttgctcatgaaagtgcttcattggctaaacagtattagtttatggctataaacgattatttagataattgaaaatgggtataaagtgattcaaaataatatggtggctttaagtgtagagatgggatggcaaaagctgtgaacacagaatgtaaaattggtaactaagaaatggcacaaacaccttaagcaatatattttcctagtagatagacatatagacatatatatacacacatatacaaatgtatatttttgcaaaattgttttcagtctagaacttttctattaactaccatgtcttaaatcaagtatacaatcctagaattagtttaatattttgaatatgtaaagacttgtggtgcctatttgttaatgctttcccactctcaggggaaagatttgcattttgagctttatctctaaatgtgacatgcaaaggttattcctggtaaaggagttacagctgtctccaaaaatgctacttgttgcaatatctacattctatttcatattatgaaagaccttagatataaagtaaaatagccaaaatcgcgccaccacactccagcctgggcaacagagcgaaactccgtctcagataaaaaaagagacagagagagagagagagagagacaagggatagggaggaggctaattccaaaatgttggcctgacaacttggtgtggatggttggtcctttcaccaacttgtgatctcaagacattatcaggtatttgtggtgaagatggttgacttattccgttttgtgctgctataacagaatgcctgagactgagactgggtgatttacaatgaagaaatttattagttcacagttctggacgctgggaatttcaatatggaggtgccaacatgtgttgagaggcttcttgctacatcatcacattgtagaagataagagagagaacaaaaagaggctgaattcatctttttgcaatgtaattaaccccacccataatggtagagcctcctggcctacttctttcttaagttgttccacctcttaatactattacaatggcaaccaaatttcaacatgagttttgaaggagaaagacattcaagccatagcaatggttaagtaggaaaatggacttgagtttgaagttcctctaggattttcaaatgcagttgtttatacagtctggagctaaaaatgggaggtacaattgttgcaggaccaatgcttagtcatctttgtggaacaaagatatgtgatgccaattaataatggagttcttacagtctctttgttaacttttcataactgccataactgttggttaaattttctacttaaaactccttaatgttcatatccggagtagaaataaacataattttaggcaatatctggtatataggactttttaaattatattataccatgtttaaatgatacatcataatctttcataaattatgctagaccttgtttctattctataatcttttcgatttgaaactgaattgttcatttttaaataattttagcatgtagtatcacattttcagtttcttccatgccttcctacaagtcaaaatcttatcccaagtgacattcccatctctactcacccgtcttcttcaaatcatggaaaaggttccccaaattctctctcctttctgaagcgtctcttcgaagataaccctttctaaacatctcccttgagtacacataaaagtttactccaaatttgtgaaatgtacttgaaaaaataaacacagttgaagggagttaattgtataaaacatttcttcacacgtatgttagctttctatttctgagtaacaaactaccacacaattattggcttgaatgaacaccatttattctctcacagtttctacaggtcaaaaatctggaaacagctgaactagttgctccaactggagtgtcaacagtattagctggcctgtgttcctttctggagcttggggccctctttctggctcacattgctgttgccagaattcagttcccagtagctgtgggactgaggcttctggtttcttgctgaccgtcaacctgggaacaatctcagcatggctccctcagcacaccctctcatgctcccaacatattgactcacaaacccctcaagtctaacacaacagagtcttatataatgtcagataatcacaaatgtgactattccatcagcacttgttctgtaacacaacctaatccatggagtggctttcccatcatattcaaaggtttcatactcatttaagcataagggatcatataaggcatgtataccagggagctggaatcttgggagtcagcttagaattctgtctaccatcatgtttcaataagtttgggctgctatactaaacataacagactgggtggcttaaacaacagacatttatttctcaccattatggaggctggagagtacaagaccaaggggccaaaagaactggtggctggtgaaggccaacttcctggcctgtagacagacgccttccctctgtatcttcacatgactgactgaatgatcaccttgtgtctcttcttataagggcactaaccccattcatgagggtggaatcacctcccaaaagccccacctccagataccatcacattgggaattagagttcaacatgtgaattttggtggaatacaaacacaacatgacaatagaattcatgaggaagctctcaatgtcaaattcctataaattattaaagaatgtaattgacattctttaaagagttattaaagaaatttgattgtcctgcctctattcaagactttaacaaatattaggtaaagaaatttttactatggggcaagtggtttataaagttaagtgaatgtgtatatatatataggtctgtaatcaagtattccacagaagtgccttcatagttgctgaaacaggattatgggagtgacagacacagggctgaagaggacagggagaaaatgtgcatggttgtgagaatatattgctttgattctttgagttttcatgatatataaatacaaatacacagtggctcacccctgtaatcccagcactttgggaggctgaggcaggtgtatcacctgatattgggagttagagaccagcctggccaacatggtgaaaccccgtctctactaaaaatataaaaattagctgggtatggtggcacacacctgtggtcccagctactagggaggctgaggcaggagaatcgctccaacttgggaggcggaggttgcagtgagctgagatcattccactgcactccagcctcggtgagagagtgagactccatctcaaaaaaataaaaataaataaataaataaataaagtaggggattgacttcaatagtatcatgaaagtatttaaaatgaaattctgagcttggagaaaattttcaaattttggtataaacacataaactaaaaatatagataaggaaaaaatattttcacatatatgattgaccaaaaaaagatctttctaaaatcctagtgtttttgtttgtttgtttctttgttttgagatggagtctcactctgtcaccaggctggagtgcaatggcacaatctcggctcactgcaacctccacctcccaggttcaagtgattgtcctgcctcagcctcctgagtagctgggattacagtcgtgcaccaccacacccagctaatttttttgtatttttagtagagatggggtttcaccatattggccaggatgctctcgatctcctgacctcatgatctgcctgtctcagcctcccaaagtgctgggattacaagcgtgagccaccatgcccagccaaatcctaatgcttttctatttaaaaatagacgactcaaagagaaaatgaacaatgatggaaattcataggaggagaaattaaaatggccaaaaagcatattaaatgccattgagccttggtagtggtcaaaaaatacaaaataaagcaaaatgagatattactgcttacctattagcttacactgttggtagaaatgtgcactgtcctaggtttctgacaagaaatttgtgatatttattaaaatttacaaaatgcatgtcccaagcaatatcacacttgggaatcaactccataattataagtatctatgtgaaaggatacagaaacaaggctacttaccgcagccttacttgtagaagaaacaaaaatttttaaactatctgtttgattgacagaataaggaatgataactccctattttgaatggtaagtggatcttattaaaaaaaaaaaaacagggggccaggcgtggtggctcatgcccattatcccaacactttggaaagccaaggcaggtggatcccttgagctagggagttcaagaccagcctgggcaacatggcaaaaacctgtctctacaaaaaaacacaaaaattagccaggcatagtggcacccaactgttgtcccagctacttgggaggctgaagcgggaggattgctggcatccagaaggcacaggttgcagtgaaccatgatggcaccactgcactccagcttgggcaacaaagcaagtcctcatgtcaaaaacaaaagcaaaaacaaattatatcttaaaacctagagaaattaatatgatacattagaaagtataaacagcaaggtaaagaataatgtgtattatatgatccaattttgtgaaagacaaaatgaaacaaattaaaattcttatttattggtatataggtcgatatgagcatagagaaagatatagaaatgtacaaaacaggctgttcacctcagaaacctggatctgaaaagagttgaagaactaaagttaatttttgaaccataactgtttcaaactaacattatgtaatttctttacatactattcttgaaagtcttgaatagaggcaggaaaatcaaatttatttaataatttcttcaacaatgccaatcacattctttaacaatttatagaaacctgaaatcgagattgtcagttatgatgagatttatgattttattacttttttaccttataaaaaattgtaatgaaagattcgagctgccaacatgtatatgtaattgtgaaataatttaaaggtactataattgagattttaattactttaaaaaacttctggaggaggttccaagatggccaaataggaacagctccaatctacagctcgcagcgtgagtgacgcagaaaatgggtgatttctgcatttccaactgaggtaccgggttcatctcactggggcttgtcagacagtgggtgcagcccatggagcagggtggggcatcgcctcaccagggaagcacaaggggttggggaattccctttcctagccaagggaagctgtgacagatggtacctggaaaatcgggacactcccaccctaatactgcgcttttccaatggtcttagcaaatggcacaccaggagattatatcccgcacatggcttggagggtcccatgccaacggagcctcactcattgctagc

SEQ ID NO: 93853 - DNA, 28258 bp, Homo sapiens
tatattcttttattgttgaaattgtggaattcatgccattttttattattttaaattattatataatattttttctccatcatgttaaaatgattattggcatagcattttcttataccagtctataatatttcactaaaccgtttgctgagcattaagtttttttagtttggtactcagaggaagctgccaggaatatgtgtacaactttgtcttttggcttttctcagattatttcccaaaaactttcacagggagagatatgaacaagcatttccaacactctgtatatatgtgttttatgagagaattaggaccaagttggaaaaatattttctaacccaagggtagaggagacaactttaactctctcaccaactttggtttcaatgtcaaagtgaaatgaatacttgatttgtggtgttggatttgggtagattaaacatacggccctagaagcttagactttttgctcctcagcctgcctcaacctcacaatatttgaaagatgttagactatggaactgtgagaacaatcctgtattttccttatccaaatatatttaaataaatattaaccacattgtcttgccaagtcatttggccaataaaatgaggaatttgaagagtattgcttctgagctccttgccagttacagtgtttttcctcaagccttgtgcagtgtggagctatcattcagggtagatagccgaaagtcttactcaaactctttccagccccactcctttttttttagtggaaagaatatgggcatcagacagatgtgacttggcattctgcctctgccatttactagctttgtgacacctttgaaaatgatgtggctttctacacctgcataacctcaaccctctggttttcactgattgcttcatggccagacatcagacccaggttggacccctgactcaactgtgtgatcgagagactctagctaaaagatagaagagtcagggccagagtgtactcagaaagagaaaaagaaaaagagagaagcaatgaggagagacagcccctgatgtccagttgctcaagatataccacccacttcttgtcctttgatgtttctgtgactgtctgttatattatactataaaactcattaacactagcctgactgcagttctgttcttgaagccaacatctctgacttaaaaagcacatttagagatctacaacttttgagcttctcttacctcatctataaaatgagactaataataataccttccttgtatgattgcactaaggattctgtgtaacaatgtgtggaaaactctgagttctgaaaacatagtaggtgctcaataaattatggccattaacttcctgcaaatttatgcctcataaataaaccaccaatatattaggaattcaaattatttctgataccctaccatgtctgtccatcactctgtaaacaggccaatccaatgagtctttcaaattggttgcaacaggtgaactccttgatgttatccagactaagtagctagacttccttcctttacactgctctccacaaagtgggtgagcagagtgatggcgattttctagaagtgatgcctactcaatcaccataagaccacaatgaggaaatgaaaaacctttctcacctctctgataggtggagtagtgcacccctagcaggactctctacacctgcataattggtgtagttagaaacagacaataatgttgttcctttgacaattctagaaaaatatagtttatgtatatatgttgacagactacatccaattgaatagttaaatgcattgtagtcctcaagtcttggtagaagacttgagatttattttttttaaatcaaactcgtattcacttatattcatggcattaaacaaagaacaatggagtgcccaagtgagttttttggtctgtttgccaaagtgatcacttttgtttctaaacatctctctacaaagccttcttcctctaagttctttgatcagaatgccctgtacctgacacagtactacccagataggctgacatgcctactgtgtgcctttttcctccctagattgagagcttccatttatggataataattgtagctaatatttgttgaagattctcctatctgccatagatgctttacatggattatttcattaactcactaaacaatcttttaaagaggtgctactgtgtccagaattagttccttctggtgggttcttggtctcgctgacttcaagaatgaagccgtggaccctcgcagtgagtgttacagttcttaaagatggtgtgtctggagtttgttccttcagatgttcagatgtgtctggagtttcttccttctggtgggtttgtggtctcgctgacttcaggagtgaagctgcagaccttcgcaatgagtgttagagctcttaaaggtggcacgtccagagttgtttgttcctttctgtgggtttgtggtctcactgacttcaggagtgaagccgcagaccttcacagtgagtgttacagctcttaaaggtggcgcgtccggagttatttttcctcctggtgggttcgtggtcttgctggcttcaggagtgaagctgcagaccttcgtggtgagtgttacagctcataaaggtagtgtggacccaaagagtgagcagcagcaagatttattgcgaagagcaaaagaagaaagcttccatggcatggaaggggaccagagcgggttgctgctgctgtcttgggtggccagcttttattcccttatatggccctgcccacatcctgctgattggtccattttacagagtgctgattagtccattttacagagtgcttattggtccatttttacagagagctgattggtgcatttacaaacctttagctagacacagagcgcagattggtgcgtttttacagagtgctgattggtgcatttacaaacctttagctagacacagagcactgattggtgtgtttacaatcctttagctagacagaaaagttctccaagtccccacctgacccagaagcccagctggcttcacctctcaatcccccatctaaacatgacaccccaactgctgttgggaattgggcgatgactgctctagctaattcctgctggataggagcgaagaaggggccctgcagttgtagtgtcctccagaggggaactctttaggccagtgaaagggccagtgggttggtccaggggtcctcagtagaagttgagctcatttggggttccatttgtaagaccatctgtagcttgacggcctcgattctagaggaaacaaatttgacaaggaggttaaaaatacagggcctgaaggcgagtaatagcaaatggcagccacgggacctagaaaggggagaagccatgttgcccaactccagaggttggtataagagtttgaaaggcattgtctgatttcagaagccttttcctgtaaatgctgggaggcatctcgtactatccctgattggttagtgtaaaaacaacactcttcccctaagaaggtggagagtcctcctttctcagcagtgatgaggtctaggcctcagaggttttggagtgtcactgctgtcaaagagtctatttgggattgtagagtaaggatagatttcactgtttcttgtaaactgagagatcccttgagagtgtgtggtagtaggataatacatgttacactgttaacttttagcaaactttacttttgttgaaaaacttgtaagtttgggatttcaattattctttgctattaataagacctcgttcagtccatattaacttagagttggtatagatggctccttcctgatactgtaagtactttaaggtttggctgagtgcaaaacaactcgcacgttcgaacagaccaattattaggcaattttcctaactctgcttctacaagagtttccttattacctactgaatacccattgtgtctttttcccttaatcaccctggaggaaacatctattgtcctgttctgagttcctcctagatctggtaggaactttgtatggtaattaattaagatttagatcccctgttaggaaacttgttggtttaaagatttttgataggaaggctacaggttgtcagtggcctcagtgctgtcgggctactcccttgtttacactgacaacaaaatggtattggagtgttatagggttacagagaggaccttcaattatcaattataggttttaaatttaccctggcttttaaaggaatagagtacactattttttctttactacttctatctctctttctctttgacttcttctttgtctctctctttctgactcccttttttgtctgtctctccctctctgtctttgactttgtctcttactttctttctctctgactccctctttgtctctcttcctctctctgtctctctctttctgactccctttttgtctctgtctcttcctctctctctctttctgtctattgagaggtgaagccagctggacttctgggtcaggtagggacttggagaacttttctgtctagctaaaggattgtaaacacaccaatcagtgctctgtgtctagctaaaagtttgtaaacacaacaatcagcactctgtaaaaatgcactaatcagtgctctgtgtctagctaaaggtttgtaaacgcaccaatcagcactctgtaaaaatgcaccaatcagtgctctgtgtctagctaaaggtttgtaaatgcaccaatcagcactctgtaaaaacggaccaatcagcactctgtaaaatggaccaatcagcgctctgtaaaatggaccaatcagcaggacatggggtggggggggccaaataagggaataaaagctggccacccaagacagcagcagcaacccactcaggtccccttccatgccatggaagctttcttcttttgctcttcgcaataaatcttgctgctgcccactctttgggtccatgctacctttatgagctgtaacactcatggcaaaggtctgcagcttcactcctgaagccagcaaggccatgaacccaccaggaggaacaaacaactctggacgtgccatgtttaagagctgtaacactcactgtgaaggtctgcagcttcactcctgaagtcagtgagaccatgaagccactgggaggaatgaacaactctggacatgtcacctttaagagctctgacactcactgcgaaggtctgcagcttctggacacaatactattcattctcaccttaaagacgaggaaactaaggcaaagaacagtcaactaataagtccaagtatacagagctgctaaggaatagtctgtctgatcccaaaggctgtgtcataaccgcttccctatactgcctctcagcagaggtaagagtcaagttttatttatcactgccaccccatcagccccagcttagtgcctgacacagggagatgctcaatcaatgctgattgttattgagtggactagaaatgcaaggcacagtgagcccctttgctgtgactgatggggtgtctgattttctgctataaagaggagagtgctgtatcaaacacactcctctggctcctagctctctctgttccactttgtttatccaatttccctactcctccttcgtaactgcaccatgtggattcaaaattgcagcttagtgcagacaaagggaaaacggaattctgaatgaccccaaagggaaaactgaactctgaatgacccctgtgggtttgagagaagagaagcaggaacttgagagaggaggaagagagaaagtaattaaaatgtatcgttttaacttaatatttaaccgaatgatagcaaaatcttatctgaaattggaaaagtcaaggttttgagtgctggttcggtgcccatttctttatgatttgatagtctgagaagaatacgacgggtgtggcttaaaaacctagatcacgtgtgtagttggaattgggtgttatatgagcaaacaaaataaatacctgtgcaacatacctgctttatgcactcaagcagagaagaaatccacaagtactcaccarcctcctggtctgcagagaagacagaatcaatatgagcacagcaggaaaagtaagcaaaaaatatattactgttgataatatattctcttcaatataacaaataaaggaatacagtattaataatgaataatttaaaatttaaaattcatatctaaattagatgatgaataatttaaaattcatatctaaattagaaatgatacactggaatatgatatgcaatatatgctataatatgtaatgtatactgaactacagtggaaataagctattcctaaataccttcaaaaagaatatatagaatctgtatctattgtctttatttcctacattaaataaatttgccgtaaagtgatagtttattccaagctaatcatgactgatttgtaaacctaaagttagaaaagtctttaatcagaagctatctttatattaagaaagcataatttaaatgtgttattatttgtattcatattttttgtgaacacaagaagttaagtctgacaaaacttttatgagagggatttgagaagattttgaaatatacttttaatcttactataaaatatcttacaaaatactcattgatctcacagcattagaatcatcaaggttaagcaagacatcacattcaaattccgtttaaagggggcccattatgacacaattcaggcaatttccacagaaatcttatgsaacagtatctcccctatataaaagtcaatatgatcttacagaaaaataataatgcaatttgaatcacttattagcactcagaacacaaatatttgttttttcttctataaatttatacttatttttcaatgtgtttacaggtgcacagaaatgcatgtggtcattcaatataatcaattgatattattaattgcctaatttaaaaaaatctgtgcaactatttccagccatttgttgtgctaggagtgtatcacacaataaaamacctcactatgataattcagtttaaaggttctgaggcttacctttatgctgtgcgacaaaacaggctcatgtcaataagactggttggaaatcacatgagtggcccattggtactgttcttacaccacttcactttactttactttcattcattattgattaatatttacattcctcatagaaaataattagaaaaaagaaaatttaaatttaccatttactaaactcgacttaaaagaaataatgagttcatagagcaaaagtataaaccaatcattaatgaaaataataactgatgaaatagataatcctcccctcttgagtgcaacatcaataacttagctttttgacagcatttcatttatgtttacccgtcctgcattttattttcctcaatcctaaattgtgacaatactaatgtctatttcataaggtagttgtgagaattcagtaaattaatagtgaaaagcacttagaatagtacctggtaaataaaaataagtcaataaatattagccactgttattattgttgctttataactttttgatatttactaccacggagtacagaaaacgtgaggctacattaattttttcattcgtttttttgtttggagatggagtatctttctattgcccaggttggagtgcaatggtgatctcggctcactgcaacctctgcctcccgggttcaagtgattctcctgcctcagcctcacaagtagctgagtttacaggtacacgccaccatgcttggctaattttagcatttttagtagagacagggtttcaccatgttggtcaggctggtctccaactcttgacttcaggtgatccgccyacctcggcctsccaaagtgctgggattaaagggrtgggcaactgcacccggcctgatctttattctctggacagccagctttgagacttcaggaaaattattcaatcactgagtcagttgatcctcaattatttcagatgtagtaagaccaataattcaatagtactgtcctggtagcatccgttttaggtttaaaagtaattcatattgtttacarcagcacaatttgcaattgcaaaaatatggaaacttcctaaatgcccatcaaccaacgagtggataaagagaatgtggtatatgtacaccatgagatactactcagccataaaatggaacaaaataatggcctttgcagccacttggatgaagctgaaggccattattttaagtgaagtaactcaggaatggaaaaccaaataccatatggtctcacttataagtgggagctaagctatraggatacaaaggcataagaatgatatagaggactttggttagggataaaagactacacgttggatacagtgtacactgctcgggtgacacatgcagcaaatctcaaaaaccaccactaaagaacttatccatgtaatcaaaaacaacctgcaccccaaaaactattgaaattaaaaataaataaattttaaaaataaaaataatgcatgtaactcactcagcacaagccacagtgcacctgtcacatcataggyacctgacaatcagaaactcctactattagaactttatttccaagtattcygatatttattttggcatggaccacattgaaaatcctgcaaagttgaaggatttgacaaatgaataatgaaaattaattggcagaagatgaaatttcaattgaatttttattatatttgcaattatgttgattctgtaaagaaagagctcagtgaattgtacatgctttaccacaataaagatgggttttacagtacactgccaagcactggaaatatgtgatcagcttttatttttaaggacatctgtggataagcttgctagctagaaactcaaatacacagtttctccagtttttaaatacatgtgtgtggtctgaatgcacacacacacacacacacacasaaacacacatacacaacaccaactctaacctctgtaattttgggctcaaatctaagctggaaggagtctctgcacataaattagatgaacaaaacaggctgccaaagctaagtttcaaatgggtgtttgagacaagtaacacacagaagtggagagagaaaattaaaagaggacaataggcaaatagagaaagagacatcatcctaagcaggaaggtaaatgtataactgtttttatggagtcagatccttttggcctaagcagaaaattgagcaagaaagcagtgtattttggacagacactgactctgtcagcaaagtaaaggtgacttagaacatgtaccagccaatasttgtrggtaaacagttgtcttcaggacagtgttagaaaatatcaggattaaacatctttggagaaaaaaaaatcaaaagaataaatggtgctgggaaaactggctagccatatgtagaaagctgaaactggatcccttccttacaccttatacaaaaatyaattcaagatggattaaagacttaaacgttagacctaaaaccataaaaaccctagaagaaaacctaggcattaccattcaggacataggcatgggcaaggacttcatgtctaaaacaccaaaagcaatggcaacaaaagccaaaattgacaaatgggatctaattaaactmaagagcttctgcacagcaaaagaarctaccatcagagtgaaaaggcaacctacaamatgggagaaaattttcgcaacctactcatctgacaaagggctaatatccagaatctacaatgaactcaaacaaatttacaagaaaaaaacaaacaaccccatcaaaaagtgggcgaaggacatgaacagacacttctcaaaagaagacatttatgcagccaaaaaacacatgaaaaaatgttcatcatcactggccatcagagaaatgcaaatcaaaatcacaatgagataccatctcacaccagttagaatggcagtcattaaaaagtcaggaaacaacaggtgctggagaggatgtggagaaataggaacgcttttacactgttggtgggactgtaaactagttcaaccattgtggaagtcagtgtggcgattcctcagggatctagaactggaaataccatttgacccagccatcccattactgggtatatacccaaaggactataaatcatgctgctataaagacacatgcacacgtatgtttattgccgcattattcacaatagcaaagacttggaaccaacccaaatgtccaacaatgatagactggattaagaaaatgtggcacatatacaccatggaatactatgcagccataaaaaatgatgagttcatgtcctttgtagggacatggatgaagctggaaatcatcattctcagtaaactatcgcaagaacaaaaaaccaaacaccgcatattctcactcataggtggaaattgaacaatgagatcacatggacacaggaaggggaatatcacactctggggactattgtggggtggggggaggggggagggatagcattgggagatatacctaatgctagatgacgagttagtgggtgcagygcaccagcatggcacatatatacatatgtaactaacctgcacaatgtgcacatgtaccctaaaacttaaagtataattaaaaaaacattcaaaaaaaataaaataaaataaaaaagaataacctaaatgaatatattccattttatctaagtgccttattgtacttaactytgtttatctttccttatgttattgcttttttaaaagatactcttattctctttataaaccagaggacttcatttctatgcaacacttgttaggtgccagacatgggactcaatgttgcatgtacaaagatgaaaagacacaatttctgactgcaagcgtgggaaaacactggtaccatctctctgtctgatgttctaggtaatcaaatgcaaagcagctgtgctatgggagttaaagaaacccttttccattgaggaggtagaggttgcacctcctaaggctcatgaagttcgcattaaggtgaaatactttttccatttgtatttaattttaagtttaaagaatkcagaaaatattaaaaatagaaacatccaaaatccactagaggtattttttatataattatccagaaaataaaattacatttgttgtcaaggaaagtataaattgttaaatttttttaaagtgggcaaacagtatatgaaggataactccagtgaaatacaaaagaatttataggtttgtacagaaaaaaatgcaaagggatatatatcaagagttcacaatcaatttgcattagatattttcttggtgttaatttgcaatttctacttctttttcttttaactatgcattcttctatattatrcaagacaaaaattttaggatcaattatctcacagattattctaaattgttaaattcaagggaaaaagaggaaggttttagactggataaccttggagataaactgaatctttcatatttgggaatagtagggattatcagcaaaacccttgagaatatttttgaataacaattttagaaaattgggtttgttaagtccatctgacagtcataatcttttctgaatctaaacatcttctctttattctgtagatggtggctgcaggaatctgtcgttcagatgagcatgtggttagtggcaacctggtgaccccccttcctgtgattttaggccatgaggcagccggcatcgtggaaagtgttkgagaaggggtgactacagtcaaaccaggtacaggrttcacactcagggaacatgcctkrgttcaccatcacaagattagtcagcctggatgaggaaaccgaggcaatgaaagacgaaaggacttgcacaaggtcacagggmagctgggacttcaggggtttcctccttccctctctgcttgcctgactcaagcatgtatgacttcaggcaggcatgcgtgtattctacccttcaaccattatgtactactagatgccaggcactaggttagagcctggagatatatgaggatcaaaagagacacagtgcctaccagtgtggaattcataatctagtaacttccacgttagtgttagctgaacactgtcttctgtaagtgcccaaaaaactataaatgggaggggagaaaaaaaaacataagtatggacactgttctgtgctgagttcacaaaatggaggctgcatggttayggctgaagaaacatgacctttccttaggtgacctatgcagctccttyaccratttcctcttccaacatggtctctcttcctgagcatggaatcaatgaaactgactaggtgaaagaaaatgaaagaaacatagcaggagccatccaccatcaacaatgtctgccttattacctttggccatgcttaaatgtgactgattatggattactaattattttatcttcaatatttattttacctaatcttattatgtattaatataaatattactatattaattaaggatgaataactaggrcatttccataccatcgttttcatatgaactttacccataaaatgttatrcaccaatcatttttyttggtcttgtgaaatagatagcataggtgattaaaaataaaatttgtctttaaagaatcactttagccaatggattcgacctgtccacttaccaagtactaatttagactgtgaaaakaaaataataaaataaactgtccaatttgagttttagctctatttcctttactcagaaaaaaattaatatcaaaaygactgccttatttctcacccctcctccttccaccataacagtaaaaatagataattcacaaattaccagctaaaaacacttgaaagtcaattcttatcctaaaagaaagtgtctaacttgttgtggaaggtagaaattttcagacgaatttctgtaattcttctttgtcctatttttgttagttttcctcaaaaaagaactaagatctttttgaaaacattcattttataatwaagataaacctagtctctttgaaaagccaagacctatgttaaaaatctcatttttgttgtaaatcaaattcttacaaaataccagatcttcccaacatctactrggactaaaataggctactttcaactaaaatttatatgtatacttacagcaaaaatatttagttaagatttaattagacaaggattacataaattatatctgcaaagcctccaggataaattagtgcactgygtaaaattttattaacacagttgatggaatttttttaatccatcttgtttcccacacttgyattttctctttaggattcttcaggcacttataaacccaaactaaaaaacaakgccttggcaggcaatgacaaatgacatagttgtgactagaccctatttcttagaaacttttcagacacataattctaatctatacatgtgagcgttaagtytttgctctattaattcctgcatagaaatttaagaagaatttgttttattcctctgcaggtgataaagtcatcccgctctttactcctcagtgtggaaaatgcagaatttgyaaaaacccagaaagcaactactgcttgaaaaatgagtaagyttctgatgctttctttgcacagactttgagtttgcacattagttatggtcctgtctcatgcctttgtgtgtctttgtattgcactgcccagtctaggcaatcctcgggggaccctgcaggatggcaccaggaggttcacctgcagcgggaagcccatccaccacttcgtcggcgtcagcaccttctcccagtacacrgtggtggatgagaatgcagtrgccaaaattgatgcagcctcgcccctggagaaagtctgcctcattggctgtggattttcgactggttatgggtctgcagtcaaagttgccaaggtagaaatgacaatggatgataaaaccggttacacgcagactgtcaggaaccaaaagggaakcaatttcttgcaagaatcagaaattatttttgtagatttgaagtgtcgattaagagtagaaaaatgacccagaaagaactgagagcacaggctagaaatttcaccaatttattgcagataaaaacttgttaagaaaatgtaaagatgtcattttcaataatttttcttctgaatttgctgtttatgggatcatgaaattttagatctgtgaactaattcatgttgtaattcaatcaacaattagagagcacctatacatacctcaggcaccataggttctgctaggctctgacagcaaaagtaaatgaaatgaagcgtttgcccttgaggascakctagtctgtggatcctctmctcccagaattaggatcaacagtagagtccaaaaccttacytgatgcacctcgaaaccaaggctcacccactctgtggattcttagacrgaaagtaataaagactcagtgatgcataattcactcattatgacatttcactgctaaaactaactcccctggcatgaacacacatatgtattcagaagtggtaaatttcaagcagaaattctttaaaggctcctcatctgagtagactgaaaatctagtagtatgytttattttatgaaacctagatckagagatataaagatatttgcccaaaatctgacttctgcttaatatgagcactaagactaaaatatcttttacaaatctcctgctgaatstcaamtcacaatccataattattagcacttttaaaccacagtcacaaacaagccttgtatttttctaagtaaggtagaaagtggtgttgtcccccatagtattgaataacacttggtgaatgaatgagtgaaatagacacccttaagggaatataagaatgagattatttggaacaggaacagcatgttacccaaaacgaaggctgactatgggagactaggtttagtaaataaccgctagccaatttacacaatttagaggacatcttttccaaatttcggtgactttrgcacttactcccttgttcaattgcctcatctattttaatgggtagtctaagtgagcctacccaagaacagaagctgaggatactcataacaacagattttatttattattaaaatatagactaatgtttcattgctgtgttgttcacaagtgtattttttaaaggagggatatactggtcacgactactgaacaaaaatgaagaaaggagttaattattgagagttaaagtggaatatttttcagtctcctggagtagccttttccacttattttattttccgaatattgccttggtgtatgtatgagatactgaagctggctatsaagggatttcagcaattgagagtccctacaagattgtaatcactgtcatctggatctcaaagatcatccagtcccctggttcccagcctgacccattggagtcccttgaggacttagttccacctgcagagattctcatttaattggcatgggctatgacctggactgtgggatgtttttaaagctccccagatgaatctaatatgcagcagtttcagaaytactcaactaattcaaccccttgaatttaaacatgaagcatttcaagccaaaacaggtttcgataacagattggacagaagagtctgagtagttcttgataacacacaagacatggcactttataaagcttaagcaatttctaacaaacattatttaattcatttttgcattttctgaaaacataggtcaccccagggtctacctgtgctgtgtttggcctgggaggggtcggcctatctgttgttatgggctgtaaagcagctggagcagccagaatcattgctgtggacatcaayaaggacaaatttgcaaaggctaaagagttgggtgccactgaatgcatcaaccctcaagactacaagaaacccattcaggaagtgctaaaggaaatgactgatggaggtgtggatttttcgtttgaagtcatcggtcrgcttgacaccatggtatgatccrtgacatgccctgaaatttctgcctctgcaacctggaggatgcatttaggcagtagaatatacgtattatgtataaaggatatttttaatgatgaatggaaatttcccrtcatctttttgttacctggcttgtttaatttattgttatgagaagtcttccattcratcagctaagcaaacstgtctcaagtcatatttcctcgagaaaagaaaaagggcttgtttttyttaacacagccactacaaawatgctttattaatttttagtttaaaatgcaaacttaaatatatataaataatacaaatcattttctcaaattaaaaagttttatttttcttttacattcttaacaaaaatmttttaacaattttatgtatgctcttaacgaattccaaactttttgacatagtattcttcggtcaaaagaaatgagcaattttagaccaactattattttattaacagaaaatatgccctaaggaaagtgactgctttaatacattgctatattttatcacagcaacwggrcagtgcctgacacaaaactagtacccagtaytacttggactgaatgctttaaataaagtcaacagattttaccacccgcaaaagttaagagctacatatctcatggcattgtttatgaaacgcatgagacaatgcatgtaaaatactttgtgcaacacaacycatcrtgtggttagcttccaataaatgtcagcwgcccccttttttattttattttatttatttatttatttwtttttttttttgagacagggtctcactctgtcaccaggctggagtgcagtgatatgattatggctcactgcagccttaacctcctgggcttaagtgagtttcctacctcagcctccraaagtgctgagtacagacatgagcaaccatgctgagcctcagttggcattattgatatgaaatactatttccaatcttgcagtgcttatgtcatctttgaattattacatgatattactttcaaacagttacaaatatcaaaggcaacggaaacatatctctagctatattttacctatccagaattatctagactcctactgaaaaagtctccagaaacaaaaaagtttccattgctgaggttttctagaaggtccagcagtgtgggtaacagggagcagcaccctgagatcaaagttcccrgcagccttgacctgggacaaatgccacagaggaataaagtatcaagagaatccaattttttccagggctatagcttttctccttatgctctttttctatatcttcctccattttctcatgtggaactggagtgtacattatctcaagacaccaaatgtctgacagccacatgttctgaggatgtcagtctcccaaagatcagaatccaaaaycaaagaactaatcattatatacctagagggatcctaaaccattttctaactacagaacatgttccaaaagctgactggaaaagattttytgaactgtcttttgaggttcccaaataatcagtgtaatttaatgtaaaaycaatatacatttggggaggtaaaaacaatgtttaaaacatgtccacttgagaaatggacataggaatctgttaaaaagggaggctatcaagtggacaagagactaattttggtgatatactcatttatcttgttcatcatcaaaatatctgattcaaagtattgggttcaaaatacctatgtaataaatcaatgaaaaaggaaccaactcacacattgcctaagaatgatgtacacttgtacaaggaacaggactttatatatgtttgtaatgatgtttgcctctttattcctttattaggaagaactaagggcacacaaatttattcgtccatgctttcattcaaaaaccattttctgggcatttsctacatccacagcattatcctatgcaaagaaagggggaatgaaggagcaaaagacatgatctcttccctctacacactcacaatccagytaagcctattacatgatattgtgcattatgagtatgaactatgccactccacgttaaggatactaaatgttcactttattccagatggcttccctgttatgttgtcatgaggcatgtggcacaagtgtcattgtaggggtacctcctgattcccagaacctctcaataaaccctatgctgctactgactggacgcacgtggaaaggagctatttttggaggtatgtagttaggcttcagagccaaattctcattaacctaagaatttctctccttttatgagtgacaaggcaagtttttgaaaagcaatgaaattaaaaataaattaaaatttcttttctatagtctccaataatgcagaacttttcttttttattttttggagatgaagtcttgctctgtcacacaaggtagagtgcagtggcgcaatcttgactcactgcaacctccacctcacaggttcaagtgattctcctatctcaacctccagagtagctgggattacaggcatgcaccactgtgcccagctaatttttttgggtagagatgagggttcactatgttggccaaggtggtctcgaactcctgacctcaaatgatctgcctgcctcggcctcccaacgtgctcgtgctgggattacaggcatgagccatcatgcccagccccaagatagacttttctgatgtcactattaaccaggactttcatctccacctctttttgtacttgtgactgygtaaggcaaggaaatttctagtaggccatggaaatatataacaataaatcatatctacacaaaaatctagacaactaataaatttgctccttaacyttgggcataacatctgtactataatttctctgtgagagagagaataactaaggacccttgtttatctgtgattttttttgtsaaagcactgtaaaagcatattgaagtactctatctcttattatcctcagttatagcagtctggaatgcagcactttttctaaactttcatttatttggaaaatcttctcttcaattctcctacttaccctggttgaatctatcaatgatattttcttcttttcaggctttaagagtaaagaatctgtcccsaaacttgtggctgactttatggctaagaagttttcactggatgcattaataacaaatdttttaccttttgaaaaaataaatgaaggatttgacctgcttcgctctggaaagaggtagattttaagttgtttttttgttttgctttgtattctacagtagcggcggkgggssgggsgttgtctagcagagaatgaaaaggtggaaggatgaraaaaaattacagtgccttggttttccattgccagttcaatctttgcatggagcacatgtaaggtaatactgtgagaagctaaaaacagttgctttgcatttcctattctgctgaaggcaaattatgttgattatagcataactgaatgatcagagtcattcagccttctttaaaagagaacactcactttggcccccatccccctccaaaaaaagtttaagcaaccagaattataacatggaatcactgacacckctgcctgtcatataagtaagtgtgacatctaatgattgtatattaaaattattttcaggacatcctcagcatattcattatgggagtaggtggaactacattgrgattgatttctaagtagatattactagattttcctttttcttttcttttctttgcagtttagaaaaaaaaatttactaagaaaagttgttgtaaaagagaagrgtactaaaccctattttaaatatttgtcttacattttctccaagtcttagaaaaataagccaattctatttcctacctctaacacttacacttacaatcacctaatataatgaactttgtcacttgcatttatatgagacataactggaaataggcagttatatctaatctctgccttctagctccagagtctgagatttttctgctatcccacacttattttcatgaggttttcaacttcaaatagtgtttctttgaaactcacaaaactatcatactagatactttatccgacaaatattcttgaggaaggaaagacactagcacccrcagagcaccagctgttctactaagtgtcttacatgcattttctcatgtgattcccaaacaacgctcagtgtcagtctcaatctcattatcttagagaagagaaaactaagaagcagagaaggcatgacttggtcaaaatcatcaggtggtaggaaggagagccagaattcgaaggaagatcttgttattagcaaatmtattcactttctattaaaccacaccrcccctcaagagtgtgtatatatatatatatatatatatatatatatatatatatatatatatataraaaacagtattcatcaaaggttaattatcattgtcattattattatcattgacatcatcatagaattgataagatgatggcaaatagagatgaccaaaaccagaagacactattgagcaacaaaagaaggcatggagcatgcctaaattcactttacaagaatgtcatatagtaatacgcatrtgtaaataaaatcttatyaataagcaaagaataaaaattgtgatatcaatattggtaagagtaaggtgacttggatgctttcatatactttcatagtaattgatacatccttttgggaaagcaatttggtaatttgtatcagaaacctccaaaaaaaacctagatcctttgttccagcaataccatttctagaaatctattctatagaaataatcaactcaaacatacatatatgtttaagcrtgtttatttactatcagtaatatcaatatttagaaacattagaaaagtccaacattaagaatatgatttaataaattcyaagcaactgttagaaatgaaaaagacttcattggcaaattcttaaaatgtaattttaaactcataaaataaatcatataaattgtatttataagatgatcccaaattttcaaaaaggacaatagaaagtgtatctgtatctagaaaaagctgatagaattcaagaaaacattgaccatgattactccgaggtcgtaagattacagattttttttagcggcttcttctgtcctgtattctctaaattatgtgcatatatttttcttatctgtgtatatatatacacacaccacacacacactatatataaaattctcagtcgcaaatatcwtcttttcttaaaagtgttcatcaaaagttggtttakagaaarggcattaattctagtgtaaatgttacmtttctaatcttcacaagaatgaagtagcttagaattratacaaatcagctttattctctacttctaagaatccttaaacatctctgtatcaaaggtctattaaacctccagcatggtcctaactttattaaattatcagttctttcaggcaaggtatctatcattatataatttgtgcaaatttgtatttgggtttgaatcccaacaccctatactagatgtgcgaccagagcaaattacaaatctttctaagtctcagtttttatmatctctaaatggaaataatatggaaaccaacttcctatcgtcatkgtttaggttgagatttaagtgaaaaaaatgcatgaagcatgtgacaaatagcaaaaacttattgcatgttattatctattgttattttatattccttattataccaggaacktgggcacgccaaaatgattttttgaagatgctaatgtagatctgaagtctaaatgacaggcatactcargaggttttgagtgagcttaagattgaagaaaacacaagagaaaaccaaaaaacatgaacttcccttcacttgacttgacccaaatgcatagggatgggaakggagtggctgagaacacagagagattttcactaagtcacctcaaatrctccttggactatcacatggaagcatgtgggttgtctaaatgttaacacaatgtctcttctttcctattgcagtatccgtaccgtcctgacgttttgaarcaatacagatgccttcccttgtagcagttttcagcctcctctaccctacatgatctggagcaacagctaggaaatatcattaattctgctcttcagagatgttaaaaataaattacacgtgggagctttccaaagaaatggaaattgatgggaaattatttgtcaagcaaatgtttaaaatccaaatgagaactaaataaagtgttgaacatcaactggggaattgaagccaataaaccttccttcttaaccattcaacttgtgtgccatctttgccattgaggaaaaatatttcctatgacttcttacatttttgatatcttcataattttcagtcattgaatccagtggaggggacccttcacttgtcctgaatatacacatgctgggctatggtgcttgaagtcttctaactctatctcaattttcactgtctgcattttccttttttaaataaaatgtaccaaatccctagggtaaaaactacagtatggtaaagaatagactcaaatttataagtgaagaagatccagaagttctaaatccaggattttaattagtaactcaaataaaatgccacacattttcatacaatgaagggaagtgtttttattgcttttatgctatttgtttacagtgaaaatacaattgatttttaaaaataaaagcggattttgtgcttcatgtgacaaacttaggttcagacactaaatgtgaaaactgaactattcctagaatcatgttcaaaaaatctgtaatttttgctcatgaaagtgcttcattagctaagcagtcttagtttatgattccaattgactgaaaatgaagtataaagtaatttaaagtattatggtggctttatatgtagatattgggtggcaaatgctgtgaacacagagtgtaaaattggtaactaaaatggtaaaaactcctcaagcaatgtgttttccaagtagacacacacacacagatgtatatttgtgcaaaattgtttttaatctggaactttcctattaactaccatgtcttacatcgtctatgatcctagaatttgtttaatattttgaataggtaaaggcctgtggtggccatttgttaatgcttttccactcttggggaagatttgcattttgagctttgtctctaaatgtgacatgcaaatatgattcctggtaaaggagttacagctgtctccaaaaatgctacttgttgcaatacatacaatctatttcatattgtggaagaccctagacataaagtaaaatagtctatcatttactgtgtgaccttcagtaagtcactcaatctctctgagcttgttcatcctttgttttgaaaaaagtactcaaccagcccattacagctttaccgaggctaaatgtgatgatattaatgaaagagttttgccaactgggaagggcatcctaaatgtagagaacatgtgattgtttggtcaaaaatgctgaaggagatactcagggtcaagacacttttcagcatctccctaagataacatcatgggataccacctgttgctgggtgctctgtggcttttacactgatgctgatggtgtgagatccagaaaaacaagaagcagttctacatggccaccccacaacagggtcatcaaatcctgccagtgacacagaggctgacatccagctcccaccctccttcctcccaggctaggggagaaggtagagttgagggcattaggtgggcactgccagtgttgttatagagtggcacagtcctccatggggtgagagtggcacctgggagccttctgcaccatgcattggctcctagttacattgacaatggtgggtctaaaaaggcaagtaaaaatcaaaacataaacgtggaaccccagagtggcttgtgtcctggtggacctaaagtggtgcacatgatctgggtgacttccagcaaattttgactctagaatcaaggacttctatatatgctgatcaccccctctataatgtaactctgtgaatgtacatagtttgcactcattttagccagcagccaaaggctttgtcaaaataaagaaacttttcaaactttaaaaagagaaaagtttatgttgacggtttaattaataactgtgtgaggtgcactgacttagcacctccagaaagggcatacaaacaaaactctgaattaacttttttctactttataaatcatacatgctgccctgggattagaaagaaagtcatcccgacagaattattagaaaattgctcacatgttgaagtatagtgagagcaaatctatatctgataaacacatgcttagacacctgactattcatttctgtaaccaaatgttccttgaaactgttaaaataactattttattaaagtacattaaattctatttgcctatcaaatatctagcaacattcaggaagtggtccattggataaaaagagaaagaaaaattggtgggacaaaagtaaaagtggagctggtaccaaacactgatttaatgagatggatgtttacatatattaacttggtttgctcatttcttttacttagatctcagggtccagatcacctgcacggcactatcacaatcaccatagaacccacaggttgcttaacaccttaccaataaaactaataaacaaagataaccagagagataaaaatatctggtttccattgtttccaggcttgctctttgaggtatttgacacttcagcaaataactccgtagttatcagtgaaagcaggtcagagagatcaacagataattcttatggaaatgtatttaaagactactactcactcagaaaccaataacgtactgtgttttggaagatatctaattgccttaaggagatataactacagtttttgagttttttgtttgtttctttggtttttctatttttattttttaaagttttattatagattcaggggtacatgtgcaggttagttatgtaggtaaactcatgtcataggcagttgtacagattattttatcacccaggtactaggtctagtatccaatagttcttttttctgttcctctccctcccatgcttcaccctcatggaggctccagtgtccattgttcccctctttgtgtccatatgttctcatcatttagttcccatctcataccagtcagaatggctaggtctgacaaggttgcaaagaaaaggatatacttatacactgttggtgggagtttaaattagttcaaccattgtggaaagcaatgtggcaattcctcaaagagctaaaaacggaactaccatttgacccagcaatttcattactgggtataaacccagagaaatataaattgttctgccataaagacacatgcatgcttatgtttattgcagcactattcccaatagcaaagacatggaatcaacataaatgcccatcaatggccaactggataaaaaaaaaatgtgctacatatacaccatgaaatactatgcagccataaaaaaggaagatatcatgtcctttacaggaacatggatggagctggaggccattatccttagcaaactaacaaaggaacagaaaaccaaataccacatgtattcacttataagtggaagttaaattatagctacagtattgaaacatttttaggttattgtaaatttaaataataaacatcacttagatgataccatgttttaggtaggtgggagaaaagagctcagaaataacttcaagactaaatacttattttgaaccttaattaaaacctcaggaaattggaagcaaaacaaaagccagaataaattatttcattaatggaaggaaattctaaggcttttgatttaatctttccaaaatcttcaaactgtaatgaatagcagaaataatttggagcagtcaaatactatttattttacatttggtatcttctccttcttcagggacatttaaagacagaggacattcaaaatgtgctagttgacttctgagagtcaaagagctttgtggttctctgagctatctgctctccatctctcacaatagttctgagcaaaaggaagaatgaggcagggcagggataagtattagatccaaaatgaatacctaaaagagaaaatggcaattttctcttttaacctgaaagttccattctattgattggtacctaatgcaaatatttatgcctaaatttaaagaataaggaggagtttgatggaagcaaaactagaggagggcatccaagaccaagggttcagcaggaaacagcagagcacgttaaggaattacaagaacttaaaattaatggcctgtaaacttcacaatgggaaaggtctatggccaagtaacaatgattcctggattccttacaagaagtttagattttaccctctaagaacaagaacgctgttaaaactttttggagaagattgatgatatgatcagattggcatattaaactcattcttttggccttgaggagggtgtattagaggtgaggagaagaatagagagaatgaggaggttttagctgtgaacaagacagaatggattctgtttcaagtagtgacaaaggaaaagcagggaaccagataaatgagacattcttagaacatatcagtgacatgtcatcaatatcaagagtgtgtggtaaaaaaggaagaggaagaaagctaattccaaagcatcagcctaacaacttgatgtggttgtccaaaggttgtccaaatttaccaacttaggatctaaagacagtatcaggtatttgtggggaagctggttgtcttagtccattttctgctgctataacagaatacctgagactgggtgatttatgatgaacagagaaatgtattggctcacagttctgaaggctgggaagttcaatatcaaggtgccaacatctgttgaaggccttcttgctagatcatcacatggtagaaggtgagagagtgagacagagcaagaaaaagctaaatctacctttttgtaatgtagttaacctcacccataatggcagagccttttgccctactttgtatgtatgtatgtatgtatgtatgtatgtatgtatgtatgtatgtatgtattatgagacagtgtctcactctgtcacccaggctggagtgcatggcatgatctcggctcactgcaacctttgcctcccaggttcaactgattctcctacctcaacctcctgagtacaggattccatcaccacacccggctaatttttgtattttttggtacagacagtttcactatgttgcccaggctggtctcgaactcctgacttcaagtgatctgcccacctcagcctcccaaagtcctgggattacaggcgtgagccactgggcctggctagcctacttccttctttaggaatggcacctcctaatactattacaatggcaagtaaatttcaaattgagatttgaaggactaatattcaaaccatcacaatggtaaagtttgggaaatggacttgatgagtttgaaggccctctaggattttcaaatgcagttttttatgcaaagtctacctcccgttcagaatgggaggtgcatgcctgtaatcccagcactttgggaggccgaggcaggaggatcacaaggtcaagagatgaagaccatccaggccaacatggtgaaaccacgcctctactaaaaaaatacaaaaattagctgggtgtggtggcacacgcctatagtcccagctactcggaaggctgaggcagaagaatcacttgaacccaggaggcagaggttacagggagccaagattgcaccactgcactctggcctggtgacagagcgagactccatctcaaaaaaataaaaataaaaaaaataagaaaagaaaataatgggaggtacagttgttgtagggccaactcttagtcatttttgtggggcaagaatctctgacctcaattaataatggagtccttacagtctctttgttactttttcacaactacaaaaattgttggctaaaccctccacttaaaactccttatgtgaatatcagaagcagaaataaaagcaattttatcatttagccagtatatagaatttttaaaattatgttatactatgtttcaattcttacatcataatctttcataaattatgctaaatcttgtctctattctataatttttttctatttgaagctgaattttttatttttaaacacttttagtaagttacattatcttgtcagtttctcccatgccttcctacaagtgaaaatcttatcccaagtgacactw

SEQ ID NO: 93854 - DNA, 310813 bp, Homo sapiens
  misc_feature (1)...(310813): n = A,T,C or G
tcaccatcacaagaacaacatgggaaagacctgctcccatgattcaattacttcccactgagtccttctcacaacacatgggaattcaagatgagatttgtgtggcgacacagccaaaccatatcaatactctaatgactatatgaattggtgaaattcatcttgcaatgtagcttcttgaagttctttgaccttctatatctagaggtctaaatctctcacaagactagggaagttttctttaattatttcatcaaataaattttacatacttttattttttccttttctctttcaggaatacctacaatttataggtttaaacattttacataatcccatatttctcaaaaactttattttttaaaatccacttactttatttttggcagactgggttaataaaaatgacctgcctttaaggtctgaaattctttcttcttcttggactagtctaatgttaaagtcttcaaccgtattttgtaactccctcaatgaatattttattaacagaagttctggatttttaaaattaatatttatctctttaggaaatctttcactcatatcttaagttatccttatgatttatttgtattggttttcacctttctgttggagctcattgagcttctttaaaatcaatgatttcaattctttatcaggaatgtcaaagatttcattttggttaggatctttgctggagttaatgtgatcctttggggatgttgtaacactgttttttcatattaccagaattctttttctggtttcttcccatctgaataaaatatcttttccttttttcttgaatttactttcatttggatgggatttcttttccccttgaggatgtgaatataatacaagttgtatatggtcatttggttctagttctgagtgcttttagtgccaaaaaactctgtaggagttacttagttatagatttttgtggtagcttcctcaaatgctggttatactagtgatgtattaggcatatgagcaggttccctgcctcctgtggtgctgggatagtggaggtctcaggaagcttatcttattcccctgtgctgtacactcgtgtcggcaagttttgcattgggtatgtagttcaacctccaggccagatgcttatgggtaaaagttggctgtggaagagaccaatgggtataagcttctttttctttaccaaaagatgctctctgtggcctcaaggaatgggttggtttgtggaatacccagtgccctcagatccatgctcagcccctgaggaggggacaaagctggatggagctggtccaccaatctcacccttgtatccctcagtggtgaaaaaatgcaccagccctgatgggggttgtagggaaggtgctgatgaaatgcactgagggttttgcaggtggtgagggagctggccaagctccatggcctgggcaggcaggagtccacttcagtggaacattctccttcagccccaaacacagatctgaggctttcctactctctactggagcaatgctaccactctgtgtagagtagggataggatctgcatttcatgcaaacccaagcctgttgtacacactgccaatgggggcactgccacccctaatagtcctagaatggccatccacttgtacacctatgccagtctcctattggatcacccacagctgtgtctgtagcagtgagcaagaaagaaaagtttctctctccatgtgtgtgtctaagtatgtaggatgcctggagcaaagcacaatgtctgcatctctagtggaagaggtgtagtccttctcagcccacatgctggaagttctcaggtacagcaaaatacatgctttggtttcctttgtctcaagggatgctcttgtctcttgatgttctgtactttcccttccctttgcagcagcacgccctgagggctagaccactggaactcctgcagctcccctgggtccagccagctctgtgtggctgccacaatctgaatgggtactggagaatgtctgtgggggcattcagtgatgtggagacacaaaggctacagttccagcagggcagagtctcacaattgatatatacccagcatagtagcttgctactatagctcaggtttggagaaagggcgagtggccctgtgcaagctggtagtgtagcataatgccctcaagaagtacccaaatcattgctcaaccaagtgcttgggattgtgagggcaggggagctctctgatagtttggaaacagcagtctgcccctgggatgaggggaaccaaaaacactcccatctaaccttttgacaacataccaagtccctctgggttcgatctctgctagcctcttgcttccttctttttctgtcccctagttctttctgtgacttctctgatagttttttgcttacctggtcaggaggagcacaattttaacagagtcatagtcttctctcaaatgagaggttaaaggttgtatattcatgagacttttgcagtctttcaatgtggggattgaagagggcattattggcactgggtagggattatgatggaatagtttaggattgttggaaacatcagagtgagggcttttagacaaacattttaaagaatcatgaagagtaagaagttaattgaaattacctgttgagaagatgacaactttgttattcattaaatagatctttgagaagtccctgaatagatagtaaagtcatttgcaacttttattcttactgggcagaagtttcctggagtagtaaagtaatattgctgtattgtggacagtaaactgcatgttaaatgttttatttcctcaggaaatatgttcaaagatgctaagatccaaggtctagttgtttgcagattcagacctaggaattcaagtcttctgaatcactagattgggattctactttatcacaacatattaatattcccaattctattatttataccaacaaggatggaataaggtctaacctcaagtttaattgacttaatacggcatatgaacatggagataggttaattctaatggaaaataattctgttatgagaatgatggcaggtaaggccagattgcmtaaatatctatatttgggaaaacaatagatatccccttgcagcaaaatataaaacactcccaaattttcactgagagcattcacgaagagtcatttcctatgcatcaacaatataccctaatttaattattacacattgtatgcttgtatcaaaatatcctgtttcccataaatatgtacaactattacgtatccataaacattttttaaaacctaaaataatatataatttaaaatgatgggttacaaaattccaatatgagatataaaggcatacaatgaaataaaaagaccctgaatttcttcctacaattcaagatattccaaagtgcaatataccattaaaaaactaaattgtctacatatcttgaaatcatataatttgatttactcagtacttactttgcctttatacaacttaatttcaatgctttttgtttgcaaattttgatgttaacaatgatgtcagtaaaccttgaaaatgaaaaatttttagcactcccttcatcaaatgcttgtttcaagtttttttaatgcattagaaaagacataaatggtgcgtgcctgtaatcccagctacttaggaggctgaggacaggagaatcgcttgaaccagggagtaggaggttgcagtgagcagagactgaaccactaccctccatcctggcaacagagtgagactccatctcaaaataataatgaataaataaataaataaaataccactcttactagagtaagataatatccattgtcattttaatttgcatttttctggtgattagtgatgttcatctttttttcccaagtttcttgaccatttgtatagcttcttttgaaaaatgtctatttctgtgttttgcccacttttttaatgcttgttattgttgttgttgctgttgttgagttatctgggttccatgtaaattctggatatgaatcctctgttggatgcatggtttgtaaatatttttcccattctgcagcttctctgtttattctgttgattatttcttttgctgtgcataagcttctcagaatggctattattatgataagatatgacagaaaataacagattttggcaaggatgtggagaaaagggagtgcttatatactcttgttggaaatgtaaattagtacaacctctatgaaaaatattatggagatttctcaaagaactaaaaatagaactaccatgtcttttagcaatctcactaattagtatctacccagaggaaaataaatgactatatcaaaaagatacatgcactcatgtttatttcagtactcttcacaatagtaaagatatgaaataaacctgcgtccctcaaaggatgattagatatagaaaatgtgatatacatacacaatggaatgccacttaaccataaaatgaatgacatcgtgccttttgcagccacatggatggaagtggaggccattatcttaaagaaaacaactcagaaatgataagaggaacactgtatgttctcagttataactgggagctacataatgtgtacacatgaatatagagtgtgaaatgatagacaatggtgactcagaagggttagggggcgggagaaaggtggatgatgaggtattacttagtggatacaatgtaaattatttgagtgatggtgatgctgaaagtccagacatcaaattaagcaattctacttacagtctttaaatttatacatattttttaaaaaagaaaaataaatacctttataggacacttaggttgatttacaaaatagttcttcagaagatgaaatacctctaaaatctgattgatcacagcaaagaaagcacatcctgctaggctaaatatatattcaacacacacacacacatattatatatgtatgcatatacatatattcaacaatatgtatgtatatacatattttcaacattagctatcagcttctttacaaaaacattgtagttcaaaactctagctgtgtatatatacaaatatttgaaaattattaaaggcacaccttatcttgcattagaaaaatattagattgtttgaaatcaattatgaattatttatgcactacaatttcaatacattccaattccactttataacttatttagtaaaaatgttgctcttatgattatctgctttaccaaaacttgcacttttaattacaaaaccattccttttatctttaatagtgagttttaattgagtttatgataacatgtacaatgatgctaaaagtcagattaaattccagtagcttttctttgattccaagaactagagaaaaaattttcaaaccattattaaatttttataaaatttaaaatttatattttacatttcagaatgtgctattttcaaattatttttatcttcttgtgctacttttattctaaaggctcaatacttacatttcatttttcatacatacagaaaaaaatcttagaattcaaaagaataaaagttggcttagaagaagtcatatgatttaattgaaaacacatacttcacaaaatgatatgtaagtgcccttctggagctctgtatgataaatcattgtgagcacatttgaattaaactagctgtaacattttaactagttcctagaacttgtttagcagacttgcagtggttgtcttcataagaagtaatatcacatagcctttagtgattctatcaacattttttgaaaagggaaataaaatacttttttaaattaaacatggacttttaaaaatcggattgctgcaaagtactattgcaacataaaaagtattttcaaatagtaacataaatagcagctaattatatcattgaattatactgcaaactacagaagaaaaaatatttgaacttctttctataaactctctttaaactctatggtacagctccttattatttattacccacacagatttcacattcacaaaaatagaacttttacctcccgctgatcccactgacgcattctggtggcttcatgcatctggcagccttcagcaccaccatggcccccctctcagcatgaggtatgtccttgactacaagtatccaagtactttccttatatcaacaactatcctgaatgctgaggtggaaagacaggtgggagttcagactgaaaaaaatctaacaaaaggaaaaaaagagatgtgtaattagtaatcttccatagttaactacatgttaaagtgagaactctgtgctttgcatgtgtttctaatacaatacaagaagagaatatggcaaaggcaggcagtagcaagtgagagtctaccaaccccatcctggcatatgcaaccattaacaactatatttagttcaaagaaaataaaaaattcaggaaaaggctaagcctgaacagcaggaattagctataactgcccatgtcaaaccaggttgtataggtaactttatgtactggtttcttttatgattagataaatcctaacatttgattctgtcatttatttcaatttgctattgatttgttcaatttattgattatcatctggcagagattttccttcctttttaataaattgcctctaaatgtatcttagtaataatttaatgttttactgtactttccactgtggcattgttctctgtttcataattcagacattctaaactataaggattagatgatttaatagtgctttgaaaagtagggagtgaaagaaccgaacagtactgaaatttaccggtattgggtactgcgtatcttcccatttgtgtggtctgaggttaaaattgtgggcttagaagctggaccaatcaagttcatatgccagccaaccaccctgggcaaactagatacttaacccctctgtaattcaatatcttcatttgtattgtatgaggtaggttttttaatgaggcgtaagagcgttaatttttttttttttttttttttttttttttttttgagacggagtcttgctctgtcgcccaagctggagtacagtggcgccatcttggcttactgcaacctctgcttcccgggttcaagcaattctcctgcctcagcctcccgagtagctgggactacaggtgcctgccaccactcccagctattttttttttttttttgtatttttagtagagacgaggtttcaccctgttagctaggatggtctcgatctcctgacatcgtgatccacccacctcagcctcccaaagtgctgggattacaggcgtgagccaccgcacctggccaagggcattaattttaataaaataaaacggcttagaagataccaggctaactcaaagtttgctataatcattaacataaggctgtggcttcatttcttctctattctcattttgctcctcctcttccatttctctttctgttattcttaactcttaacaaattatagactataaatgcatacagacacatagtttacacaatctaataaggttcacacgatacctatcccaatttggtcttaaatgtattatcatgaagggaactcaaaccatttagcacattgcctcacccctataaaggtttgaaaaatagtacttgctattattattggcatttctgttacttgatgacattagttgtgaaactattattgttgtggtcattattactacttgctagtattatttgaggattattattctcatttctcagtacttaaaagataagtgatttgatgtacacagttgtcctttagtatccattgaatattggctccaaaacctcctgtggatgccaaaatatacagaatgctcaagtccttgatataaaatgggatagtatttgcatataacatacgtacatcctccagtatactttgttatctctagattacttataacaactcatacaatgtaagcactatgtaaataattgttacactgtactgtttaaggaataattacaagaaaaatgtcagtacgtgttcagtgcagcacaaccacacaaccagtctcttttaaaaagtattttggatctgtggttggttgaatccatgggtcaggaatccaaagatatggagggccaactctactagccatttgtctacgtatttcctacatagaagtattaatatgtcttaattttaatagaaaatggacacagcaaaccaataactgtatttttgaaattagaaatcaaagtattttttctttgttttacatttttgtcttggcaaagtgaaatgattctgtaagtgtgaatcaatgaaatattaatttgtcctcatttcaagcagactaacatcaacttaaaaacttaggttgagtgtctttagctaatatattttattatagttaaatctacttagcttacagttgctgctttacagtaaaattgatggtactccaataattcattcataaataacgtcagtcaaaaatgtcttcctccataaatttaggatcatttagtaccaaaaattcacttactttaaaaaggtatgacttttactttatatcttggctgaaagtaaaaaagaaacaaacaaacattgctgtggagttatgagtgccatttctgctttgaactccatatttactttaacaataaaatagcaaattgtttaagaatcaaagaatatgtttgctccaaggaaataggcagacctaaacagsgtaaaaaaaaaggttgaaatttactcacattttaaagagtattttaaaaaatttactatagatagaaacatttttaaatcatataacaatttctactgataaggaaacatgatcattattttttcttgcttcaattcatatagctatatattaggtagaataagatattttacaacaactttagctggagagaaaacaactttatgtcaattaagtaattctgtgtaacaagctatccaaaatttatgtcttaaatatacatttttgtctttaaaatttttaagacatgcatttctaagtttttatctgaaaacccataaatccaaacaattgtactaccaaaatgaattaatattgtttgctgttactgatataaagaggtgaacattaatatataactcaaagctccatttatttttatgttcattgcattaatataatttgcttctgtctctattctccttgcagctcatggatcagcaggtctgtttggttcagctgatctggttgtcttttgctggtattgactaggcttgctcatgcacatataggtgatttatgggctctgccctaagctagtcttggcaagaatacctaagctgggcagtgttggtccatgtgccctggcatgtccttctcacagtgatgatggaattacaagaaagcaaacctgaaattagcataatgtcccttccccttcattctactgtcacagcgattcatgtaccaccaccaaaagaaaaggggtggggaaatatggtaaccttcttattgagaggaactacaaagtcacatgacaaaaggctgaakaattagacaaatcatgcattctgctacattttttcttctttcttctatattttgaagcaatgattattttcctcaaattatagctacacatttcacaaaagaaaataaccttttaaaattttcgaattaggtcagaacttctcactctacaaacggtacacaactaaatgagcttaatagtagcaccctaaaattcttccagacttgtaaggcagcagtaagatagcattaaggtagtgataacatttctatgatttttttcacagtaatcatgaaaaaatactgagtgctacactgcacagttttatgaaaactcatttttcctgtttaattggaaatttggaatttttaagtgtttatctataaatttataattgtaaataattaaagtcctaaaaggaattaacgtattagttattctggtgttgtctacatgaagagaggccagtgctattattgtatacctcaaagctccatttaattccatgtttgtatgacaacctggtctgcctctttgcctctatattcccaaagaatagcattctctattgacagtcactttgtgaaataataatggtgttctgcttagattattaaaatagctaaatgaaaaattagggaaaagttccaattattataccatggaaatgacttgatctttttttatattcagtactgtataaatacataatgaatctagattcattttttaaaattcagttcatgactctttatatgcatttacattagtagatttaggtcagcatttcaaaatgtttatagaatggaatggaatggaacaaaaaagaaaatcaaatgcactgcacacagtcaactaagaagtaagaattgttttctgaaattcttgtttagtgtctctgtgttgtgggtcacaaaaatttcacaaccagtgatctagattgtgatatcttagcaccggtctgagaaattctctgatccacctctttcttcaaaccagaaaaagaaattgtataatttaaataaaaatgaacagaaaataaaatctcacaagtttccctcattttaattctccccttagcatatgccaatgactatgaactatgattccctgtgctgcctagtatttctaaagcctaattaaatctttccttctctactattctttagaacagatcttggtatagataagcatttgtataaaacatattcatggagaagatatcagaatttcaatgctaccaaattattggtaacttgccatatagaaaggttaaaagcataactcttgttttatctatatattaccaagtggattataaagcacagggttttgaatggccacctgaaaggccrctctgcttacagagtaatgaaaaggggcattctccagggacgttcattcagacgactgtttggtatagtggaaagaccacagggctaaggattagtgagtcctgttgctgatcccaggtttgctacttgtgtctcagtgttctaacctatacaatgcagayataataccacaataactaataataggatcattgtgaccctcaaatcaaataatctatgagaacatcttttgaaaactctgaagattttaaaaatgagttgaagattacataatgttagtattgaatgtattatgaaagcaagtaaattggaacaaacctctactatcaactgtgactcagagtatcaggttcaacaaatagcctttttcccttaatcatcctaacagtggtcatgaagggtcaggccaaatagtgctttatgctggaggaataactcctttcaaagtaatctggaaatttgagatagggatttcaagaaaccagattgttctaaatgtacctcttgtttaactgcaaacacacacaagaattgcttgattaccatagttactttggcagattaaagaatattaattatttagacttgagaagttgtacttgacaagtaattaacgttattttaaagattcacataatttaatttgaactaaacagtttactctagtttgatttaatattcaggtacaaattggatgtcctaaataaaaggactagatttatatttcttatgactaaatctggcttatagtcgtattaattttcatttatttacattagccttaaaataatttttataggatataatcataatgatcttgtataggacatctcataacgagggaactgaggagactcatctctctgaaggtagaattgcatctgtggcatagcagacaggtagaatgttatagtatgcttcataattccatgtattccatatcactatgtgtattaaaatctgtagataattgaatgtttaagataatagtatgttttaatgatactacagaatgcacaatgtcttttctttcagtatatgctaaatgcaaattagcagttattacaaaggtcattcaagagcaaatgtttcaagttctaatatacttaacatctttgagaggaagggttttacagtgaagcaatctatttttgagttacaagaggggaaggtaaaggagtatatttaaataaggaaggtagatgagtgcawgatgattttataatagaaataaatttgagasatatagctaagtataattttgcattctccatggcccagccctattctatggttagatccttagagttatatttgaatcattgataagacttcgattttacaaaatttgccgcactttatatgttacctgtartttacctttactttccaggcactgaagaaggcactaccttattaatatttcaaataaactaaatggtattgtgtatatatatgtacatgtgtgtattatagatgtaagttatataggagaattcaatctgctatctgagatctgagatgcagtgattaaatcaaattaaaggtgaaactggaggctattcactcaagtaatctaccagtaagtgataccaaattaattttctttgcctttgatgagactctgtgttatgtttttgtgtgcatcagtttatatattaragtttgaggggaagtggagctccaaatttatggtaacagcagttttctttaaagcatatcaacagagatgaattggcagagtcttcattcaccatcttttatacaatattgccctctatgggaatattgtaaaatattgaatattttagcagggtgataagtatattctttcatacactcctgtgttcatcayatgatttttctttcctcttaatttaattactttgctctttcccaccctctaacaggtataaacagctgagctgacaaaaaaattcatcattgttttattatatagtaggtttagagtatcagaattcattttactttatttattttacattatatttaattatttgtttggttttcttttgtaaaatatctctgttttcggagtactatattttcatttacttcatatcatctcatttatgataattccttttcagaaaagggaaacaccaattaaagttctaaaataaaattatacttaatatggaagacaaacaaatcattttacataaaggaatatttagaatttacagtgccattcttctgattctataaatgcaaaccaaattacagtaatgtataaaatattttcaattctttaaaatatatgacaatatttttactaaaatatttttattcatgaataatattaggaagattaaatgacatggattctaaaaaggaaaactaatctgggtcttcttatccatggggaaaattgctttataatgtatctttscatcttccttttgaaatgaattgttgcttctatttgtgacatacagaactggtgcaacagtttcattgaaaatatatttgtaggggaaatgttaatttctggttccctattttctagctttgggttgccatcattcgttcattcattcataaatttatttttttaaatgtcagtaactatgccatggcactgctccaagtattaaggatataagcctcaaacaaacaaacaaaaacaaaagagattatctctgtcctcaaagaataaagacttcattgctagcattatgtgtgtgcctacaaatcaggcaacaatagcaatataatgctgtgtaccccattgctagctggttacagagggcaacactgggtttacaggtcttggaatacagcatgacttagaattcacaagtattgcttctcaagcttaaggaaactttcagccattgttgacttgctttagaacatctcatgttcttataccacttcctcacaacttaccatctcaacatggtcccccaacacacacacacacacacacacacacayggcttaaaccaaataggagaaagagtgacagcatccagtgaattaccccagagtgacgataatttacagtgaggcactgaagctaacaggacagaaactgatttgctaaggcttagtaaaaaattaagatttcccatgctgatcagagcattagccaaatagttcataaatgagatgtctttccctgaaggactggagcaggcggaaaacaaatgatattgggatatttaaaatacaaaaaatttggtaacagatgaaagaaaatatcctatatgacaaaaagaattttatcaaacttatcactgtgatgctatgattctggtctgcaagtagctttctcactttgaacatttaggacttcaaattagagaatgtaaaatgacttgtaaggcgtaagtcaaaaggaaatcaccatcaaaccctaataaaatttggcaaatgaaaattccaaagaaaagagaaacaaagaaagaaacaaactgaaactacctatcctagataaaacttatacaacccctataaggtatttaaagatcctactctgatgagacactcccgctggagttggggcccaattaatgcgctttatgaactctcctcacctttgtgtaccctctaaaagagaaactaactgaaaattctcatagcaaagatcagaccatggaaaaatcataaatttaatttttactgtcctcccccacctcaccctgggtctctcacttgagtgctaacattttagtgacaacaaaatttcttatgatgcaatggtgttttggccaacaactgctatttattaaaaatcatgttcctttaagtagttgtctgccaaactggaattggactgtttagtctgtttgttccctcacttggcctttcaagttttgcatcttcaaaggatttatttgaagcattaacatgctgatttctctcttgctacaacaatgcactagagtgatactggcaaaaagattctttcttccaacctgctcttcctatttttttccctttttctaataacttgctaacaagagatccagatgtgtaataagataacatctaagtctgtgactggggtgtttgttatccacgtaatgctatttggcacttacgatttttttatcatgtattatgataccattgaagcaaaagtgactttatgcaacttctttctcacataagttcttatcctaacaattgctagcagaagatttttttctcttaataaaaagtttttgtattagtcactcacagcccaattagaggcttcccctgctccctgaaggcataaactttgaacgtagaagtttcttttattcatgctttttcttttaaaaaagagttatagcctttcgtgttggtacaacaggatagttgctcatgttaaaaaataaaattaaaagaaaaggatatagacagaaagtggtagtgtggtaatagaatcttgtatttataagttttagtagtgaagactgtaaattaaactaaacgcattcaatcaaaattgtgagaactataaatttatttggttgtgctcattcaaaattatttttgctctaaaagtaacaaaaaagatgaaacttgaaatgaataaaaatgtacatttaaagatctaaatatcttctgtttatagcctgtatatgcatgtgaataattttttaaaaagtagaaattatgaagtacttggaatcttgttttagtattttctgtgcaaacctttatttattttagaggcaagcatttaaaacttaccattagtaacaattagcagaacaaaatgagaaagaaaatgatgaaaatttttgaaattgttaaatttaccgagtttttttgaagttttctaagatttttattagtagatattactaccctctcattttcactgtaataaagacttgacatacaaacaaaaaaaagaccttccttttaaaataaacatctttttttcttctattgagtaagtatatacaaagatatatgtgtgtattataaagaacaaagcgtatatatgtatttataaattaaattgaaagtatattatgttcttagatatatgttataagtgtatattatataatgttttcaatgtttttcacttttaaaatttccaaataatgcatataacacatacacatttcttgaacttccaaggaaacgccactgaaaatttaaaaggtaaattcaaagataaattcagttgaatgaaaaggttttgtagtgggcaaatactactttaacttttgctgagtcaagagagcaactgaataaaaatatgtggagctctaaaagtttattagttcaacaagttcaattcaattttttaaaaatccattgaggtcttaatataagtctggacctacatcttaatagataaaagaacaattatattatactttatagagtgcttaaagaaacttaaaagcatccactttcttcttaaaagtcaactataagcaattgggtgaatgctttgcattgcgtgtattgttgaaaatgagctgacttgatgctacattttgatatttaagtgcaagccctgtaaattgtgraacacaagttaaatgatttaaaaaattaaaacactttgagcaagtaattatttcctyttttctctyttgtgtattacatttcttcccagaaatgtccaaggtcatttatttcattttcccaacatgacagatgagaaaatgataaaagattacaaattcacaaatatgtttgttttagtcatttgcgaatacaatatacaaagaaaagtataagaaaaatattcaaaatactttgaggattattttgttttgttttagtgtgagtgttgtgaatttctctggttttccccaggaatagaaaagaaagcactttttggtgggtttccattcatttatacatatgtatatggtgggaccctctgccttcagtacttagtgtatttctgaatgaaaaatgaggcagggagagtaaagttgggtattttttccctaaattgaattttaattactcatctctggattttttgaatttcaaagttcatgtttcacaaatatttaaaagaattttacctttaataagaatatcttctattaatattttatatagcatttttacactgtgaaagtagttacctcttcagcttaaaacattgtttatagtttaatgctagagaagaagttgatcaacatttttcacttgtaatcatcaatggatatcagctctagtttatcactagagccgaggatataaaccctgctccatgttttaatgtgatgggttttatcttcagatcactgtgttgccatttagttccaataaatgaaaatactctgataaagtggcattcttgagttgtgaaatagaactatgtcaataatataaagatgttgagcatttataatagtttttcatttaaattatttttctaaagttaagacttaaaaataattacccaacttgaataaagaagaaggcattattagtaagccaaactacatacaacagaaaaatcttcaattggcttttacaatttatgctattttatgttatttatcaactgttagtgtttcccatgatgctactctagtaataattattttattatgacatctttgaaatatttaactgcagtttatttatccattttgaattttgatgtgtatcactctgaaaattctgacttgacttcaatgcatctttgcattccaaatgttttaaaaggtagtaagaagtacctgaacgctttaattatttttaaaatataaatttttttctttaatatattttagcctgtgcacctgaaaaactaactgatacatgacctatgagttactaggttttatttattgcttatgaataactggtaaatattttttctaacttgctagattttttttccctattctctgtatggcatatgtctatggcttgctaaccctcaaaaccttgtgcagtataataatactagtaatcctggatgcattaaaattattcttctgaaagaccacatcatcaataaatgctgagttttgaaggactccctcctacccctaccttccagtcttatagaggatttcattgaaaccacaccagtatttcaagtggaactactacgtacaaccaaagacacccatatacctgaggaggacttggagttgagaaaagcttgtagttctgttctgcaacctattaggggtgttgaaccaaattctcattagcctatcttattccactaaattaaatggtagaaactaagggatgtactaaagcaagaaaagcccagggaatcatgtagtctggaatgaggagaagtacctgaaagcactttacttttacttttacatatatcctaatgaataagtttaaagaactttacataatgtatataaaagtacttgataatatctttatgtgtttacacgaattaatagaaaacaaagagcaggtaattttcaacttatattgccacgttaaaaagaagaaaagagacatagaaaagaacttttccataataatccagtagtttaccttaattactaaaacaatgcacacaataaattcacacgcacatactctttcttttcttctaacatttatcatggtctaaaatgctrttattaacttcaggactatgtagcttactaatacttgtccgagtttcctattgctcattgttggcttttgttgagtttgtaatttttgtgtttaactggcacacatttacagcagaaaatcctgctttgaacttttcttattttgtccaatagaatctcgtggaacagtgtcatagctgcaaagtggaattctatcctcaaatttcataggaaatagtcgaactgtacaatgaaagattatgcaaatcttcaaggagcatctaatcaatcaccgcggtgtgagcggaatgcagcccatcgctgaattagcttctgttggaatgtattcatgtgtaacatcccactgactggatgacatcacaacagctccaggtccttgaaagtcttgaggatgattagctgaaggaattggctgtttctgccaatcataatccggcaaagctgcctttatagttctggagatgtgagagagagggagggagggaaagaccgactacagctaaacaagaggcacagcagcactagcaacagcagagcaggagcagctggtattccggtgattaaatagttctcatagcctttttgctgtactcggtctgctccctggtgtaattctcgtgtccaagaaggaagctgcattttaacggtgtgctgaacagaggtttgaatcattccagctggctgcttgttttgaaaaggacaatgtgtgtataaataaaaggactctgctggaagagttcagacactaagactggagctagagagtgctcttggaatattgttgaggcagattgcatgaactgaaagctccttctaattaacctggagccaagtgaacctgaatactggatatctcatgttctaacacgggataaattcaagttagaaaaagacaaaatattgaaatgcttctctaggtaagttactgcttaatttgctgaaatcgaggtgtgtatcataaatgaatatgcgttgcttagctatgtaaacaagtcggacacaataaagttttatttgtgaaagatttatgtagaagcagataatatcttaaaaccaaattcaatctcccttttccgcatgtgtgtgcttacctgtcatcatgctttatagaagttatatttgcacgtaagtagaaaatacagtcgtacataaaaaaaaagagatacaacttgataaaatttaaacagttgccggaacatttgcataggaaatatcttatttgataacaactttagccttttcatattaaaagcaccaattttacaaactcaacatccaaagttaactgtagggttataaatgtttccctaataagtgttactgaaaacatggcattcaaattaccgaagatgggaactcctgttttttggacctgagatttataggcatgctctgtactaatggtctgctttagagaaacagctgtcacagacatgtgaaattgtatgttacagtcataaattgcttataaagaaataggtgctttcctcctacctcctattagaaaagaaaaataaattcttagaacaatatatgtcatatgccctaagcatagtttcctaggaggacagaaagctttatggtatacctccaatttcctcaagcacagaataagttggaaaacaagaaatgttattggaatatggttttactcattcttttcaatattctttttgagaaagctaaataaggaaaattaaaccttatttttcttagaatttgtcctgattaataaaatactatattctwcagaattcctgtcatagtttttttaagtgattatatgttttgtttattatgataagttatactgtgagttctcatacagctttagaaagttttaagtttatgttttatcatgtctctttcaaactcacctttgcttgttttcgtggtgccttttatcagaatatttttcatttgcacagtttcataaatgctttaacataaattgcataccaagatactgatgtgtttctgtaactctcagaatgattttagttttccactttctcaccaacaacatggttaaaatcctgtgaggtttctgccccaagaggaaattgataaagatgaaagttattgtaattggttgaatttccccaaaactaggaagcaatgaattttcccacaacgatgtaaaggttttttttttttttycatatcaaaagagtaatttattctactctattaaaagtatgccagttagctatatcccagtgtcacataggttctgtgctggtcatttgtgtgcatgagtgtgtgcgtgtgtgtgtgtgtgtgagtagcaagtttatgtaaagaatataaagtccactgactacaacagtctaagttttcaactggaattcataaaaaactaattaataagcaaaatataattgccatttacatttatctcaatatataaatgggaagttaagcctactattgttgacatttttaaaaataagaaatygtatgacaatacattatgatgatcaatattaaacaatgtttacattgatagacatctcataataagctaattgggaagatttttagaaattgaatactaagcagaatgggccttttaactctatctgaatggcacctggtcaccactaagactgatacataaaaaccctttgaaaaagttataatatatatgagttactaatataacttgaaaatcacccttagatccaatttagaaactcaggcattatttttaaataaaaggaaggtaaaacctcctgaaaatttgaattttttaaattgattaatgcaaatatataaataataaataaaaatgcaaatatatgtaaattacattttgttttctccaagataggcttattatttaagaaatgtgtaattttaaatatattatcctaaacatcaaaaggaagtatatggggactatttttatatataaatatattaagtcataatttggaatttctataattgataatcaaaatagaaacatatgctcatgcttatgttcacctcaggaaaataaggatctttcattttttatttgagattaaaaactgttatacctattctttcttctcccaaagaaaagcattctatacttggatttaaaataaacataattcaatctcaatactaacattagttcttaaacgtactaaataaatgtttccaacccagtagaacagttgtccccagkaggttaaatgttcatatgatccccttgtactttctgtttgagttgaaagggggcctttggaaataaaatccaaagatcaaactttgtgtgcatcatttacaagcaattactaagggagaagagagaagcatttagcatactgtgttcaaactagaagattctggctggtgctgccttcccagatttagaaagcagctggggaaacataaaataaagctagaatatcagccctggctggaagccaagacagagaagctgtgcacccagaaggctaattctttctgggctaaaattcattgataatgcattatgtttagagtctaacctgaagtgttattttttttctccagtacaaactgtgggatatttaaagaacaaatatattttctaagtagaattaaattttaaactaacaaaggtttcttctttattaaaagttgctctgttgaaaaaatgcaaataagcctaccagaaactcctataaaatacagtttattctcaggaaaagaaaaagaaataacgatgagatgcatcatctaaccatgatcttggagaggcagagagatcagaaatgacacatatggatacatgccaaaacaaagaaatgtgaaagttttattaaaatacctggcctagtaaaatttacagtaaagatacacacactaaatactgttgtagcatatatcttctgaaggtaggcagcaaacataaggtaaactctcattacgtacccccagataactaggaaaaagagaaaccatgttgtctgttgatttatttgaagtttacgaagtgagataaatgggtcaggtgtcagacacaatgctaccgccttcagccatcatgataaaacatctagccagccttttctttaacacttcaggaaactttcagctatgctgttatgcagggtgttaaatgccctatttttaaaagttattttcagcaagcttaagaagttagaggtgttatttgcaatgcagaatgtgtacacatatatacaggcatttctaatagatatagttctatttccaagctttctttatctcagttttctaaggaaaactatcactttctagaggtgacaaatctaaaatttctttcagaaataatattgaattgaaaatagatttcctcaaaagctaaaatagtctgaaaatgaattccaaactcatcaatagcctcaggcatttcaaggcaaaaatatttttttgaaatgtgaatagtaaattactcttcattccaacaggtaaacatgtttgctgatataacttaatgtatttattttctttgcattgttatagtttgtctatattcrtcagtattcagaaaattcatgccatgaaataggttttaataaaataaactacacatgacaggctaaataatggttttcaggtgaccctttgaggtcatttacatacataggctattttagatatatcttttaaaagagataatatacttcattaacactaaataaatagttatgtttaattagttgaaattttgaaaaatctgagaaaaaagggttaaaactatgtctgaatgcttgagaatataatttgatattgtactcagaaaacagaagcgagacttttgttgagaaacaaaagtgatgactctagtgaattatagaattgggacttctgtactaaatccaatttgtactctgtttagaaattattactttaagtatttgaagagttcaatgaagaaagcaactttagcaagctaataaacacatgagttttatgtgcggccacatgcttcatttgttcccaaattagaggaatttctctattttgcaaattccaccatcaattgaacttatgttgtgatttatttcaaatatttagcctccttttaaaaagtccttaatggaatgcatcgtcaactataactacacagaagttgaaagttagcttggccaggttcactatattcaagtaaaaagtaaatggagaaatgcttccttaatctcttttcattagctcctttctttcttctctttcttttactcatttttcttatttcccttcccttcctctctttttctattctttttctttattcttttctctcttctcttcttattttaccactttttccttccttcctcccttcctttcttccttccttccttcccttttccctctttccttccttcttycttcttgctttcctaccttcctcttgtcttttttcctttcttcctccctttttccctccttcctttatttccattcatttttgccacttcagcttacatgctctcttgtgtaattggaaagcaaatcactcatctttagtattgtggcaattattaatctaataacctggtttgaacacagagtaagtggggaaaatgaagagaaagagtgggttaagttgcaataagcaatcaaggaaaagtgaaatagggtgggagatttatttcagagaaatagtgatgttgactttaacatatgggctgttcttccacctataaatttccatttaatttactaaattatttaagtggaattcttttttttccaacactccctttttaatatcagtcacatcttttccatatagcagatgcaccttagtggtaaaaaataaaatgataataataaatataaataatttttccttagaaattttaaatcctctaaatcatttttatatctagtagtttaaggatattaacattcataagcaacccaaaggccaactgccatgctagtggaagaaaaagagagaagggaaagtgatttcacacatttagatgctttggcttgattcyattcctgaatcagaaattcagttgtagactgctgatccacagaatttgtcatagttcatcagacacctcaaaagagttcttcttcttcttgatgtattgaatagtctttcatgcctacataacaatcatttaaacatcagaaataaatataacatcactaaagattaatgcaaggaaaggtaacagatgcagagatgcatatgctcctgtgaatgcatataacagtcctaattctattcattactctaaagtgcaagtgaataattagaatcagaatttaaatttggtttctcaatcaatctttcactaatagttatgtcaattcaattgagattccmtgtactgtaataagtaaaataaaacacaatcaataaattatactaccaacttatctaaagtattatggttcctgataacacagtttttgaagtttctttccttgaaacaggacattttcttgatatccatagaaataatgctaaaattgatcaatcgaggttgaactcaattcaatacttaaattactctatctgtctggacatatttttcaccttagacagaaaaaaatagcttttttacttttgctcaataatgttcataaaaataaggaaaataaatattttctattatttttaatatgtgtcaggcaccatgcaagttactagggtgaacaaaatagctctcaggaggcttatattctcatggtagaaaactgacagtaaataaataaagaccccacrgtagtgcctgtgagtgctmtaaagataagtcaaggtggcacattaaaagctgtatgtgaaagtgataggactggtcaggaaatgcctttctgataaggcagaaactcagtaaatccatataaaacatagatgtcaaattgagtaacattattattttatcttgtagaaaaatgtgatgaggagtagcaatttcttgtaatgtgcaagctgacaagctgaattttgtctctgtctattgattatcctcctcaggtctgtgaagttgtttgggagaatttaagatatggcacactatttagtgtcactttctctggaaagtaaaaaaactaatcagttttagaaaatagaagtctcacctttacttctattctttatatttctaagtattaagaagtattatgtgtgtaaattatctcaaattactggtttttaaatttttttctcacagactgaaattcaatgctatttatttccttctttaattttatttagagataggctcttgcactgtctggcacccagggtggaggcagtggagcaatcatagcatactacaacctcaaactcctgggctcaagcaatccttccacatcagcctctcaagaagctgggactataggtgcacaccacctcacccagataattttattattcatattttttgtaaagatggggtgtcatgttgcccacgctggcctcgatttcctggcctcaagctatcctcctacctcagcctgacaaagtgctaggatcataggcatgagccactgcctggtctcagtgctattactaaawcttacgtagcagaggagctggctccatatctcattctcccaaattggtggcggtaagaaccaatattccaaaacatcacccagttggctggaatgatggacctaacataatgaaatgaagatcgatgtaattcttagtatccatgggtccatctgtgaattcaactaactgaaaatgaaaartattttaaaacatagatgattgtttctgtactaaacatgtgcaggcattttttcctgtcattactctctaaataatacagtataacaattatgtacatatcattcacatcgtattaggtatcataagtcatctagaattgagctagagtatacaggaggatgtgtataggctacatgcaaatactatgcgattttatacagrggtttcagtatctctggattttggtcctggagggttagggggtccaggaaccactccttatgacaagagatgactgtttcttttttaaaaaatttctccaattataaaattacctcaaatttaacaagaaccaaaagtttgatgacactaatacaatgctaatacaaacttagaatgcattaacagaaccatagtgtcaacatccaggaaacagttatctgtgatcctatttartacaagtctgacattatttggcctgttcatcattctcagtttcccgatgcctcatgttaatagcagtcttctatgaccttcctcttcccccatggtgaaccagatatttttgccctacccccacactgttccatcagggcacttattaccttatgatgtaattgctgtgtgtgtgtcagcgctccccatttatccaaaagctttttgatggcagaaatgcttagagagtgcttgaccaataatcaatagatactaagggtttgataaatgtaaaatgtgagaagacatctggcaactatgctatatgagtaacagttgaaaaacacagtaataattaaaggaaaaaagctaaaagggagcagtatagttatctttatatattagatacttttttatgcaaaaggaatttgttttatgttatgtgacgctagcagactaagctacgaaaggtacggaagttgtttctatgcaatgtcaggtaaaacaatacttcctaaaaatcagtgagattctactcagtcaaagcaacaaacacaggctggaatgctacctgttcagaagacttttgtggaaggaatttctgccttgcgtagaaaataaatgctggctaccaagatttcttgttgttttttgttgtcgcactataagaagtatggacaaaggttttagaatgagcacttggcccacctaaatccagctctagcagttggctggaagactggtcaacataattcaagtaaataaccactgggtaaaattacacagtggaaattactcaggatatgccctagagtaaaaaagcaaattttcataatagaattatttataagatgtaccattttataaagaaaataaaataatacatttcttgagtaagtgaaagtttgttttttattgtaaacatattattttackattcttttgagacagtccaagaaagataacatgtcaacattagaggaatgaataagaaaaataattttgctttccataaacttctaaattttaaagaatgcagagattgattgacctaattatgatgcctttttgtagaagccttcatgtaaacaaatgtgaattaaagatgagataatattgtgacatattggaaggcaggtgttaaccttggtttccaccagatcaggattccaagccttgctttgccctgactcatgatataaccttgaaaattctaactcttctctgcttcagcttcatgatctgggatggggtaataataattcatagacttgctgagacagctaaacataacaataagtccaaagtttctagtacacagtgggaaacatgagattttaaattaatagtatcaagttttgattacatgtgtcagtactctgactttggcctgcaatgccacattttgtactgatttaaagtatcccctgagtgattagtattgactgctcccaatctttctcacttggagataatgatctaagtcacctttttctactgtctctactgtattgttgatcatatattttaatattaataacattgaatctaacttaaaggatcaaatttcattcaccaacattttaatgtgatttatcatgatcttgaaaattaactaacattcaaaaattttcaggaaaacatactatatcccagagaaaaaaatgttagaaaaaggggccaaatagttttcctctattttctgtcacgctggagtaagcagaaacatggaatttgaagaagacaaagacaaagattcagaaactagaactggatagaataaaaacaaatgcaaatgtttcctagttggtcttctgaccaactgctagagctgagaggtaggtgaagagagtatttattccgaagtctttatccacaccccttatagtgacacaatgtaaacacaaraaaccttcctggccaccatctgtctccttctcaaggcagtagtaatttcttccamaaaagcagtttggtaaacataataagctactttaaattactaattactaatgttaacccaggctgaaagtaaaaagatataaactatattctaagttttgccacaaatgtgctgataaattttaaattgatctcatggtttccacatgtaaaacaagaccactttcactcctattctttgtttccccaaaatatattttgaatataaacacaatatttcacatttctaaatctcccagtattttccaccaaaccagtttgctaagtgaattattttggtacgatgtctagtattcttttaaaggatccataagtaactatcgtgataattctagatgccagtcatcaagtattaaaataggaacatctcaagaaatgttgtctctgacaagaagcagaatatgtgaaatcactccagatctcttctcttgagtttttatcatgcttttctgatgtttgagaattgtgtaacctggattagtttttggtgggagaataatattctatacaggatatatttacatgttactatccacattatttctggtttatggccaagttggcattttatttgttaatatctaaaagacaaaataacataaaatagaaggaaattaaattaaaaatagcaggtttacctgtgaaattgaatggagtatgcctcttatgataaagaataatccaatcattttgtgtgttgcgtaaaattaagaactctctraagtaaataaaaggtggaaaccataactacagggtttattaaatatatagttagaaaataatcaaaagaaaatatcagtatttcctatttgagtaagattctttgtaagtcttgagtacagcaatgaaaattttacttcatgatatttaaggtgccaatatagagcagtggcaatgaaagaagagatttataattaatttaaaaatgtgggttcatattagctgtttaacagtggactggtcacttcacttctttgggcattacattcttcattcattcatcccttgagttctctgaataataattttgataattaaaatttatagctttttgtattatagatttaaagtgacaatttagaaagagtttattttccatcaccagcagcacaaagtcagaatgtcacatagatactttcttgatagaaaggtaacataatgattaacatcttgctagacctttctgtaaactaggtaatagactcttgttatatcacccaaaaatgatccaaatttttggacagcattaatgtatttattgtaagtgtctctagataagaaagtcagtggggctgggagcagtggctcacatttgtaatcccaggactttgggaggctcaggctggtggatcacctgagatcaagagttccagaccagcctgccaacatggtgaaatcccgtctctactaaaaatacaaaaattagccaggcgtggtggcaggcgcctataattccagctactcaggaggctgaggcaaaagaatcgcttgaacccgggaggtggaggttgcaatgaactgaggccgcaccattgcactccagcctggctgataagagcctaactccatgtcaaaaaaaaaaaaaaaaaaaaaaaaaaggaagtcagaagtatatggtatataagtgaccattgatgtgaattttaagagatagtaatcttttgttacatctgatacaggcaaattccatttatgatgatggaagtgactgcttacctaaattcagaagcagaataattaaaatattacaaatatagcttctaagagactatggatattaatgtaacttctgaatataattgcaatactattagcattaaatttacattaaaaaataatggaaaatttgattactgttatcattgatattttaataacttcttttgtgatttcttgaaattaaactttaatgttaaatattaggcaaaatcatttttctctctcctttatttayrcataagtcagctagcaaatttctacattctggtttcattcacttgtctctgtatcttatagtttttttgcctgtaagaatacaagggtcaaatgagcattttatgtttcatggataactgcttccatgattgtcttctgaggcaattagcaaggatgcaaatcaatactaaatataataatggttttaaataatgattattgagctaaaacaaagcaattatcagttgatgataatcattgctgctggctataagttgatttaacttaagtgtacagaaaagtacagaaaataaatactccattgtaatattaaggacaaagttgatcatgtcactcccctgacttgtcacagatttgtgttttctcttctttttcaaatctctcttttctcctcaaaatctaaatcctctcattttttaatggctaaaacaatttacatccytctccaacccgtctcctaatgacgtcagtccatgggaatctccactctctctgaaatctcatatcgcttacagagttctcacctgctaataagcatatattcctcatgacagaaagttttgtattcctattaactctttcaattccttttctttttcttcaaactattctcagcttcttcaccaccactttgttttcaactcactttaacattttacttgacttcactataccactggactgctttaacaccaccaccagtattctcttgattgacaaattcaagatcaattttgtgttgtatttcttgactcayaaatagtattcagcttttatcacaaatatttatttttatattatttacgtacagcttctactaccctcttccaccaacaccatttatttagtgttatttcctaatattttcatggcaagcctttatcatcttaccatgcaccctgttccttagtgttcttactcaatattagggttttttttctatcctttaacttacacttcctgcaaagaatttaaatyccatttctattagtcagcaaactagtggacatttcctttttgatatttcacagacttttcaaaaatgatatattataatttactcattttctcctcacacttctctacttctaaataactttgtatcttccccactattacacttatcatgccttattgcaattgcctttttatgtcatagaatatgtcacagaataaacttccattgcttttgaagagtagagatagtgtttgtcagatggatagtgcatctggctattagagagcattcaatcaattttaaatgaatgactgtgaaagcctgaagtctttgggtgatttttttttcctctacatccaatcaatcaccaaatcatgacacttctatttattatgtgatgggacaaaaataattcatatgaaaatattcacgaccttgtctctttaacaaacaacataaccatccacgctttttacttccccttaaagataagggcatcttgctttctgaatgtgaggttaattatcagtacaataggaacttaaggaaaggagggcagagcaggagggaaaaaaaaaaaggagtgaagcatttgtcagaaacgaggtattgtaatgagaggatttccagaaattctccgtgctttggggtgcagggaaattgaagagtagagaaacaggtattttagaagtgtcattttgtcttatgaatcagactatttaatgttattaaggaaatatacgtgaagaacataattccttttaaataaagtattgtggctcttaaactgtgcttcttaaatgtatcctactgtgcatgtgtaatagtagcccacatagggctacaaatttataagagctagaaagttatatataaatgtcatgaaacagcttgctctttttttgaatagacttaactttttagagcactttaagattcccagcagaaattgaacagaaagtacaaagactttccatatttctctgtgtacaacttttcccaccaccatctcctacaatcaagaaaccagtactgacaggtcattatcaccccaagtccayagattacatcagggcacacacttggtgttttatatcctatgggtttcaacaaatgttgtattgtcattactttttaattatgtattaattttcatagtattaaatagaaaaatttcactaccctaaatatcacctgtgttccacctattcatccctctctccctgctcccaaacctgtgataaccaccgatcctttcactcactctatagttttgccttttccagaatttcatataaatggaattatatagtatataaccttttctgattagattatttcacttactaatatgcattttatgttcatccatgtatttctgtggcttgatagatcatttatttttagagctgaatgatatttcaccgtacagatgtaccaaagcttatttattcattcactttttgatggacagtttggtagcttccaagccttggcatctataaataaagctgcaataaaacatctgtgtgcaaatttttgtgtgaatgtaaattttttaactcattgagtaaataccaaggatcatgattgctggataatatgactatgtttagctttgtaagaaactgccaaattgtcttgcaaagtggctgtatcatttttcattcctaccagcaatgaatgagagcacttgttgctctatgtcctccccagcatttagtgttgtcaytgttttagattttacccattctaaaaggtgtgtactggcatctcattgatactttaattcgcaactccccagtaccatatgatgtgtaccatcttctcatatcctaaatggccatttgtattttttcattaaggaggtatctatttaggtttttatttcccatttttgaattgggttgtttttctactatggaattttaagagttctttgtatattttggaaaacagttctttatcagatacggctattgcaaatattttctcccagtttgtagcctgtcatctttctcttcagagtgtctgccaccgagcaaaagtttattactttaataatgttaaacgtatcaattctttcttttttggattgttccttttgtgttaagtaaaaaaaaatcaaggtcatctagatcttctcctatatgatcttctaagagtcttatagttatgtattttacatttacatttcaataaatttatatctacaaatagtctaaaattcacttgagttaattattaaaaaggttgtaaagtctgtgtgtaaatcactgtttctgcatgtggatgttctgttgtaccagcagggtttattgaaaaggctatcctttctgcattgcattacctttgttcttttgtcaaagatacttgacatctgggcatggtggctcatgcctgtaatcccatcattttgggacgccaatgtggaaggactgcttgagcccaggaattcaagaccagcctaggtaacatagtgagaccactgtctctacaaaatatgtatataaaaaaaattagcaaggtgtggtggcacatgcttgtggtcctagctatgcagaaggctgcggtgggaagatcacttgatcccaggagggctaagctgcagttagccatgctgtgatcatgccactgcactccagcctgggtgacagagggggaacctgattaaaaaataaaaaagaaaaggaaaacattaatcgacaatatttttgtgagtttatttttgggatcactattctggtctgttctttcatttacaccacggtgtcttgattactatagctttataataaaccttgaatcttgaagtttgttagtatctatcctccaactttgttattctcctttaatattgaattggtgactgtgagtcttttgctttccaaatatactttgcgtgttctttttaatccatattttcatttttaagtcttcctctggactattgtaactaattattaactggtctcctacctgctggctttaatccaccctcttagttcctcaaaagrtaactttctaaaaggaaatgtttaccatgtcagtcttcacatcgaagtatttcaatagttgtccaattttaaacaaatttaaactctctagaatttgagtaagacctttttatcttctattacctacctaccttttcaatccaatttcttgctactcgtttgtaaagagagatataggaactaggaataaaaggtacagaacagaataatattccagcttcaaagagtttgcattttaattggagtgatagacaagaagaaatgtaatattatgtatatggtgtaatagattgttagtattacacacacaaccaagcagggtttaggaagtgtaaggagggagcttgcaattttgcaccsggaaaccggaaacaactatactgaggatattacatttgaataaaagattaaaagaaatgaggacatctgccatgtttatatctggttcacaagtattctaggcaagaagaaacaagaagtccagaagcctagaagtacatatgtaaagaacacagcatgtttggagaatatagagaggcccagtagggaagatgtagtagaatacttggtagaactgtgtggaccactctgtgaatttggctgttactctaagtaaaattagggccgattttggtggtggggagttgatcagaggagagacataaccttaattacattgtaaaatgaggaccctggtcaatgtattgggaaaaaaatgatgtggagcaagggcttaggcagagatcaattagaaagaaatttcaatagtccagtggagaaataatgctaatttgtgcagaggtgatagccatgggaattgttaagatatgttcagattcaagatatattttatgggtagagccaatggatgggatgcctggtatgtctgacgggaaagaaagagaggagtcaatggccagccccaatagagatagagagaaagagagttcctaaacaaatttaaaaattaagcatcatttacttatatggagaaacagtgggaagaataagtttaggataaaggaaaatatcagataatcaggtttggtctcatttaagttggaaatgcccattagatttccaagtgaaaatatcacatatgtggttagatatacaaacaggagttggtaatagatttagctggaagcgtaaactttgaagtcaactttatcaatagtacttaaaactagaacattgtaagatatcccaaggaagtgaatataaatagaaaagagtagaagagtaaagaataggccctggggaacttcacatttagaaggtaaggattaagaaaaaacataaattgtgactaagtcataaagaaactgaaatatacgatttcctagaagcttactaaagatagtttctgtgcggttgaggggatgatcaggggtataaaatgccgcttataggtaaagtaagataagatgaggagcaaaaattgataaatggattttacaacgtgaagtttattggtgacatttataaaataaatttcaatgaagttgtgatggtaagcctgattggagtaggtcctagaaaaattggacttagcatttcaaacagttttgctgtagacaggaacaaaatatagcgatagattgtgaagtaagtgaatcatgataaaaaagaacagaatgcctgtgttagaatggatattttagtcgagaaggaaaatattattgctacatgggagtgtgaaaagtattactgaagcaatatcttcagtgagtaagtgataatgcattagaactggtgaacacttgttctagctaaggagggtgtccttagctagaatggataactcatcctaaagagaacatacactcacatagggaataagtgtttgagtgcttatgaaaatccttgtctgcttgctactgtgctctctatgaaatagaaagcaagattatcagatgagaacaatgaaaaggaaagaaatgttagaagtttgaagatagagaaaaatatgaaacagtcatctaggagaaaagatagttaatgaactaaaaagagatagcaagacttatcacagaattaaaagctcatttgggtctactgatcatgaatttaagtcagttgagtaatgttctatccattatcagaattgcaagtgtagatttggtggacagtgggatttagtcagttttgttttaaaaaatgtacatcatgaaataaaagagtgtaaaatgatttgagagtatataaaatagaattaatataataawtgattatggaatttaaactgggtaagggggattgtgaggccatgagagagagagtgtaaagttaaaggataaatgacttaaagattttagaggtttgaaatattgttgatgttggattaacaggtgaagtgagcaaaagaaatagaagattgtgattggatagcacaatatatgaaatattattaattgcttactgttatacaatgattaattataatgaaaagacctagcatatgactatggggcctgttaacaatagtagggagaaagaagaaacatttaagaggatgcataaaacctctatagtgttggaaggatcatccatatggatatctttattaccaataattattcatgagtacttttttaaaagcatgagagttttctaaaagataagattttctaggattaaaggagtttaacccaggtactagttggtaattgctttaaggagaagaggcaggtggtatggtttgataagatgaaaagttagaggattttagggagtagaaaagaaaaataggctattagtgacaatgagaaataaaaaggacatctaaccaatttcctgacccaatagtagactaactgggagagaaaacatataccagagagctctgaggtcctaaggggaaagccagatttcagttagagctaggaagatgaagaaaacctttggagaatcatttcaccatgtaaggaaatactttttctgatgattgaccatgatttctgctaagcacactgaaaggtttcaagaaaaagagagggtagggaatagsatcacaaacagtattagctaggtggataaggaaagtycttggagtgctgagtgtctttggtaactgatatggccggggataaatggcataatgaaggaagttgtgaggctcctgtttgatgagttaagacctgaggagcccaatacctacagcagtgatcatgctgtaagatttgaatgaggtgggaacatgcaaagaagggctggaattcttggtagacagctgtctctgacattgtgttgggagccttgatgwatttttaaaaattcaactaactttgcaatccacagataaagtattagtttgttagggctgccataataaagcactaaaacctgagtgccttaaacaacaggaatgtrttgtctcacagttctgggggctagaactagatcaaagtgacaacagggccatgctccctctgaaagtggtagggaaggatctgttccagatctctcttctggcttctggtagttccttggcttgtggcattctcccagtgtgcttgtctgtcacatttctcccttytataaagacagcagtcatattagactaggggcctaccctactacagcatgacctcaccttaactaattacacctgcaacmatcctatttccaaataaggtcacattctgagatactgggggttagaaaatcaacatattaattttagaggggaaataattcaacctataatggctgcttscaactttgtcattatgttttattctttttatagataactggcttggtttatgtttgtttacaaattttacatcttatattcatgaattatgttgtttgtaattttttttgtrttttctcttattatttattacwatcaacattatgttagtcttataaaataaggttgacagctattactcttatcatttctctgamaacagattgtgttaggttggaattacattattctttgaagttttgatgagatcttctgttgacatcagtgactggaggtttctttctggaaatatttttgactattcaaattctattttgctttattcattttgaggcttctctaaaccttacattttaataaagcaatattttataggaactttgtacatgtaattgtactgaagattaaaatatttaataacttcattaataattttcttttatttttttaacatctgaagcagatgtagtttactttctctttttcatttccatcagttatgtttgctttatcttgttttatcttcatgtcagcagaggtttgtcaaattgattagctgttttaaaaaaatcagcttcttgctttatttttctctctrttgtatttcttatctgaatatctgaatstgttctgctcatctttattgtttctttccttctaccatctttttattgttttattgctttttctagctttttaagatgaccgcttacattattagcttattaattttcagactttttcaggtacatgcttctaaaactcttaaatgtattttactcatatcttatttataattgtttttaattatgtttcttaaattttaaatacaggagcattttctagttattttgttattagttgctgggtacatggcattacagtcatagtgcatatgctccatgtgatttttagctctttaaaatttgttgagactccatttggggcttggaatgatttatttttgtaaatattcccaaattccctaatattttacaggtcttgagaatcatattttgcatatgtcttttagaccaaatttgttagtcatattatttaggtcttctttattttttttttattttttgagacggagtcttgctctgtcacccaggctggagtgcagtggcgctatctcagctcactacaagctctgcctcccggattcacgccattctcctgcctcagcctctagagtagctgggactacaggcacccgccaccacgcccagctaactttttgtatttttagtagagatggggtttcaccgtgttagccaggatggtctcgatctcctgacctcatgatctgcccaccttggcctcccaaaatgctgagattacaggcatgagccaccgctctaatgttctatccaatttattataaaattattcttgagaaatggtatgaattcttactctgtgattgggaatttataaatgttttattgtagttctgactatttttgctttgtaaatttgaggccacgatattggatgcatacacatttaaattttaatgtctccctggtgaattgaactttctatcatcacaaaataatttctgcatatctttttcatgattactttcacccattattttatatccattgtaaacagcatatacttggattttttcagtcaatctgcaaatttttgtttttgaaagataatttagttaatttacttttaacgtgattactaacctaaacagacctatttattttgtgttttctactagtcttatgtgctgtaggtttctactaaatttttttaattgaatatttttctcttattttattttttctccactactagttttgatgttgaagaatatgcatagataggtatattctttattggtttcactagaaactacaatatacacccttaacttaccaatatgcaaagttaactgatactatgacctttgcagaaaatacagcatttctagaacattttactccatttattcccttagtacttttatactattgttcttatttatttcaattatttggttttgattttaatccctcaggattttattattaccgtattctatactcamgttcatttagactaactgacattttatcattttttamcttcacttatatccagcaacttgaacatgcttcttacgtttgagaaattcgtgattatatgagtttccccctcatttacagatatcaaataattgttytccagcctccctcacagccaagtcatgggcatgcctactgaaagcagctattctgaaatacctctggctgactttgaatcagaagctagtgaatgagggaataagtgggtgcagaaaaaaaattccttttaggttgggggtcttcacctacatccatagtttaagggcaccaatagcagtggcacttgaagaactcccagatcccagtattgcccaggctggtcgtgcaatatttgctctatggctacttttcaaamtggacttttctgatatttgtgtgtgtgtttacatgcccttaaccataacttcagtagagtaatgttactaaacctaattaaggactattttttgaattacatgtaatcatctcgatgtttgcattccagttatatagtttgcatcttatattatagtgttatttagtactcatttatgacaaattcagtgatagttaycaaaggtttgttagtaccaaaaaatactttaacaaattttaatcacttatttagggaaagcaactttggaaargatttcaaaacatgaataaaaataaaatctattatatatatgtgcattttactcagaatgattaatctgagtatacttcattgcaagcacaacctcctaatgatacgttatctttcaaatyagctacaaaacaactgcatatgaacatgtattttcacaaattctcatgtaaatgataaattataatggaaccacataatgygacaactttaaaatataactatgaacaatagaagttggtatccagaaagcctaatttacaaataaattataatgccattctaagtggaaattgtagccacaattttaagttatttcaaatatagctcttgtgttttttctttctacctcacaattgagaagaagagtagatggagaaataatctaaaccatggtgtacacatttgtcttttgtatataagttgttcatattgttcattttatgttgattttggattcttaaaaaataaatgattaatcctttgagcagattcaaatatttagaaattttgtcatttcttgtaaatgaaattattacacacacgtttgcataacagagaaatataaaatgaaaaagcaaatttattttgccaaaacaaatgcatattattgtatatacttaaaataaaataaatatgatactggacaaatgttaatttgaaaccaagatgtatcaaaatttgttttagatatatatgaattgtagatattgtacctctcttcctttcagaaaaagatttagaccttaaaagttcacaaaaattagcagaatattaaacagaggtgatgttttattttttcttcttttgtgcacaacagtaacaaaaagatgtatattgaaaaacagaaataaaacttcagaagcagggaaccatacaagcaatataaaaatggctgttcattacaaatgtgaagaagagaattgattaaaatgtatttggtgtgtaattgtggcaaaattagtattttaacattgagtcactgatctttcgctgatgtcaacagcacgatgctcatcctgagagcccagttacctatactccctggacttatctagttaacactttctttagtttagtaacctgtcaatggagaacaggtgctgttggcctatttttgcaataaaagcaagagtatattgccctctagtgttgaaaaagttaggagaccaaaagagtgttcagaaatacccattaaaaaaatcaaattttttattttctcctttcacataaacgtgatataccgatagacaggttattatttcctaattctagaaaaaaatatcaaatataattaacaaatctgttttatggcctgttataaaaaaaggtgactggattgagaataaattatttcattttattatgttatctttctgtaatttaattagatcctttttcactttagttttggctgagtattttacaactttaggaaatattcattccttataataaattatcttctatcattattttggatttttaaaaaataaaaattaggtgtaaatatcattttttaaaaatgttttaaagtcaagaacataactctgtagaataggttattctattggtagaggtactttataggtcctttatagctgtgttttgtgcctagtaaaaatatatatttccttctctgaaatacaagagaaaggattgagtagtaaaaaattcattagaaaaagtcttctaaaaataacataaaaaattaatgattgaggtagaaatgatatatttatcattgtatttaaaaataatcagctgagacttttaaataatactgcaataatactgcatgttacacttaaagttggtgaagatggtagatcaaattttgtgtgcttaccaaaatataaaaataaaattaatataaataaatagataaattctgtggggacatataccaatattaatataatccagatttctccagacctacatatcctgtgactacaaatggggtctggttgataatcagtaaacttagagataatttggtgcaattggttttccaattttcaaaactttaggcttgattctgagatcattgttccaataaaaaactattaaaacattataacattgaacgtcaatttaactgacttactcaagattgttactaatctactgtgtgtctaatttagtattgggttatgcttgaaggaaaataaactaagtagcttattgtgaaaagagaagctttttatatagattrggctattgaaaatgtacccacagtcttctggggaagacacataaaccagttatgtaaaaatgcaaaggtattataaaaaagataaggacaayatattcttcagagatttagaggaagaaagactaccagagacaggcatgaataggaaaggcttgttattcataagattatagaattttatagtttgaagcaaacttacagttatgaaactcacccatttaaaaatttttcctacatttttgtgcttttatacagctagtatatgattcttgaaaaaaatgaaataatatagaaaatacaaaacagagacgatcaatattttgttgagcatccttccaaatcttccctgatgagkgtatacatggaaatagaaatataaaccattttatatccttcatttagaaaatgaagaaactgaagttcagactccttccatccaccacctttcccaacaagtgtctggagaaaagatcatttgagttgtaccttggggtagagaaagaaggtgaatatattcaagacataaatatggttattgttgttttggcataattgttttgtgcattaaatagcaggaagtttacaaaatgcagaagattcaattctaaataaatcacagttcctgccttggtggaaatccatgaataattactcatttaaaatgtctgtgttataggctgtactatgacagcattgtggagacagacacactcactaaactaacttctgtaatgccaggggtgacttttttgaggtagttttatccaagctgaatctttctaaaaatgaataagaactgattagacttaaagataaaagagataacctgggtcattccagaactgtaaatggttcaacacataaagtgcaggaataacaagatgaaacaatttataagagtaaactctcaaaaagcttgamtctgaagctaaagagaaaaattagggcagttgcttggattgggggcgggagtgggggtgagagtgacagaaaatgttatgaacatgggcatgagctaaacttcttaacaaaatgatacctggagtctccaactaaaataaacacagaacccagaaactaggaaaggtgaggaagtggtagggactgaagccattcagatacctgaagattataattacaaatgaaacatttagaaggtgtttatggtctacagatgaaacatttagatgctgtttatggtcaattactaacaaagcattataccagttttttaaagtccctagaaragagaggctgaagttctagaaaataggtggaggcaaaaaaaaaaaawaataactttagaagagatatacattatctatggaatcaggaggcagataaggacagtgagaatttttcagtttgggaaacattagtgggagggagtcagcttggctccctgcataattttgagccagttcaaccttcactttctgttttttttgtaaagtagaagattgtggagctagggagagggaccatgtggcttagaaagttattgaaatcatcaaaatagtataagttggggaaatagaaataaaataatgatgtatatttcaaagatgtctcaatcacatttccccttttattrtaactatcataatctaagtgtaaaaataagataaaaattatattttaaactgtaaaaacacattatacagaaaaatatagaaagaaataagaatttgttaatgttcattttatttttaatattatgggttttcaaaatttataatactttcaagtataaaatatacataaattttgttaagaaaaaaarcagttgagtttctaaaacattttcacatcatccttgctgataagttacagaaaaaaagtttacttttgaatgaaaatggctaataatattacatctaaacaggaaagcatatcatgatattatatatgatattatatttcctcagtcatcctttgtagcttccatataaattgtttatatggagtgaaaaaaaatcaagataggaaatcgcaacattgttacatagattagcagattaatgccaacacttttcacatgaactccattagcataagcttaagtcagtaactttaaaaccatccactgtcaaggaaaaatataagaaaagaaaaaaattctagagaagaaggggaaakaggaaagggaagaaacagagaacagattaaaacaaaataatttagatgtttttgctggtaataagagaaatacttgaatttgcagatgtacctggcaaataggctcttgataaatgttaatacatatatttgctgaatggatgtcagataaatgccttggcttcttacataaaagagaaaaataggagcaaatccatgattgaactgaattttagatagcctgtctggtttcagtttgattataaatgtcccattgtaaatattacctccaaatctatacaaaatgagacagagtcacagatttatcccaaagtcatcctaagtaaggtcctgaggaaactttctgaatgtcagaaaccctggggcagatctaagcattcaaaaattgtttaatcctgtttaattctggtccacacattctgggcatttgattattrttttagtagtataagggtaaaattcagtgatgaaatcttagctataaatataaatacaaagttccaagcagtgattaccagacctctcaacttggccacggatagcatttctactactctatctaaatcttatatggcaaagcagaagaaatmtccacataaaagtttctttatttgcaaaatccccatgtttttctaataagcaagatgaatgcatagaaatttgcagttgcttttaataaattagactctttatttttaaaaaatcatgtcctttctttgctttagaaaataagaactaagaaaatggtgaataggcactatacatatttctgcaggaaatggtgataaaagaaaccgcctgacatttactcttctatttactgagttgayttcataatcttttgaagtatgaatgtagctgatagctcagagctatgaacctagtataatattatgttacaatataatattatggtagtaatgttatcattatgtttgaaatgacacttttaggagtttgtactggtaaaaatgcacactttggggactaaaataaatttatattatgtcactgaaatcaagaatatatgaagtgtatggaagttaggtgatatcaactggttatttatgggtatagaaaagatcatttctgcagaaaattataaactgggcatactacctcgattttgattaaatataacaattactcattactttgtacctctattttgaaaaatttatgatttatgtagcagtggttgctactgaaaataatatcataatattttttggcctggaagctgaaaggaattccatgggaccaaccatgtgatatcaaccatttcatagtctcaactactatttaatcaatwttggatattttccaaaaccactcagaatcataagagactgcattgatctttagctaaaacctttatgatatttataattcttttaaccagattaaataatttgaattaattgtgccctactgagtagtgctcctcaaacacttttgaccatgacccagaataagcaataatcttacattggtatccaaatacacacacatgcatatacggacaccataacataaagtttcataaagcactacttacctctgctgtacatgaagtatgacaatatttctattctggtctacttcattttcacttacttgttggtgacctgtaatttgaaaaatactgcatctctcttgaaagatgaggtactaagtcattctcacactctgtggagaaatacccaagactgggtaatttataaagaaaagaggtttaattgactcacagttccacatggctggggaggcctcaggaaacttaaaatcatggtagaaggcatctcattacagggtggcaggagagagaatgagtgctgagcaaagggggaaaatcaccttataaaacagtcagattttgtgagaactcactcagtatcatgagagcagcatgggggtaaccaccctcatgattcaattacctttcaccaggtcccttctatgacacgtaggaattatgagaactacaattcgagatgrgatttgggtgggaacacagagccaaaccatattattatggccctgcccctcccaaatctcatgtcctcacattttacccttccaacagtcctccaaagtcttaactcattccagcattaacccaaaagtccaagtccaaagtctcatatgagacaaggcaagtcccttctgtttatgagcctgtataatcaaaagtaagttargtacttcctagatacaatgggggtacaggcattgggtaaatataccccttccaaatgggagactttgaccaaaacatagaggctacaggccccacgaaattctgaaatccaatagggcagtcattaagcttaaagttccaaaattatctcctttgactccatgtctcacatgcaggtcatgctgacgcaagaggtgggctcccatggccttggggagctccacccctgtagcttttcagggtacagcccccctcacatctgctttcacagttggtattcagtgtctgtggctttttcaagtacatgatgcaagatgtggtgaatttaccattctggggtctaggggatgctggccctcttctcactargcagtgccacagtagggactgtgggggggtggctacaaccccacatttcccttccacactgtcctagaagaggttctccatgaaggctctgcccctgmatcaaacttytgcctggacatccagacatttccatacatcctctgaattataggcggaggttctcaaacttcaattcttgatttctgtgtgccaacaggcccaacaccacatgaaagccaccaaggcttggggcttrcaccctctgaaacaacagtcagagctatatgttggccccttttatccacagctggagtagcctgaggcacggggcaccaaatcccaagctgcacacagcaggggggaccctggacctggtgcatgaatccattttttcctcctaggcctccaggcctgtgatgggaggggctaccatgaaggtctctgacgtgccctgaagatgttttccccattgtcttggtgattaacattctgctccttgttacttatgcaaatttctgcagcaggcttgaatttctccccagaatatgggtttttcttttctactgcatcatcgggctgcaaattttccaaattttcatgcttcgcttcctcttgaatgctttgccacttagaaatttcttccaccagataccctaaatcatctctctcaagttcaaagttccacagctctctagggcagggcccagtctctttgctaaagcatagcaagaatcccctttattccagttcccaacaagttcctcatcaacatctgagatcacctcagcctggacttcattgttcatattgttatcagcattttggtcaaagctattcgacaaatctctaggaagttccaaactttatcttactttcctgtcttcttctgagccttccaaactgttccaacctctgcctgttacccagttccaatgttgcttcaacattttcagggtatttacagcagtgcctcactctctgaggtacttgcttagtgtattagtccattctcacgcttctatgaagaaacacctgatactgggttatttataaagaaaagaggtttaattgactcgcagttcctcatggctggggagtcctcaggaaccttacaatcatggcagaaggtacctcttcacagggtgacgagagagaatgagtgctgaacaaaggggggaagctccttataaaagcatcagatctcatgagaactcactatcacaagaacagcatggagataaccaccacgatgattcaattacctcccaacaggtccctcctacaacacatggggattatgggaactgtaattcaagatgagatttgggtgaggacacagccaaaccattttagatggttacaaattttggaattcactccaaagaagcactggtgcagttaatgtatatgaacaaatagttaaatgtttatataataatttttgtgttttctggtttttgtgtgtttccagacagggtatccctctgtcacccaggctggagtgcagtggtgcaatcatagctcactgcaaccttgaactcttgggctcaaggtaaactccctgcctcagcctcccaagtagctggaactacaggttcacamcaccgcacctgcctaatttgttttcttttttcttttgtgttgagacaagatcttgttttgttgtccaggctggtctcaaactcctggactcaagcaatccttcagcctcagactcccaaagtgctggaattacatgtgtgagccacaatgcctggcctaggtaacagctttaattaaaaattctgtttcattaatataaaatatgagctaattctttatgattcttaaaagcmaacaaaaaaacgcatgaagcatgtaaaaacaaggtatataataaaatagttttctcacagccatcacgaaaagtcaaggtcagtgaaattattgcaaattcttaagtcattccaatttacaacacagctctttcaaatcaatttaattcacctctacaatttttctccatttttggtagacatttttggctttgaatagctgaacttttaaaattaaaataaaacttgctgatttgcagttaaattatttaattatgctgactgctaagtttttggcttcacttaacttaatctttgtttcttctctacagtgcaactgtagaatcctagtatcataaatcattagtagtttaatcttagttccgttcttaaaccttctaaattttaattttgtcattttaaaaatagatccataaagagtaaacaggatgatgaatacaaagaatatagcatagttactagcaagcagtagccatttattaaatgctggtaaacgtcgttgctcttgttctcaatttcagctgaattttcaggagcctctttagtgatctgtacagctcatcagatcaccttcaacaaagaaacaaccacacgtatatgcaatgtgatttagtatctagctttcttctgtatttcagcctttccaaaagtagcaataactacagtagtacctgtaattgctttgtttactaactcacttctctgctgctaccagagattactagaaatttaccatgattatgtggcaaatgaactttgcaaactgtattttagagaatctctaaacacattttgaaaatgtcaaaakgcaatcttataacagatatataaaacaatagtgttaatatcatcatataatattttctaatcttgaaagagagtcaaagattctaggagatatttattccactacctaggtgataagccacatttggaaggatagaaggtaaaaataagaaaacaaaaatgagaacaggaaaatcaacacctacaaaagcctccctttttttcttatcaaarcctgtgcaggggtcatgaagcccacattttgtgacaggttgtcatgaaaataatgagtagatctctccttccaaatttttaacgaaagatttattagaacatggaaagtcagattaagaagaattgggaccaaagcctgtttaacttacttggtttgatggttaataaaatagtttttccacagatggaatttactcagtaatccacatatttgtctgttatttctataatgaaaggtcaacatcaccatataaggggaaagtggggaaaggaaagctctcaaatgtttctgtttcttgctracttgtcccagggtcttcctgaagaagaaactaattaaggtaaaataaaaattttggtgtatcaccttagactacttaaaaataaatgccacatattttataccattatagcagcattttaatgtcttcgttattatcctgaagtaatttttttaattttatgtgactcatttaacacgtgccttttgaaaattaatctcaattgtcttattcgacttatggtaacgacktaagattcttatgttggttgctctccctatccatactcctgcatgccttttcccccaccttttcaagggtcacacagtaggtaagagattcaaactaatcacagactacacctttttggcatcctaaacaatgtcataataccatttcttacttcaggtgtgagacataggtaaacacttatggtatatcaagttgtatggtccaggcttcctcatctccacyggccagttttgctagggaaggakaactgggagaattgaatgggaaggataactcctttagttaaaacacctacattgaaaacacatatgtcttccatggtggtaatatgtatctatcattcttctaactctgaacatattactgttaaataaatttcacatttaaattttatttattctttgggttggcagattcttgccccatatggttttttttttaatttatttttcactattgcattaggaggagatagtctaaatatgcaaaactgacatattctcctttgtgtattcaaaaataaaaatcacatttttaatgtgagaagaagtaaagrttaaaccaagtattaacttgtcctacatttaatttctctccgaatctcctggttaaatttattcctaaaatactaagcaatcctccaaagcatgtaagtaggtatctgctcttattgggttatttgggggagttgtgtggatggggtgggtctgattttacatttgtttaaatagatttttaaattaaatatgtgagcttggataaatctaagaattgayataagattaataatctccttcgacargttccaaatatctttcactttcattattatyacacacacacacacamtacacactatatatatgtatatatgtatcttttaatgagtttttatttaaaaaatttacatatgaaaattttcaagcatacataaaagtagaggatataatataattgctttatatatttcagaccaaaccaaagcctttttattgctgtattccatttctttttagtaaaatgcaatccaatttggttaaagggagctgagttttgaaacaaagacttttgcaaagcagacaattacattaaagaatttcatttggctgggcgtagtcactcatgcctgcaatcccagcattttgggaggccgaggtgggtggatcacctgaggtcaggagtttgagaccagcctggccaacatggtgaaacccagtctctactaaaaatacaaaaattagctggacttgaaggtgtgtgcctgtaatcccagctactagggaggctgaggcaggagaatcacttgaccttgggaggtggaggctgcagtgagcccagatcaggccactgcactacagcctgggtgacagagcaagactccatctcaaaataaataaataaatgaaacaaataaaatttgtaaatagagtattagtaattccccaacatgtgggattcatttgtttttaaagtccatgtgaagtcactggggagactgcaaactggtacaatatgtttcacagtgaaaagctaaggtccacttatatatttggaatctgaagtgttaaaatatttaaaatatttgatgaaaatttttaattttttgaaaaagtttaaaagttattttctgacaaaaacaaccatttcaacatcatgcagatttttaaaacttaaattactaatgaggttaagtattgtagaacatagaaatataaaatgaaaagtagcgacataattttgcaatgtttaactatgtaatctaaaaagttttcagtcatcattaataagcattcatcactcagatcccccaattaaaaaataaagaaatccataaaatatccacagtgtgatagaacataccactcattaaaaagcatgctagtttaattctctctgatgtaatatgtctgatgtaatgcatatcttaaatatatatatcacacattgataacatgaactattttcacccaaaatagttatcctagggaaagtttggcaaactgggaaatcgaaaattatttaagtactctaacagtgtagagacagatgaagtaagcttgtatagaaagtaattcattgaagtcagaatcatctatacaaagaaaaacatctaataataatggaaaattatgtccattcgtgatgaagcagtttgggatttttttttttttttttttctgagacagagttttgctcttgttgcccagactggccaggctggcatgcagttgtgtgatctcagctcactgcaacctctgcctcccaggttcaagcatttatcctgcctcagcctcttgagtagctgggactacaggcatgcaccaccacacccagctaatttttgtacttttttagtaragacggggtttcaccatgttggccaggatggtatcgatctcatgaccttgtgatctgcccaccttgtcctcccaaagtgctgggattacaggcctgagccaccgygcctgtagtaatgtagtgtataatgggaaattttttttttaatgctgtgttagttcattctcaaatgactatatagctgcaactgggtaatttatgaagaagagctttaattgcctcacagttctgcttctcctttaaatatcagttctgactttaggtcatttctttgcttatgtatcccagtataggttgttagaagcatccaggtcactttttttgggcgggggttggtgggggcggaagagagttttgctctattgcccaggctggagtgcmgtggcacaatctcagctcactgcatcttccgcctcccgggttcaagcaattctctgtctcagcctcctgagtagttgggattacaggcacccaccaccatgcctgctaattttttttgtatttttagtagagacagggtttcactatccctaccaggctgatcttgaactcctgacctcgtgatccacccaccacttcttgaatgctttgctgcttagaaatttcttccaccagataccctaaatcatcacatttaagttcaagttccacagatccacagggcaggggcacaatgtagcatagttgttcgctaaggcataacaaaaaatgaccttttctccagtccccaataagttcctcatttccatctgagacctccttagcttgtatttcactgtccatatcactatcagcattttggtcactaccatttaaaaccagtctctaggaagttccaaacatatcctcatcttcctgtcttctaaacacacactctctcttttgctcctgcttccaccatgtgagatacctggcacccccttgccttctaccatgattggaagcttccttatatstccccagaagcagaagctgctatgcttcctgtacagcctgcagaaccgtgagccaattaatcctttttttctttataaattttccagtctcaggtgtttttttagagcaatacaagaacaaaataatacaaatgcattctacattcwttttttttgaactaaaggaagtgatagagaaatagaacatctgattcttggataaaaattgacaatgagtaagagttttaattcttattacaagagtaggcaaaattaggaaatatgctttgagactaacatgtcawtgttcttttcacctaagcgttctgtcctctgtttcattagcgagatctgagaatgcctgttcctgcaagaagaaggagcagtcctatgtatctgggctgtaatgctgaagagggccaagtggctccctgtgagtccagataaaggatatattattcaagagaaaaacttgtaactactctaaacttaagacagatttatttagtcagctgggaattccagagactcaggcagatacctaagagcatgtttaattgctctaagcccctgattcctgatttcctaattttatatgtatataatggttatcagttctgtagaatagttttatggtaactgacatactttgttaaagcttactttcttacttcttttcttttttggtgggattagttagaaaatgatctcaatacatgtttctatatacatatggatgtttaggccaaaataaaattgggttctgtgttctggaggttatcaaaaaatctactatactctaggtagttaagtctagactgtaaacatcaggttgttaatattttagcatattaacactaaaattatcattgctatatatgtttcttkagcatcagcatttatatagaaataaatatttatatttctatttttatcttagttattacatctctcctctctttcagattatgcttagaggattctgcagcaattctcagtattggacatattcaaaatctcctcaacgtatatccttcccatctatygccttccagctttaactcagttgtgctcccttcaaacattttacatgatttgcgatggttacatgaactctggggaagtgatatttgcaacatctcatactttattcactatggcactttaggaaacgaaattgggaaaaagcttccaaaacaytattctaaaaaatgaatcttattgtgaaacttcggagaagttttcraacattgattgttctcttagctaccttttgcttggtgagcattgtcatttctgcctattttctctactctggctacaaacaggaaatgacacttattgaaaccactgcagaagcagaatgcactgacatcaaaattctaccatataggtcaatggagctgaaaacagttaaacctattgacacatccaaaacggaccctactgtccttctcttcgtggagagccaatactctcaactcggtcaagatatcatagctattttggagtccagccgatttcagtaccacatggttattgcccctggaaagggagatatacctcctcttacagataatggcaaagggaaatatactttagttatttatgaaaatattctgaagtatgtcagcatggactcatggaatcgagagcttttagaaaaatactgtgtggaatacagtgttagtataatcggttttcataaagccaatgagaacagcttaccaagtacacaattaaaaggctttccgttaaaycttttcaataatctagctctaaaggactgttttgttaaccctcaatctcctttgctgcatattaccaaagcccccaaggttgagaaaggccctcttcctggggaagactggactattttccaatataatcattcaacctaccagcctgtacttttaackgagttacagacagaaaaatccctgtcatccttgtctagcaaaacactctttgcaacggtgattcaggatctggggcttcatgatggaattcagagagtactttttggcaacaacttgaacttttggctgcacaagctcatcttcatagatgccatctccttcttgtcagggaagaggctgacattgtccttggacaggtacatccttgtggacattgatgatatatttgttgggaaagagggaacaaggatgaatgtcaaagatgtgaaggtaagcttatttatagacaacatcgaaatttgtatttcacaatatggtacngataaaatattactaatatgatagattattaatccctaaagttttaaggtgcagtagagttgaaataagatagccatttagaaaaatattgaaccaagacttaaccattctttacacacacatacacacaccagaagcttcagaatgggacagagctraaatattaaaatatcccraagagttagtgaacttaatctctttgcctttttttttttttttttttttttctgaacagactcttgctctgtcgcccaggctggagtgcagtggcatgatcttggctcactgaaacctctacctcctgggtttaagcaattctctgcctcagcctcccgagtagctgggattacaggtgcctgccaccacgtctggctaatttttgtattttaagtagagatggggtttcaccatcttggccaggctggtcttaaactcctgacctcgtgatccacccgccttgaccttccaaagtgctgggattacaggcgtgagccactgcacccrgcctccttgyctcttcttaagtctttcccatcccagctagaaccatttagaacaacctcccttattatagtacatgctgcagtttgtaacagtgaaaccaagatagtcatataactctatttctggattattaccctgccaaatcctgccaaactcgggtttgaaaattgtggtgtaaatagaaaatggagaaacagcacaagacctttctataatctcaaacaagcataatatttgctcatatgaaatgttcagatatctgaaaatatagatattagcaaaaacaaatcattttatagggaatgtggtattggattagcctcaggtagctttcattattatacctattatttattcattgmattatttgggaaaacacagcagtgttactggtagcacttctaggttttgatcaattgactgaataacagattcagcctgtgattgctactaaataaaaataaagccaatatgttacactagattaggtgcacaattctaaagataatcatcttttaaacaatcttgatgcagtactctcacctgatcttttacttgtgactgtctcatcctatgtataactaaatttattttgtgtgcaaataattttagcaaacacataaaaaattagaggacacaactaagaataataaaggaatcaaagagtgttaagatgttatcgacgtttttggatcttctgttaaagtgtttatcttccaaagataaaatttggatacttcttcaaaataacagggtatttttttcatcctaagacctgatggccactgtaaagcaaaatgattgaaagcagtagaataagttcactttttaaaaaccttcaaagtatatgtgaaccaatgaactctgtttttaataagttcctatgaagcactgcttgactgtgacccaaatatttcattttgtgactgttaagaagagataaagtgaccrcaattgagttctatccagatttttctcattttttcttttacttttttagtatgtattatttcctttaattagtataaatgacagttttctttttatttttgaaatcataggcttaacaagaggacagttacttcaaaaggttctttgagtggttggttcctatcttcacaygctaaaaatatagcatttcctagtttcaggctaaagawcaatatgagttaaaaagttctttatatgtctaaatgaacttaaccagctcaaattcaactattkcactttttctcaatagaaaaacaaattgtcactcactgctactcaaaataatattcaaaagtcactgatggctatcttaagtgacataactccaaatagaatrcaataatttaacaaagrcttgagcaatgtmacacatggagagagaatcagaaaggctatgtgtgtgtgtatgtatttattagtatgtgttcatatggatagaattatatcctatatattgagtaatatataatatttatttatgtacacatattaattgaactgtgcttttgaagaaaatactctttactgcctcttttgttgttatttctggttctccctcagaattatttttatttttaatttttaattgacaaaaacagtatatagttttcatgtacwacataatgttttgaaatatgtgtaaataatgaaatgtttagatacagaaaaatgacataggaattaattatcccagatacttatcattttttggtgaaaacacttaaaatctactcttttagtaattttcaagaatatgatatattgttactattagaatctactataggtttcttcaacttsttcttccaatcaaaatgaaattttgtgtactttamccgaatctctccaacctcttcactctcaacctctgggaactaccattttactctctgcttctttgagtttaaattttttagactccataaaaagtgagattatgtatttatcttgctgtgccttgcttatttcacttaacataatgtcctctagttcatccatgttgtcacaaattacagaattttcttctttgtaatgtctgaatgatatttcattgtgtatatgtaccycattttctttatccgtttatccactgataagatgcttaggctgattctatatcttggctattgtaaataatgcttaaatgaacaaggaagtgcagatattgatttggtaagttgaattcatttcctttgatatatacccaatagtaggattgctagatcatatggtagttccatttttaattttttgaagaatctccatattgttttccatagtggctatactgtttacatttccacccatgtacatgagggttcccccttctccacatccctgccaacacttattatcttttgtccttttgataacagccattctaataggtatgatgtgatatctcattatggttttgacacgcatttccctgatagttagcgatgttatttttataaacctattggtcatttatgttttcttttgagaaatgtttattcaggccttttgctcatttttaagatgagttatttgttttcttactatgagatacttgagtttgatatatactttagtattacctcttaccagatgtatagtttgccaatttttctcccatttcatatgttgtctcttcactctgttgcttccattgctgtataaaagttttttgcttgatgtaattccatttggtttttttacttttgttgcttgtgtttttgggtcatatctaaaaatcttgcccagaccaacatcatagaagttccctctatgttttcttttagtcattttatgggcttagatcctacaattaagtctttcatctattttaagttgtttttttatatagtgtgagatgaggctctaatttcatgcttctgcctatagatatctagttttcctaacactatttattgaagagactgccctttccccattgtccgttcttagaaacttcgctgaaaatctattgcctgtaaatgcaagaatttatttctgtgttcactattttattccattggtctgtgtgtctgtttttatgctagtatcatgctgttgtgattactatagctttgtaatatatcttgctttgttttgttttcctcaagattgctttggttatttgggatcttttgtagtttcatatacattttaatatcttttaaaaatttttttctatttttgtgaaaaatgtccttggaattttgttaggaattgtattgaatctgcagatcattttggatatcatagacattcaacaatattaatttttctacttcatcagtggggataagctttccatttattggtgccttcttcaagtccttcaagattattttgtatgcttttctcttgctgctttcaagatcctgtgtctttgattgttgactctttgactataacatgtcttagtgtagtcttgtttggccttcctctgcctgaatatttgtatttttccttagatttgagcagttttattccattattttattaaataagctttatggctttttatctctgtgtttttcttgaacttctataatttgaatatttccctcagacctattaatgaataaatatgagaaatttgaatggaattgagaattgagaactatttatctactatgttacttatatgtccatagaaaaaatattctagtcacagtttttgctttttgactttattttttggacaaatataattttgtgggaaataatttcaattatgtgccmaaaagttttgacagtctcatattcttcattctcattttttttttctggtagtacaacattaacacactagtgcacaaggagaatttcatcctccttcaaactctaccccaattctagaacaatggtgttgcatagctaccgacaattttctatattactctgaaatagtataaaagaggtgttcaataggtattttaataggtatttcatatatatttcaattcatatgaaatacctatttgaatttgaaattcaaatgtcatccctatttcaaggtatgaaagaggtattctgttcctcaataaaacaaattaaggaaagcaagagtgttagggataaaaaatcttggttatgtttgtaactggactcttccttggccacttccacaattagactggaatagcaagagcattaacaacaaattcagacatagccttatcctcagtaccacctccctctatcaatgtgtgtgtgtgtgtgtgtgtgtgtgtgtgtgtgtgtgtgtkaaggcatactttcatttgaaccaaattttctattttgaggtagagattctgaatcatactgttaaagagtaaatacttttaaggcaaagaatattaatgtattgaaaagaatacgagtttatttwtattttttatttttttattttattttcattattagtattttttgaaatggagtcttgctctatttattgcccaggctggagtatagtggcacaaactcagctcattacaacctccacctcctgggttcaagcaattctcctgcctcagcctccygagtagctgggactacaggtgcacaccaccacgcctggctaatttttgtatttttagtagagacaaggtttcaccatgttggccasgctggcatcaaacttctgacttcragtgattcacccacctcggtctcccaagttgctgggattacaggcatgagccaccgtgcccggccagaatacgagttttttgactgaagttaaatgctcattatttctaatacttagatatawttggcctaagctatctacaatatatcttttttttggagaattattcatgccttatctcattttatcattctcttctccaaccaatgctactgagataaaaatcaatgtccttttgtaaggcaatcaaaattaaattcagtttcaataactttcatttgtttattaataaaatttaactgtatacctaaaaactcaagatatataagaaagattattcatgtatataagctcctagaaactaattatgtttttaaagatggtgaaatattatctatcaattaggtcagagatatggtcatgttttgacctgttaatattcctgtggcccttaatgccatcaccctcctcccaccctccaccctccagtatctgtcattcccttctatgtgtccatgtgttctcatcttttagctcccacttataagtgagaacatttgttttttgcttttctgtttccawattagtttgctaaggataatggcctccagctacatccatgttcctgcagaggatatgatctcattcttgttatagtattccatggtgtatatgtactatattttctatatccatcctaccattaatagacatttagatcaattgcatatctttgctattttgaagartgctgcaatgattgtatgcatgtatgtgtctttgtaataaaatgatgtatattcctttgggtatatatacagttatgggattgctgggtcgaatggtagttctgtttttaggtgtttgagggattgccacactgtcttccccagtggttggactaatttacattccaaccaatagtatataagcattcctttttctccacaacctcttctgcaactgttattttttaacttttatttttatttatttacttatttagagaaagagtctcattctgtcacccaggtgggggtgcagtggcaagatctcaactcactgcaacctccacctcccaggttcaagcaattctcttgccacagcttcctgagtagctgggaatacagacgtgtgccaccacacccagctttagtagagatggggtttcrccatgttggctgggctggtcttgaactcctgacttcaagtgatctgccctcctcagcctcccaaagtactgggattacaggcatgaagccatcctgactagtgtgagatgatatctcattgtggttttgatttgcatttctctaatgatcagtgatgttcagttttttccatatgcttgttggccgcatgtatgtatacttttgaaaagtgtctgttcatgtcatctgcccattttttaatgggttgtttgtttttttcttgtaaatttgcttaagttccttatagatactggatattagacctttgtcagataaatagtttgcaaaagtttcttcccattctgtaggttgtctgtttactctgataaaaccaaatttcttatttcaatgttctttgtgagccarctcaagtttgcatttcaatatctatccttcccaattctcaatatgcactgttttttgttagacttgcccactatatagttttcaactatgactrtctcatgtctaccatgacctatttttcttarcttctatgcctttactaaaatacttttcctgaatctacccacattttaagttctactttttataagaatatgacacatcccctaatgactccagcagatggttatttctttttaacttgagtccctgcataatyactgaccttaattctcagttagcatctttatgtatataagtcaactccaaaattaagaggtgacagtttttctcatacatctagttwtgcctcaaggaatgtattacacaaccttacaaatgattaaaaaatatttaattgacaattattatattgtcttttaactggtgagggcagaatcaattagtaacataactgatttactttctttttcttttctttttttttttttttttgagatggagcctcgctctgatgcccaagctggagtgcagtggtgcaatctgggctcactgcaagctccacctccgggttcgtgctattcttctgcctcagcctcctgagtagctgggaatgcaggcactcaccaccayacccggctaatttttttgkatttttttttttttttttggagacggggtttcaccgtgttagccaggatggtctcgatctcctgatctcatgatctgccctcctcagcctcccaaagtgctgggtttacaggcgtgagccaccrcacccagccagaactgatttactttgtaaagaaagaataatttgaggatagttttgaacttcatcttgaagcaagtgrtttgtgtattttgcatataagacaaaagtagaaaacaaaatctgtattataaacttggagtccaaagctagcaggctatttggtttgattttccttcctacgtagtgttttcaatrgatatgaacctaggctggtattaaggcttgatctagatacaagtaatttactgatgtcttaacatgaacgttttcatgcctttattttactatgtattttatgagttgaaaaccataggctcaaaactataaagtgaaaaagtaatatattgtacaaatttgatgatgaaaacaaagatgataagttaacagatatttwaaaaaaacagttaatagagggtcttgaaaacacagggaaataagtttcagttagttccaacagccatttgaaatcttctctttgtagggacatggatgaagctggaaaccatcattctcagcaaactatcacaaggacaaaaaaccaaacaccgtgtgttctcactcataggtgggaattgagcaatgagaacacttggacacaggaaggggaacatcacacactggggcctgtcgtggggtggggggagggaggagggatagcattaggagatatacctaatataaatgatgagttaatgggtgcagcacaccaacatggcacatgtatacatatgtgacaaacctgcacgttgtgcacatgtaccctagaacttaaagtataataataaaaaaagaaaaacaaaaaaaaaagaaaatgataaggttactatatttaagaaggactcttccattagtaatgtaaatatctgaaaaaaattccagtcmaaatatgtttaagaattatcatatcattaaacmggagacmggttgytatgaacagaaaagaagaaacctattataaaataaaatcttaaaatttgattcctaatttgaataagggttgaatgagaaagaaaaaaaaaacctcaakattactaagtttgtgtctttagaaaataagacattatttatcctatgaacgttagtacagaagatgagaggctacactggtaaatgaaactattacttttctatattttatgataataaataagtttgttgtatttggtaaactagtagaaaaatctgtttttagaatatttcatacctcagactcaatgaggtatgaatcattttcagagttagagataaacacaaagtctggtttgtggtaaatggaatccagatttgatgcatatcagctagtatagatttagtaatgcaaaggagtccaggcagcaagaattgggtggatggcccagccagtcaagcaagcagtatgtgaaagttgctggcagtttctaggtgggtgacccagcatgcaattggcaagtgtagcataagacctgggcaatggcccgggcttgcgggaatgagcatttatccaagatattcgacagtggagagagggtaccaaatctctggattcagttctatgggyagcagtcatcttgagaaaaatggcatagacagcagtggcttactcctggaggaaatgtgggattggataattacatcacaatgtggagtttgacatagggcacacaayagagaatgtggtagttaggagctcagtcacagcaagcctgtgcaggagagaggagccatcagcaatacttccctgaaatgatggtcttgataycctgttatagaactccctagatctcccttgtcagggagggattacatttagaacatcatgaaatcttwaggtgcccagctgtgagaattcaatgtactatttgaaagtcctcagttgatcaaggagaaaaacaggcagtatcaaaggcttataataagaatggtttatattccatgtaaacaaagagtatcactgtgtcaattaaattgttttrgtaagtagaattttgcttgtttgaaaagagaagctctattttcatgtattttggcagtcagcagtgacctcagagaacctcaaacttacttgcaagaggacagttactgtacaggatacagttaatcataatttttcttttattgaaaatatcattgtaagtaatctaggttttcatttcttctgaattatttcaagtagcaccacacatttaactttatcaatggaaggaaaagtcatctgttttaaagagattcctttatggaagcaaatagggttattctccacttaaaaaattgccaaaattgtataaaagtacattttaaaataagaattaaaaagttgagaaaatacataccagtaataccttttcctttgtgaatcwgtctttattatagagttcayacaaatatgtaaagtattcagttcctgatttcagtagtagagacaggacatattcacagttatctgcattacaaggcagaatgcaatatatatcatgccaacatgattgtacacaatggggaccaagacagggtgacagtaattattcctctaggaaccaggagtgtttaatggaggatgcggtatttgagtcttctgcgatcactggacagaactgtagcaaagctagctgggcagtgtattctagggcagtggatcagcctaagctcagacttggctgaaaatatcaggacatttttgagaatggtaagttgcctgtgttaattgaattayaaggtaaawgagaaatagtgggactaaatgtgggtgctgtttgtggccagaatataaatcccctattctgttatagaacgtttgcctttattctgttgaaaataggataccactggagtcactcaggatttttaagccagaaagtggcataatcagagttggaattgaaggaaaatatattgtttgaaccagggagttgttttgaggagaccaactaaataatgttacaataatacaatcatactaatgattgtatcttaaaataaggtattcattgagcatattaatatatgctaaaatgtgctaatcatttacaagcccaaacaatattaactatatccactttgaatgaataaaatgaggcttagcgatactaagatagttgtctaatatatggctaataagtgacagaacaaggaacaaacccagaactatctatcttgaatgtttaaactctcttttaaamgacaagggcttggcttgagtttgaatcttaacttctgcacytactagtttaccttaacctaatctcttcaaccctcataccatatatctgtaacaccaatgtaaagaaacccaattcagaatattttggtgagcattaaagagataaggagtrgaaagtagctaagacagagtttggccggtaagatagactcagcccatcttggtggtaaacaggatagaaagggaaaatcaggaaagtcctcgcagaagtagaattgacagaatttgaatatgtactcaatggaggagcaaaaagaaagctggaaatacaatgtcatcactattgttttcagcctggatgtgttcattaaaatgtatagaatcagacagaggtaaagatgctggaaggatgaggagtttgatttayggtctcataattttaatgggttaaggtctaatgatttaacatgggcatccatatttgtcttctgaaacaataaatgtagattttctggccccattgggttggcagtgtacatttagaaatcatcatgcttaacacttgcaattttaatggtaatcactaaatagaaatatatcaaagaagaagaaaaacagattgaataaagtatttgcaatattcggtgataaaccaataacaagttagtttcacatagaggaaaaatgtctcatgcactgagatagtagcctcttgtatgcctttcattggttataaggaagaaagcatgaaagctcagtaggtacaataagtcctcaaagaaagaaaattaaaggaatgcctgactcaaaagagaacagtgtttatgaaacaaggaaattacaatatttatctggaatttggaatttggaactcctttttctccttcctatttatgactccttgatgaataagaatttcaacatgagtgcctcctaccatcactgtgagatgtaccaactgatactgtgtcacaaatattcctaaacttagggtgttgtataggggttaagtgtcaagacaacaaggaaattaaatctttacttttagttgttctgcctagaaattatgatcgattgaaacaattttatttagttttatgtgtttattttcttgaggacggagttgcaaagatgtctattttttgttagaaacaagtggtttataggcatgctttcattcatatttgtttcctgtgtggcaaccagctattaatttttaaaaatatacttttcaaaacaaggcctctgacaatgtgaagattttctgctcagaatatttttactgtttttaatgcaaattaaattttaatttaaaaattggacattgcctaaatttattaatactcaaaacaagctacatagtaatggatctaatactaacgttaagtgctgactttggttactttacagtattagataattacggagctgagagcaatttcttgaaacaccagggadgaagacaattaatgtccatgagttccatttcactagtcaagttgtagcmattgtctatgtgaggaaaagaaagtattaagaagtattttggtaaaaaaaaaaagtattaagaagtatttggtaagaagctagcaaagtctgagcaaggtaaaaaagcaatcttttataagagtccttaaatcttgtggttaatgctttaaaagccctgggggaagtccactgggatattttctggttggttttctatgctttgtcattctctgtggcgagataaattgtaattaattygacaattaattggctcagattataatgagcctcctcagctaaagccactgtgttcctattatgatarccagcaaaagataccacaaaaaggtttcatatctaaagaatgactaaagagaaaaagaaataaaacaaaaatttgctattttcatgctccttatagaaatacacatggtgccctgaaataaattaaattatcatggaaaatagcaactagtttacaaaaccctgagcaagctagaatatattttcattataatttagaaaatagtttaagctgttaaagtagtcatagacattgtcttttatttttattcaactcatcattattcatgtgtactctgagcctagctctagagcattgctgggattgatgatttctacccatcactttttctcccccaaataaatcaaatagtcttctgatgtcttttctttatttttataattttgaagcatttcctacattctaaagagtttgtataacaatttctataacttaaaagataataataagaacagtttggcacaaaccatttagtttagaacagagaataataccaccacctttccaatcacgtcacttttttgctaccactggagaggcaacacatatcctgaatttcaagtgtatcatattcttagctttcttgttacttgtatcacrtaagaaagcamccctaaacaataaattgcttagtatctagatgttttaaatttgaatttatataaatatgttcctaccatacacattttcttcaaattgctttttctcttacttttactcgtatggctcacccacattgatacctatagccctagtttactaaactaattttctttgtagtacttactatctccaatgttggtattgtcaaacattaaaatttttatattttcctgattatgtggatgattagctattcttgtatttaatgactatttcttttttatgtagtttgcatactctgtatgcctttttcttgttttaatttagaattattttatattttatattaattttttaaagttctttagatagtctgcatgttaatgcctgatatgcttgcagatatcttctcctaatagtatatttcatgtctttttatatcttttaatgatgatatttgattcatacaacaacttaattttattgtagttaaatatatcaatatgatcatgcatcgcttgtgggcattttttcgtgtgtatattttgtcacctctagaagtttgtatactggccttatttattatttaaagatcttctaaaatgatctgagcctaaaaatttaattttgaaatgtgttaaaattactttgtttgcttacggtatattctttgttgttttgcttatggtatattctttctcttacaatctttatgagttatttgcagtttatattttcaaaaartatttcaattgccttgcttaaaaattctagttttgagttgttcataacagatcgttatgatactttaaaactctctacccattgactatgtcacattttctttttgagtgttgttcatttttgttttctctcctgattgttctrtttgacagaaattggctcacttcattttcccttttcttaatcctcactattttgccttccttttctgtttcaatgtttgctttttcctttgtgcrttcattccttctataatttttattttattctggtattckttccatgtcttcctaaaatatatgattaactaatgaagtgtcacttttttcctctcatataagcatttaatatcatttatttaaagattacaatttcaactaagtgtgccatgcttttttaaagtagtttagctattagcctgcaattttgaacactgtctactttttttaaaattatactttaagttctgggatacatgtgcagaatgtacaggtttgttacacagctatacatgtgccatggtggtttgctgcacccatcaacctgtcatctaggttttaagccccgcatgcgttaggtatttgtcctaatgctctccctccccttgcccctcacccccgacagaccccaatgtgtgatgttcccctccctgtgtcaatgtgttttcattattcaactcccacttatgagtgagaacatgtggtgttcggttttctgttcctgtkttagtttgctgagaatgatggtttccagcttcattcattttcctgcaaaggacatgaactcattcttttttatggctgcatagtattccatggtgtatatgtgccacattttctttatccagcctatcactgatgggcattagggttggttccaagtctttgctattgtaaatagtgctgcagtgaacatatgtatgcatgtgtctttacagtagattgatttttaattctttgggtatatacccagtaatgggattgctgagtcaaatggtatttctggttctagatccttgaaaaatcagctcactctcttccacaatggttgaactaatttacactcccaccaacagtgtaaaagcattcctatttcgccattctaactggcatgagaggatatctcattgtggttttgatttgcatttctctaatgaccagtgatgatgagctttttttcatatgtttgttggctgcataaatgtcttcttttgagaagtatttgttcatatccatcacccactttttgttgaggttttttgttttttcttgtaaatttgtttaagtcctttatagattccaatatcttatttcaacgtacccaaatataaattattctaaactactaattgaaagaagaaaattagctcatttcctttctrtaatgtcatttgtgtaatttaaacaattattttaataatttaaatatttataaatgccatgttgggactacactgaacaaagtaactttgtgtatctctstgtgtgtgtgtatttttgtgtgtgtaaatgttcatttgaaatactgctgctagaaaaaaaggtatcattattacataaactcccaaatttatacagtcttcccaaataatatttaacatatacctaaggtggaccatcacaattagttccctattactccttgcattcatgacataaattttaaagtataatttattttaaatattgaaactctatcctacttgaatatttaatgcaaattttagttcaggtttgtacagctattttaaattttaattttgattataagtctctcacagattatcagtaatagtttacttaatttcagttagagtttttatgatgcttaaagactactacattgacstctcaaaatgaaaatgcatttttcattttcacagtgtaagagaagttatagaartctacagtaaatagagttaattcctttcttagaaacttttgccaaattgagacatcagaatgtttctgctgagagttgctcaccctaaaacccataaactttttttaggctgcacaaatgaagaaaatacctagcaacttttgtagaaagaaggaacacattgattggcatccatatagcacttaccctacagtataaattaattccccttgaatgatttgtatgcccaaatagccactatttattactgcacagtattagtctctgtaggatataaacaatgaaggcttgtttttatgtagcaatatggggacagtggaacgggaactatctgagaaaacagaagaaaaccaacatttaaaaataacagggttgcagaggtttagtgggaataatcctcaaggtaggagatgccaattagttcctatactgaagctttagagaaagctaacctagtaagactgagtaccagaaacactattataaaagttataagagctattgcaacttctcctcatgtgtctgtgtggaatttctttcccttagttgctactaattaaaaagtttagaaaaccttgaaatgacttgtcttacttctaaggctagtggagaatagaggaacatgtgaatgtacccgctttttaaaaaagaaaccaagatacaacattgcaaagtgaaagactagaaaaagcgggttaaaagatagatggtctgtatgaaaaaatgtctctagaagaattttttaaagtaaaaataatagaactccttgggttaataattttgttcacatctttgagattttcccagatgtaggttcttagtgcacatctgtatttattctcagctctcaagcctgcagaaggccaaatgtatttctttgtaattctccttgtaaaatattacatccaaggatagtcacatgtgtaccatatgaaacccttttccatatgaaggtaatcacagtgtggagaggagatattttgcatgtctacaaatatggagatggggttctgtaagcaatgagacaaaaggtaactttcatttatttcattagattgtattgttcattccatacctaacttaatgtcccttccaatccatttctaatctgttttctttggttatgattaattctcatattaccatcttgttggtacaatcagaattcagttgattgctttgttttcttttggttcttggggataaagttattacattttggagttactcatcatcccactaaggaatgtcctactacttttctgttcagtgctatgtgataatagaaagatatgagtgcttggttcttgacctcaataaatctaattttgagcgtgtgtgtgtgtgtgtgtgtgtgtagcttcagaactctttccacagtttcagctattcccatctattctgactctatgaaaccatttaatttttttaaataaaaaagcacaattagttttactacctgctaagattatataatttaatgctaagcttttcttactgctctaccttttaaaaaataataaaagtttggagctcctgtggagtacaatttcactttgtatcattaatactgaaaggaaaggaaattgaaagagaccttgaaattgaaactggttctgaaaatgttactttcaaacgttgttgcctttacctcaaagtaggagaaatcagttcaaagcattgtgttctatagaaaagcacatctttattttaaatgtcttaaaatttaaaaaagaaaaagaatggagggagaaaagtcaaactatattctaaaaattcagtacaaacagtaacatttgtcaggaaacaaacataattgtttacrtattggaaaacagcacatggaaaggagataaaatatcatgctaggatatttagctcatccaaacttaaaaagcagtcaatataatgattaacttgaaagcccttgttgtagtaataaacccattacaaaaattgtcagatctgctgcatttccattggcaatggtatgattgaagttgctttgccatccaaatacaagtacraggatatacacttagggtaataacatgattgaatatcattaacattatacaaggaatttttaaaaagtcacattcctcagtgacagtaatggcttaggtggttggatagctatgaaaaggtaaaagtatcatttctctgtgtttacagaggagacacattgcctttgtgagctccacactcatttcattttaaagaaatataaatactttctggatgttttttgtcagcgatatttcattaacagaacgtgaaataaattcaaagccattttgcattttctatgttgacttccaagtggcctttcatgattttaaaacatatatacatatacacatgcttacagwtatacatatttacatttgcctactagttttattaatctttaatattccatactttttatgagccttgcaacagtgatgtaatatcatgcacacatagtatatatattattgttaagcttacattcaaaaatrratatgatttaatctattaatttcatccattatggagataaataggaatttcatatctgaacactgccctttttggtgtgtgtgtgtgtgtgtgtctgtgtgtgtgtgtgtgtgtgtgtgtgtgcgtgcgcacgcatagctaagtggaaaatttctatctacaaataacaaagccagatacgtgtataaaatcactcattcgagtactatggctgaatcgatgtgtactataaactaaggttcagttataaacgttagaaataatacagaaatataaccaacattgtctgatgtctgccaatagtactttcaggttggcatttttctgcaggccgctcatgggttgctatattgctgggcagttctctttcttctctctctcctcctctcctttcctcattcttcttctcttccccttcccggaattctgccttttcatcactctctttctcccctcattttctccttcttctctctctctggctctgtttctccttcctcctcccagttgcttaatgtttatactagaatgccagtttgaaataatctgttaccaaggaaaattcaaaacctctttgtttagctatcttctcttcctttccagtctttgcacttctacaggcagactactgtaccactgtacctccattgatatatttgctaaccacggaccatttactccagagaaaaacatttcttataaccaaaagaagcatcagcctctgggattatataatgtcgaattacttacatatgtaaattcatcctgttttaagtaactacagtgcacgagcatgtatgtttggggaaatgtgtgaaagagaagtagaaagaaaaaatccaacaaagtgaaaaaaaattacccaaaataatggtcctttttcttatcaaaatttgttattactgttgttattactaggaattactawaacatagttttcaaaattgatctctgaccgtaatcatccaaaaacatgaaggatttctttttctataatttacatttcataaaagaacatcaattggtctttggaaataaggaaaccatattaatgtgaagagtcatggtcttgacagtctataaactgcttaaatcatagtaaaaaataaatatttttttctgagcatgaccaaaaatgcagggaagagtttggttttatggagaaacagtagtttctaataaaagttggatggttcattgtgagagtggcattctatcatgcacttggtagagggaatctgatttcaagtttatttcctatggacaatgaaatggcctttcacaatgctttatgaaattacaaatcatttcagttgttccctggttgagaaacttaaattaaatggaaaataawctacaatcaacagttgtttgaaactaagttagctctatcaacatcatcatcactcttacatgattacaagtaattttggagcctataggtgttttactctttatattataagctaatactataaatgtttttgagacagggtctcaccctgttgcccagactggagtgatsatagctcagtgcatcctgggcctcccaggctcaggttgatcctcctaactcagcctcccaagtacctgggactacaggcatgagccatcatgcttggctcatgtttatatcttttgtagagatgaggtttcaccatgtttcccaggctggtgttgaactcctgagctcaagccctctactcgccttgacctcacgaagtgctggaattacaggtgtgagccactgcgcctggcctaatagtrtaatataatcataatgcaacttaatattaattatattatcagtaatgcccttattagtatttttcaaatttgaacattttacaagtttcttttaaaaaatatgacacacagtgataatttaaatctaatctgatgaacgatattgctgcttaaattaaatgttgcccacactgtgagtaacatgaacaatgaatatgggattatctgctgcacagagattcattacagttcagcttgcttatacttactctttctggctcatttgtatatcttgctggcctttaagtggtgccagcttaccctttatctatcatccctctattgtttctcattaacctacagagtcaagtattactttgcacaaatttgatttaaaatacagactcaaattaaacatattgaaatcaccagcattgagccacagtaataagttaaaaaggcccccaaatctatttggactcaataaccgatatgatcaatgacaacttgaactcaggttaaagttgctttcacttagtttgctatcaratgaataaacaacaaaatgatttatacatatcagtaacacaagtgtaaagatacaacttcctgtttattcaagggtgtgtgccaactttatatttagcaacctaacaatggaataagccagtgatccccaatctttttggcaccagggaccagtttcatggaaggcaatttttccacagacgagaggtaagaggatggttttgggaggattcaagtacattacatttattgtgcacytcatttctattattattacattgtaatatattatgaaataattatacacgttaccataacgtagaatcagtgggagccctaagcttgtttccctgcaactaaatggtcctgtctggaaatgatgggagacagtggcagatcatgaggcattagattctcataaggggcagacaacctagattcttcgcatatacagtttacaatagggttcacgcccctatgagagtctaaggctgccactgatctgrcagaakgtggcgctcgggtgataatgcaagtgatgggagcagctgtaaacacagatgaagctttactggcccactgctcaccctctgctatgtggcctggttgctaacaggccacagactggtactggtccatggcccaggagtggaggaaccctcaaataagcaaccttccatgtcaaaagatgggttctggattttcttaatgttataaaactatctgctaaggagtaggaaccacatcaggaaacaaggagctaaaatttcaggataatactaacatataaggaaattcttgatctgtaattgtcaggtctatacaataaactcatagtgcatcactgactgccattggttttcctctggaatggtctacaaaggaagctgcatacacccccattgaaatgtcagaagaaaatattagcatttctgctctttaggctttatctcacttttccaataactatattttgtcttatatatgttaaaatctatataaaataaaaaaattggtgayaatatttcttcttgatttaacataagcattgcactttttataatgattacttctttaaaacataaaatttcttattgtatcagtgtatataacttagaagttgtgtgcccactagagtaaatatccaaagatttattctagtttgaaaaatactgctctaagtaaatacaccaagtcataaagaaaataattcagttcagctagtttctgtctaatagttcttccttatttagttaaactgatatgcaagaactccctccagtgattgcttgcctcatgatagatacaggagttctgtttctttgtctagttttccaataattctactattgaaaataagcctgccatatattatcttcttataatatgttgtatcatttttaggtatattatgttttaaatattgtaaatatttattattaaatattacaaaattttaaaactttaataatctgcgttatttcttccttcgaaggacatcacagtgacctattatcatttagagaaatacagtgggtaacatgcttagtagatacaaaactctttactaagagccaaagtgattaagatccattaggtttctaaacatatgtaatagtgtggaattactaaacaaaaaataacyctttagatttttagatacatttcttacactcagtgtaagaagaggtagtatgattgtcataactgtgttgttacaggaaggtagagaaccagtagaatgttgatcaaggaggtcagaagttcagagacatttttagggaaccacatacatcccaagtcatggtccttctctctctgagttgactgctttattttcctgcacagtgtaaaaacatgttaggacggtagttattgtaacacattttggtgaatagtctaacagatttttacattcctaggaaagttgtcatatctttgagcattgttttgtatgtgactgtgtttatcattcaaacatcaaaagtacacaagcatatagyaaaatgtccccagagtgcaaggactgagaatttaaaggccagtgaaattgcacaggaaakggtgtggcaggaaaaaggatatatatgcaggagtatatactttatatgaacttatataaactagatgaagagatttgggaatttgatagcattaggtttcagaaaattacttaaatgtaaagccctgagacaattatctcatcatttaaaagaaaaagtccatcctatttaagtacattgagtatgtttttctgaaattccattactaattctttactagtgttaaaatgttcatcactggttactatctagatttcttcgtaaataagacaacacaattttatttaaattgcctgtttcagctgtgtttgttgctctctgggtctgagagaaacatgtttcattcagttttactttcagtcaatacattatgtctcccataacatattgtggtgcttccatttattgatatttcagcacatgctcgccaccctaatttttccaaaaagtcttatttccttctaaacatgtaccttttgttcgaggaataaataaaattttgagaaaaaagtattgttattttccctttaacgtggtttacgtttgttgtgtggcttttctgcagcagaaatcacaacaaaatttacagtgactactgttttttcgtaaatatcttcctctagacaggtacttaataattaggctcactgggctagaatgaaggtgttaacactgtacagtgtttctagaattaactgaatatttgttgaatgaatgaatgaaggagtgagttgtattagtctgttctcatgatgctaataaagacatacccgagtaatttacaaaggaaagagttttaattgactcacagttccacatggctagggaggcctcacaatcatgaaagaaggcaaataaggagcaaaagtcacgtcttacgggagggcaggcaagagagcttgtgtaggggaactgccctttataaaaccataagatctcttgagacctatttactgtcaggagaacaatayggggaagactcgcccccatgattcagttacctcacaccaggtccctcccaccacacaygggaattatgggagataagatttgggtggcagcacagccaaactgtaacaygaatggataggtgaatagagtactttatcctgacaaactacaaggatgaaaatttgtatctacctcttttcattatgtatcttctgaaagtaaaaaagttttaggagttaaaatggtgtttaaatctaattgtctactgacattgctggcttgtggaacaatgaacacacaactgctgattttaaaagaaattccgatgaaagaaaagtgtttctgtttgaatttatgtaaatattaattcaatctatcaatattcgggaagctcaagaccagtttaaatatataatactatttaaaaatagacaaaagatctgaacagatgtttcttaaaagaagacatacaaatgactaacaggtatatgaaaaagtgctcacatcactaatcatcagagaaatgcaaatcaaaattacaatgatatatcatcttacctcagttaaaatggcttggatcaaaatctgatgtggatatgtcaatatttttcattgaaacttttctgagaatgtaaattttgtttgtgagaatgtaaattctgtattgtgagaatgtaaattagtacaaacactatggagaatagtgtagaggctcctcaaaaaactaaaaataaaacttccatataatccagcacttccactactgggtatatatccaaaaggaacaaaatcaactattgaaaagatatctacactcccatgttcactgcattattcgtaatagccaaaatatggaatctacctaagttcttaccaacagatgaatggttaaagaaaatgtgctacatatacacagtgaagtattatttggccataaaaaagactgaaatcctcccatttgcagccacatggatggaactagaggctattatgytaagtgaaataagccaagcacagaaagacaaatatttcatgctttcactcatatgtggcaaattaaaaagtgggttttttgaagatagagaatagattggtgattaaaagaagccaggaaggatagaaaggatgggaaaattaagggaaagaaaagaacgtaaatgtggttattactacttaaatgtatacttcaaaagggtaaatgtggtaaattttgtatgtatattttacmgctataaaaaaaaacaaaataaaaaaatgtaaaatttacagatgtttatcctttatatgcacttaaataaacgagatgaagacactgaaatttgaaccactgttgagaatacattaaaaactgaataaaatcataaagkcaggtcatagttcaataaaattaggaaatataaacaataatcaactggcatggaaaaaagtaaatattgaaaggtagtaagcaatttctagttcwctaaaatcttacaatttataaataattctatctggaacaattgtttaacttgaaactcttacaatgtgactaaaatgcatacaatctaaataaaattcagtatgtcactctgagaagctattttcactgattaatccggggattttctcctggaatagagttctctgcactacaaacccataatgtttttatgtttgaagaagattgtatttcatcaagccacatataaattacttatttctatagtcataagaatttaatgcagtacaaagtctcatgtacttaaaatagtaactaataattgctcttttggtgggaaacatgcaaatgaagactgaattctttacgacctcrcaaactgtgcctgtttcctcccagttgtacctgctaagattcatgaacacaataaccaagcaagataagaatgttacaaactataattccactgtatttgttattgaagatgaaaacaaagtttcccataaaacaaagttattacttctttgaaatctagaatcacacttgtggagcatagctagaagttttaattccccataaataccatgaatatttctgggcaaattctggagtatttaattccattaaaaaccaacaatcttacattctaaacagcagtgtrtgtatgtgtcatggtgtgtgtgtgtgtgtgtgkaatgcttcattttcaaagcagtacttggcaaggaggcaggtataatttatgattgattatatagattcttacctgtttacatgcattaggtcactttgcaatatttgtagataatgctttcagaaaagttttaatgaaaaatattgacatgtttgaggattctgattctccagggcattgagatagtacagaccaaaactattaccattaaggatatttctgcctacacaagrataaaactttgagaattcactcaatttgtgtttttatgggaaggaaaatttaaactgtatggggattggtaggaatatataacatgaaagcaagatattaaagtaaaggtatcaggtgagagattttttaaaaaggcaaggactcatgataatcagaaaggtctggttttggttcttcctctgacagaatttaggcaataccctctcattaatattgctaggtcttcatctgtaaaaggagggtaatgaactaaggcttaatgggctataaggccttctgcaaaactacaaattgattattttgtgtggatgtaaccaagatagcacaaaacatatgttttacataacctgaattttaaacttcccacttgaatgccataacctcatattttctctccaataccccaactccaacaacttttacctcamtggccctcatcatccaaattgtctcattttctgattaattcactatagatttaatccctgctctacatctttaatcattgcccttctctcacagggcaaaactcctttccatttaagtctaattctccagttactccgtatgcaacttcagttgctgaaatatattagagaaaacaaacaattacatattagttcaatttaaagtgattacttttttacctgaaaaagatgtttggtctgggatgcttggtccccctacatgattatcctagtgtaggggtctaccaaacaacggatttatgtgtaaccctagagatacacaaagacatttctagcaagggcatagttttaagctaatcaatgacagaatcctcaatttgcctatgtacttcttctatacattacctgcttgagaaggcacccgagatcctgacatcttactggtctctttttccactttctctttaatgatcgcccttttcccaatttgcaaaagacacgttatttctcatcaagccaaattttaccatgctgaaggtttatcatctctgggctgcgaaacmaaagtttcaaaatgttgttgctagaatatactgactgtamagatgaggcaacacattctgttacaagtcaagtggttctaattactgctttcaacaaaaataattgaacatcctcaatcatgcattagagagaaaacatagtatccatgagaaagcactctttaacattcacaatatttatgttgtttttctcctacaattatttcactagatttactgcacgcacaaaaattcataatgtgggccgggcgcagtggctcacacctgtaatcctagcactttgggaggccgaggagggcagattacttgagggcaggagttcaagaccagcctggccaacatgttgaaaccccgtctctactaaaaatacaaaaaattagccgggtgcagtggcactttcctgtaatcccagctactctggaggctgagacaggagaatcgcttgaaccacggaggcggaggttgccatgagcccagatcaygcccctgctctccatcctgggccaacaggtatatgaaaaagtgctcaacatcactaatcatcagagaaatgcaaatcaaaatttttrctgcacgcacaaaaattcataatgtgggtcgggcacggtggctcacgcgtgtaatcaagccttaaaaattctcgtagactgaggtggcattactaatagtaagatttttgatcaaaatgcaataatctgcaaactttccaaaggaattagtaaacataaaatgttttattcgaaatgagtctcttgaagaggctgaataaggatttttttcaataagtgtatattttcatgaatgaatttgacatatgaaaaagaagttcagcaccaattttctttcaatgatttgtttttataaatgtaaatgctaaaaaccttgtttttctaactaatgtgtcagagtagaagttttcttttggtaattttttcagttcttttaactggttcaaaatagatgcttaaaaagtctgcatggctatccctcattaaaacaaacaaaacaaaattaaaaaccttaaagacctatcagctaaaaagtttrtcaggtctggtgctgcttcaggcaaaaaaaaaaaaaaattataaacttcctgctgtataagaggatgtattacccagtcattaagtttgtctcttagtaagtttcaggaaagaatacaaaatagcttttccatacttatcaaataacgacactgcatgtaagagtttcacataatggcacctcatttaacctcatacattttaaaaaggttgaaaaaaatcaaatattattaattctattacaatttgacaagtcattatttttataatattcttttattgaaggtcatagatcaattaatagattgataaacgatatataataggggaataaggatataggtacatagatatatagccatcaaaacaatggagatctaagatttgactcaattaacttcttcaatttatctgccgtcaaacctaattagcaagggcaatcttcatgtcaacttaccacccaaatcaggcttattttagctcaaaggccatcctcattattaaattaaaaaatattttgtgtaatagcattaaaactattctaaaataaaagttgcatcttgtaaaatagattacaaacaaagctatcggaattaaaatcaaatggatgtaatttaattaccttttgaaaaataagttataaaaagataaatatatatgctattttcattacttactttgtaataataaatgctagaatattttcatgtaccagggcaaggaatatgctaaaacccatggtattcttttggtaaatgtgtgcctgtctgtctggttttgggccttgaaaagtatttawcaacaatattgtaaaaactcaaaaattactacattaatttctatgcagttaaaataaatatattgactgttaaaacacaatgtttgacacataaaactcatttttatttttgttaataggttttaaaaatattaaatattttataaggtgaaaacagataataattgactctggataatgttgtgatataacaaataaaataagttttacccatcttactattaaatctgaaacaaaatcgtattttttttccagtggattttgttcattgtatcttgcaaaatttagaagtcttgggaaatattcaaattcaattgtaaagaatgarcatcattaagtgcttaagctgttagaatgtgcttttaactccagttaaagtgttcttgggatgaattttgaggctatctgcaatatatttaaatatatgaaaaggaagtcatttttaagagttaatatttcttacaattttctctttgatttgctctcagtggacctttcttcaagtgcaatgaattattgggcaatatttcagagatagaagatatactaataaacaattgtgattcctccatcaccacattcttcaaattcctgaataaacaattttccagtataagctaaaacacaggcttaacagaaataactcttaaattatgtatcatctatttgtccaaacttatctatcttatcatctatctgatacacacacacacacacatcacacagggaaaaataaattctgatgtgtttatggtaccttgattaatgattaaaggaggctaccctgaaatcagtataatgaattactcctttttccactcttccatgtactccaaacagtttctcaccttgggaaaatatgccacagtaggactcaactgaaataaaagttatggctttcttttactgagtgacagaaagactgccatgaatacaggcaagcactacagagatttttagtaaatggaacctatgttaaataaggatctggacaagtgagtctcttaaagttctcatcttagttttccttctctagaggtagaatctgagaaggagattctcaagagattggttgaggaagagcttgggaacaggccatagggaggcagaatggggcagggcaaaaagccaaggaagaaggagataccagctaggaagccccttcagcctttcctgaaaggaactctggaatgagttgcttcagtcattggcctggatggcgtctgagagtcgcaggtatatctgtgtaactaccagggcaataaygctcctgtttggcctaggttataggtgactcatcagagaaggcgacaggtgtgagctattagcagaaaaaacttccacaattggtgaataggcgtaccttccggtaaatatgattgaggcagaacacctccagatccactacaactattcataaccctaatcctttgccatttcaagaattagtagtcaccccaatgtgtagttcattgctcatggacttgactgtggcaattctcccatwtttcttccacatcaatttttccttctacttgataagacctatcacatcctcacttgctattatattcccacctcgaactaaaaatataaaataaaataaaacaaaagtactgtagaaagggaaggcaaacccatgttaggtgcaggtgtccttctgtaagacagactcagtggcctctccagaatgaaaaaggtctccagggatggtaggggatctgttgttcaatatcagtctactgctgggaggtcaggcattcaacaatagcaagaggaagatcacccttgtgagagagagtccatgcatgaaacctctgtaccagaaaacacagccagtcttytcagggatcatttctgtggaaactactagaagactcaattgaagtataagttcttctagagctctacatttacttatatcagtctaatgagcagggatgggaggactaccaacagaaagatcacttaaattagctagtgaggtttttgtctggttttgtttttctttttgcacaacataggcagcttgattttgaacttaaaacctatataaagattggcttgattctatattttttcatgcctaaggcaaattttctctatcatttyatgccatagacaaatttcctctttccccttctatatatggaaggtttatttcctctctaccctaagactgaggatgcaaaacttgaggtcttatttttgtggatttctcttattagacttcattcaagttcttctaagagtagaattcccaagttgtattcacatgttcaactctgttactatcagatttttaataaaattactctaccaacttgcatttcatatataccaggagagtataaaagttccagttgtttcacatttttgtcgacacttaacattataatacttcttgattctcccttatctagtgtgtgtaaatttgaattcattttaatcagatttgaatttccgtgattattaattrgtttaaacatcttttcatgtctttatcagtcattttcatgaaacttacctggccttttctttttctcattaatttatacataattatattgtattatttatctagtaaccccaatatctgatgttcttggtggtctaaatgtttttttttttcctttttccttcctgctgacttttactcatggtgtcttgtttcctaacatgtttggtatatttggttttgaatttcatctatcaaaatacataggagtgtttttcaccagagtgaacttgaattttatcctactattcaaccaatagttataaatgacctggaatatttttagccttgccatgggcttcagtttaatcacagaatctctggaggaccttcttcactttgccatgcctttagaatcttttgttttccctcactaacattaacatgggcttgtgccctaatggcaggcacaatgcaccatacccttttcttctcacttgtttcttccttattgccctctgcttatggttcagctcacggttgtgtctgtttgttgcccctgaatctttaatcttctcttaattttagtgaacatattaatgtaaaagatatatgttactgtaatttattccagatcttaggcgtttcagtggcaatctctgtagcatatctagcctaccatacttttggaaggaaggatcagtccctacctagatactatttgattcttaaattaaagcttcaattcagtctctgcccaagatttgaataaatgcctttcaaactaagagacatgaaaaataatttagtaggttttaaacaggatgcatcaaatatagaaagaaaatgtatcttttgaatttgttaaaattatacaaacacaacattgtaataaagcatctaaaacgcatgtttatttggtcatggtaatgaaatttgaaagtcactgctctaagctatccttaaaagccagtcgtataacatctttttgacctctccagtggtaagtaatttcctccctgaaatgctatgatacttcatacagtaacttttatattatatcccttctttatttcatttattcaacatttaatgtatgccaggaagtaagcattttaggcatcttatttaaatcaaaataataagtttcaatttgagtattatatgccccattttacagatgagacactgacatccaggagataattagtagcttttctacagtcatacatttattgtgccctctgaatcaaccaatcagtccttggttgattcaggattccactccgtctctttcgtatctaaaaacctatgttcttatcttcctcactccatgatgcctctatgtaactctagacagtggttcctgacttcgttttttctgcaaaactgtgacttacaatgaacagtgtatagtgcctatagtcatgagtgcatcatttatacaaatattaatgcacaattgccaatgagctggataaacatatgagagtatattccttctactaactaaagcatgcagaaagtatattttagtgataacttaaaatgtacatcatcctccaaacttggataccttagcttatattaaaatttttttataatacttctgccaactcttgagacatattctaatgtatcagtaaagaccatgaytgacaaccaatattttgcatatttatcataatttcatttttatttttaaagttatatttgatgtatatattactttgagcctttaaaataaattttaaaactgaatgactattgctggcctagactgagagtagactgtttttcatatgtaagcagcatgtgtagtggtaaataagttgatctgcatttttagtgtacctaaacatccagtaaactcccagagtaccaaaagatttttaaatatttgaaaaaaacacagagacatctgtcaggcacaacatatgctagtattgttaagcttggagacctaaatacataataatgaaacactaggatgtttcttttggtcttgtaacattattaaataaattaccaagacactcaaagtgtcattgatgaaaaagtttgggaacttctgatgcagagtctagaaacaacctctctgagttcaaacagcagatctgccagttgttaagatgcctagtatataatgagtgcagtagtctcccctcaccgccaggggatacttccttagtggattccttaaaccttggatagtactgaactctctctatatatactacactttttcctatacacacatacatacatgcgtataataaaatttaatttatcagttagacacggtaaggttttaacaaaaataacagataataaaatagaacaattataaaatatactgtaatataagttatgtgaatgtagtctctctccctctcttattgtactgtacctacccttcatcttgtgattacgggagatggtaaaatacctatgtgataaggcaaagcgaggtgaataacataggtcttgtgacatagcagtagactacaatttatccttctaaaatcatctgcttcaggtgatcttggatcattgagccataacgatgtcaatggctggatctcagaagctgatgacattgatggccaaagggcgggtagtgtatatagcatagatacactggacaaagggataattcacatccagggacaagatgaagcagggcagcacaatatttcatcacactcatcagaatgacatgtagtttaaaacttatgaattgtttatttcagaaattttccatttattaatattttcagacagtagttggaatcaggtaagtgaaaatggaaaatgaaaccatattaagggtggggctaatatactatgaaactattgaataaccttaataagtaaatcattatgtcttcagcacttaccttagaagttggcatatgatgaacatttggtaaatatttggtgactgaaattcattcatgatcaaataagcccttccacaagaagtcatttcttcataaggaagaaaagtaccacctcggttttatttttcgaattaccttcataaatatctgagggatatagtctttcctgaatgtatgttgagaaaacttaaacccataggcagaaactcagacatctcacaggtatgtaatgtgatgtgtcaggaagaaataaatggaaaacaccaaattctggttataatgatcagtaacattcttggaatgaaaaggagaaagatatcaaaggtctgtgattaaattaacttcaaaaaagacatttaatctttttttctttacattcatatttcagccatacactttcattcagaggtaatccttctcagagaatatcattagctagcctgtcagcacacagctaaccagaaatcaccttgaactgatgcatcatatccatatttaatattgagattttttttcaaacctgtttgagtttgccatcaatgaactgggaacatttttctggaaggctgaggcactttataaataattctctcttttaaaaagatgtattttttaggtaataaaaagagatcccaaaaaagtcttttgttaaataagttgtctaatagtctgtcctttaacatgctctgtattttctgtaaattgagagttggatatagagattagattagattcagtttcaatatttaagtaagtctgcttcaaaaaagggagttatcttgtcttcttccataaggagacacttaacgtctgtctttgtgtgattttagcagctatcaatgatcaatgcctctatgcattaattcattaggggttgtgaaatagtgacattgcaattatttcttcatttaatagctggaatacctttataaagagaaacttctcttctatttggttactcagaggtagagttcataaaggaaaggtgaaagaaacgtagttctttttacctattaattttcaaaacagagtgttagaaaactagcattctccaactgtgggcaattacttgttttttgtttttattatccttttgatttaatacatttaaatatatatatatatgcacatatagataaacctattgcagacgttgtattctattattgatgctcaaattattctaactttggtgggaagctgttcatcttactattagtagagcaaaatgtttcaattttgtcttgttaattttctggcctaggtctggttttagctactttgccaaagagccctaactcctgctaaaagtaaaggcatttcatggctacgagctgtgctgtagggatgctcattgttttaatataaaatatattcccagctttggcatcatacttggacttccaacamaaacaggaagacacagtgtttcatttctgtctcatattttgtatctcctttctcctatacagagaggtgatcaaagacactgaggataacagaagagttcatatggatgacttatttaccatatctcatgatatgaacacagcagtcttagaataataatttcaatgtgattattgataaaatcttggattttttggtagttcatattgttcttaagatgtatctcgtatggatgtagagaagaattgctttgcttataaggcccttggaatagtaccttactgtgttattatacctctaactggatatatatttagatctattgtatattttatttttaatatttatagattacttcttaaaatttaacttaaaaaaccatggaaacaagttgcatattttcaaagaaaaattcactaaaaaagaatattcaaagaagtctagtttttatctatgtcctccgttttatttgatctttgcaaaaactataaataataaatcaatataaatcaaaatttatttattcatcaaaaaacaagtatgtgtgtgtatatatatgggtatgtatgaatatatatgcatatgtacatacatattcacacacaccacttacatsttagtattggttgcgtataaatgttggggttatcatgagataatggaaaatgaattatttgagctcttttattattctcagtgttgttgaaaaactcttagtatgggagaaaggatatataaatgtaagacttatataaatgtaagtatatatgtgtgtgtgcatgtattatttacacacccctcttttcttaggtaaatgttattatataccacacactcttgtctaagttgattttcttttccttaacaataagctggagattgatccattgtcgtatagagagacatgggacatggtgtacatttagctttgttagacgatgcaaattttttattttaataaatgagttaagtggtttacatttattgatatagctgttatgaacagcttcagttctgtcatattttgcacatatgaaggaataatgcacacacatcttttatatcaatttatttgtcctattttcacttcttgcttaattcggatttgaccaacaagttttttttttctttcagtgtagaatgtgtccacactggaaacttctgttagttagctctgaggttcatatgtccagatccctccagcctctacagattttaggctaaatttagtgaaaagaaatacataaaaacctttctagctctagcagctcttctaaggttgatgtgcaatgatttccagtgggcatccttcgggattttgtgttctattcttggtgtttcacacaccctctttctttcctttgcttcctcctctacaaatgctggtactacatgaatttctcacctataggtagtttggccctacccactcattttgtggatttcactgaaatgcctgctcaccggattgttttatagatatagtccacgattttcagtttatctaaagtaattgctgtttatgtttataagaaaatcagagagatatgctgctgacaacatattttgagaattttttttttctttctgaggtagtatcttgctgtcactcaggctggagtacaatggggcaatcacagctcaccgtggccttgacctcccaggctcaagtgagcctcctaacacactcagcctcctgaacagctgggaccacaggcatgggccatcacacttgattaatttttgtattttttgtggacacagggttttactatgttgcccaagctggtcttgaactcctggactcaagtggtctgccttcctggcctcccaaagtgttgggattatgggtgtgagcaaccatgatcagcccacaacatttcttataacttaatttttcaaggggaaaaacacatgttaaaaatatctgttcttaattacatgtcctttacttctttgaaaataaatgttaagtcattttacaaatgcacaatattgatattagagatagggtacctcagggcttttaaatttgttgaatattaaattcagtgagtgggtattaagcccctggatgttttctcagacttaggctgtttatccccaggctttcttttactgcagaaaaccagagggatttagtcttcctactgtctttgacggctttccttgtcctttcctttgctgagggctcccttttccattgtcttatccttttccccagctttctccttttggctgtcactaaagttaagaacaaatctaattataatgatttcctattcaataactatatttaaaaaactaaggatagcaaagtaataaacatgagaaagcaggaaaggttataggactttctaaaatttattacagtagttcctgtttatagtttcttacttcctcgtaaaaagataattgaaaaccccatttgagttcatttatttgctaaacaaatatcaattgaacaggtgttatatgtcagcactgtgcttgattctaaactcacaaaatgcacagtgtattctccatggaggatattctgaattctattttcatcctctctttcggatttttccttcagctgcaattatagtcaaaacatgtattttacatagaactcacctgtgaacttaccttaaagtttgttattttgccatatcactttccttttctcttgctactcttttcaaatatttactcacagtttttttcttctataatttaagtgtaggctactgagggggacataatatcaatggcctatgttgttgaatacctgaatcaatactgctgactatgactgacatggactagaattactaggatcctaattttggccttctgccttagctttttattggtagttactcaaaccaactatttagtcattaatttaaaaaaattgctgaacatttacaagattctggatgctaaatttatgctctgaaaatacataaagaaaagtccttgatcacagagaatattctggaaagaaaggtagatacatacatatttacatacatgcacataacaatataataagaataattttaaaatttggcttctgaggatttgtgtgatgtatagacagaaatgtcaagagataaaattatatctttcttagctcactttgagtttatrtacttaacttttgatctacaagttagcagtcatctgtccaattcaaaattaaattcacatatgccaactcaaagtagcaatcttctgtccaactaaaataccatctacagtctctttctcttcccaagtggtacattttgctcatttaccttgacttgtcttgctttaactctgttttcttgggtcactggtctctaccaatgttcaccagactgcagattactctctcttctccatctttttttctttcasgaagaatcattaatgaccactatccttacaaaggagaaatggtcttggaatcacaacctcattgatcttagttataaaatcctgttcctcttttcatgaaatctcttgtagcacacacatacattatttctgtttccttctctcatctttttctctattaaaacacataatttatcaagcaaaataatatataaaaagctatttttcttttaaatgttttatccaaatattttaactaacttgtgctttttatttaacccattttatttgcagataaatatattatcagtatgaaaataaacaagtttgaaggatattatataattgtgttccctatttaatatcaatgtaatgcttgaaaattttttgtagtattgaataatgatttcattttaatatctttatgtttaagaccatactttgaggtcaagaactttggaagtaaattactcatgtaccattaaagtatgcctttatgataattctctacctttagaaaagatgctcaacttgcaacaaaaaactcagagtggaatttgggtttgacatctgtgcattatatgaccttggcaaatttattaaactcttgtgtcagaattatcacctaggaagaaagaatacatgaagatttttatatttattggtctgctgaaatgactagatgaaattatttattttgaatcacttcatagatactattattagttttccttgttatttataatgttttgaatctaacatatacatatatgcacacacatacttattatccttaaaattatataaatatatagtttatattaaatttatattaaaaattaaatccccatattaatagctgtaaaccatgacaaccagtgattagttataataataatgaggtgaacagaaaaatgagattctcttttaaactgatgtaaatacctgttacagacaatactgtattaagaaacattatatagtagtcaaattagaaaacattttccaaccagataaaaatgtatttctcttttgagaagttaggcttttgctataaaaaaacacataaaaaataatttttgtgttactacrttacctattaaaacaagtatgctttaataaacatcaaagaaagcagtctaattattcatttgaatttttatttccaaagataagtactcaaaagcttagagtcccaattattatcttgtcctgcatgaagtgataaaagataaattcaagttatgctctcattatctttctgtatttttactggtaatgacatttttcattgtaaatacaattctataattgactttcatataatgaattatatgttttactaacatccttggtatgcagccaagaaaggaagaagtagaaatcaacatggcacttctatctcatatgtgatggatatattcactatgtttaaacattcataatgcacataaccttaagttagatgttctgactcttcaactcgtagtcatataggtacacatatagaataaaagtcaactgaatacagattgcattatgttctcttaaaactaaaaacatgtcgctatgttttaaataacacagcatgtattttaatatttaacattaagggagattacaaattatgtttccacaatttgctattcattactcttaaaacacatttcttctgctgcctttttttattattcctacttccccttgtctgtaaaacctctgccattcatagtgtttctctatgttatttaactttgaagaatgaactccaatcctatgatcacatagactttacccactacttcaactataagatatatctttccacaatttatagcgcttgttttctgttcttttcagtcacataatgaaattctatctgatgcaatttcttgcattattgttttattactattatttgcatattcttattgtttaagttataaccaatcttgtttctaccggaaatgcataagtcttttgatggtatagacctatcacttaataggatgacattaaatttatgttaaacaaatgaaagttgcaagcaaatgaaattataaaatgatgagttatakttttactatgttctgcaattgaatataaagattttggaaaaattgtgttagtttgggtacactaaggaacagatgtaaagttggtattagacatgcaagaaatttattgattgggggagaagatggagaaggtggaatgagctttcaggttgtaaggctcttctgacttctgtaaaagagaggaagaagaaaggaggatagataggaagagtttcagattgcaatacaattctaagaaagtttagacgaggctgacgataaatccttgaaataaagacacctattgaaatagtcatgcatcttaaagaaataatctttattattactgccatggtcagtaatcaggttggagcaggctgagggagcatttggtgcaaaagcagtgatggatcaaggcgggggccatgcttggggtcatcaaccaatgtcactccctataaaagattagaacaccacattttcatggcttccacatcaacaaaatgaatatttttagtatactttctcccagattaaggtaaacatatatctttaaagcaatagaattttgattcctacatatttaaacttaatgttataacaggcacttcaaatgtgactcaaattgttgtaaatgtttattaattattataatattttattattgttgtaatcacctcttattcccctcattgctaagggaagtattcttgcccctaagtttgtgaggatagtcaaacacacaattcctgacactgacagatgagatcaatggcaatgtactggtcaaataatacctacagcaagtggaaggaggaaggaggacacggcatcggctagcagggcagatgggggctgcacttgggacagagtaaacaaccagtggatgtctcaggaggaatctgtatttccaytggtgccttcagagaatgtaattaacatgtttgaatatttttttgagccagcaggaaatgtgaacctgctactactcaagaataagcaggatccragtgtggtccccataagaaggaggatttttggctagggaccttatcctctggagcaaagtgaggagaggaacttgtggttagggcatttgaggcttttactgtttcaccagatgtcaacacagcacataatattaaacattgattttaggatcaaaatacgataaacattgatagtgtcaaaatacaattaatttcttttaatattgagtctttaagttgtttaaaactgtcaaaacttttaagtaattctgcagctagcatattgagaataatctttttgtaatttatgttaattctaaactagcttttaagaagtatgttttttattacagaagaaataaaatttttaaatgcttgataaacatcgttcaaatgttattcaaaaagactgaacaaccaacctgccactaatggtttatattgtgcagtctttctatacctttgtcactaatgactattcacttaatgaataataaatgttgtaaccctaactgatgggtaaattctgtattattaaataaataaaattggttttggggaaaaatcaaatgagagctcttactccacacaattaatcaaataaattatagatagatcaaaaagttaaatattaaaataaaaaatgtaaaagaaaacattttaatcaatattatgaataaataagttttataaaaattgaagacacaattaactacttaaaaattaatagcaggactacgcagggtggctcacacctgtaatcccagcactttgagaggtggaggtgggcagatcacttgagcccaggaatttgagaccagcttgggcaacatggcaaaatcttgtttctacaaaaattagcctttagtcctcgctactcgggaggctgaatgcttgagcctgggagatcagtgctgcagtgagccatgatcacacttctgcactccagcctgggcaaaagagtgagaccctgtttcaaaaaaaaaaaaaatatatatatatatatatatacacatatatatataatttttgcattcaaaataaacttaattgacagattatcaaaatttaagcccctttagagttctatagataaattgacaaagtaatcagacaaaaataaaagataaaatattagtggtaaatagacattggtgaaagatactactactaataccttattagtaatcaaaaacatacgaattcaaaggaatcaacatgtttgcttataaaattagcagtatttatagaggaacaagttatgaaagttggtgaacaaaacagtatgtcttgggaaactcaaaacacatcattagtcatcttccaactaatgaatttcattatttttgaccaaacctcaaacttctataacatcagcaacaactattacctaccaaaagctcttkcaaggacctaagctttggtcagaagacagtaataaatgtgactgtgatagataatatgtaatacaactgaggtaatttcatgaagattacaatggaaactatgcattactctattatttaattatataatctaatacaattttagctctaatttttgaggcaggcagtgcaaagaagagaaaatgctcagttctttcaaatgtgggacaggcattattatctcttcttttttggtttctgaatgaatgaggatttagcttttaccctgaagcttctcaaatgagtctagttacatagagtaacctcttaatataattttatgtaattaagctatcagagaaagtattcaaataaacaaaaatggagattagttcttacataaaaatcatgattccactgaaaaactaaattaaaagagagataataaaagtacaaatgtagtcaatgttattgctgactattaccgtttttcggattgtttcttggggtcattttaatttttatttagagaattagaatttttcctgaagactaggaagcagcttatatagcttcacatcagcaccttgtggttctacagaacatcatgtgtgcttaaatgtgatttgtttctgcaaagtcattaattagttccaaaatcaattttaaagtttccagagaagaagagctcataattttatgatagatagaactctcattttatattgccagttggagggggcggtgggtcttgattctgctttctgtaattaggaaaaaatatgtttctgatgccctggtcttcagtaacctctagccacagtaaacattaagctttattcagaataacaaatataacagaatgttccatgggacttttccttttttgttgaagaccatggcattagatgctgacacatcccaaaaagagtaggtgttggatggcagatagactcttrgcccctttcttaattctagtttataaaagggaagaaaaaaatctaaggaagctccagagtaaagattcatttttgcatataattactaggacaacttttcactctcttctgtttggagagaaaggtgatttctactttaagcttgcatactttaaactacatgagggagtttagtgagtcccagagctagcatggaacctgagtgtgggtagagaaagatttcttaggagaacttgaacagagttccctggagttcagagagaagaagactggtggcttactcttacttggaataatcccaggggatgaggttggtcaggcagtactctacaccagagtgaagagagggcattactgggaagagtctgcactttcagagtggatggcacaagctatattcaccttgcaaaaattccactcaagcagtgaattgatctcagcaattgatctcctttactcaagccaggcattattcctttcccactcatctatcctctgaacaatggaaaagccagagcaacatgtctggagcaggaggcattaaaaacaacaatgacaacaacaacaacaggtagaggaataacaaatgaacagaccactcccctttctctcatcaccaagttaaatctgggctggggagttgaagatgtgtattaaatcagataggcgatcaaatcagtttttaaagggaatacatttcttttaatccctgaaaattaaactgttctaacaatgacaatgaacagaaaagttatgagctatcaaagagtattagagaagcaggagataatatagatggggtgatgacattgtaagagaaataatgaattcaactagttatattggctacagttgtttacagggtgtgatattaagattttgaggtgttcttgtaactcttttctgaattaactaccatttctagattaaagttgaggcccaatacttatctcattgtaacactattctcgatagaacatgatgcagttttgtcttcatccccagtaacgtgttcttccttttatctcatacacatgtttaaaattttaaggtctttggcaaactctctgccaaactgaatttgtttttcctatctctctttaaaaattttattgtgattacacacttatatgatcagtattatatttttaacattcttcctcccttttgagttgacatttcagtttcaccatgggataataaaaaaagtttctgttttattatatttcttcccaaaagtctgacttgcctgtaagacttcccttctttctctgttagataattcaggatgacccagttgctgtgacttatggttcctgtcaagatgacattacaaagaagcatttttgtgtgggtgagaattaagttcaaactggcagtttctcttattatttctttcttctgagtaagacaatagtctgaaaatactgttatgaactttttagatgctcagtattaacagaataaaaattataatatacattcaaatggataccacttctaatcacaccacattttgtatatttttatgttgtaatttgtgttagaaaagcatccctgatgtcttctggcttgctggtagacaagccagaatattttcacaaacctaatatattttcacaaacctattgtttctgtttctctatccatttataagcattcaaacttcttgttttcaacactgtagctcatgaattctcacacaggaatcttcctttttcattgttcctcttcattgcatagcataaaacagtaataacaaaattacacaataaggtaaaatatattgacttctttgtgttgaaagaaaataatttaactaagcatactttatgctctttcattcctggtttatcacaaaattatgccccattctcagctacaaactttttccctgaattctctgaaaccaacttgcatacacagtcaacctttctgcaaaatccttttatcctatcttgtgccttaactgaaaactagatctcttaggaacactattttctctatagttctctctgtagctaaatatgactggtccagtagggaagtttgggatcctcctgctttactgtgcctccaaacatcactcctttaccaccatgggcatttgaggtgtttctagctcctcatttgagcatctggcaaacagcctgtatgaacctcaacctattccattgtcttctaacggcccccacatcataaactaaaaaaagttaggcttactccttcctttctctcccaatccctactttatcctagatgtcaaattagaagtcaacttctaggtagaacctggcccagtctcatcagagctacctgagaggacaagaaacttttttctggttccaatctagacttacttagtcagcaaatcataaatctattccctaaaatgagagaggaagaagagtcccttttgctgtttaaaaccaatgccttaacctgtgccacaatcccatctctctctcctatgatattagtgaacagctctggctgctctatttttcaaccgctccttctctaaggcaatmttcacaccctattaacatgctcactgcttattcatcttaaaaacccttctttgacctcacatccctttctggttgcagctgttcttttcttctcctccttactgatacttctttaaacagtaatctacccttgatttgaaagtgtgataatgacatatttccccctgggattgctgcaccctgactaagtttcttgactgaagctctcacttttttcaagtgaccctttctacatagaattatttttcttccaattctggtaaacactccctccttgtcaccttagttttggagcagtaatagagtcctgcctttaggctcttagctactgtattatcctttgtggtttttctactccctgccatcacttttgtaaatcatccrtttattaaatttgcctctagttatctaattttaatgtggcatgcttcctgtgaggatcttaactaatgcaatgttcagttctcacccaatgtaatctggcttctaccacatttttataataaaagtgttcttgctaagtgctccaaatacctactaattcctattcataattagtcttttcaatttttattatattgccatacatctagtgacactctcctgcaacttgctattttcacaaattcaaatgtacaacagtcctcttgttttactgtagctcctctctttctttgattaatatacatttttttttttttggtattctcttctaatttggtattcttctccaggaattttgttgctacctctagggccagctcagcccatttttatttcttattctacattttcatattagggaagctaatcaacagacagagtttcagcaatcacatgtatgttaaagtatcctaaatcgatatatgtacacatatttctttccgggcattcatattttaatacagacatcatctcctggaagtttctgtccaaagtgtttccatgaaccctgccccttgttaagagtgtttatcctgtttattatttgatagcaaattgatacaaccagacattcgtggtaagaatcctaagagttgtctgattgtctccatcacttccaacatctaatcaagagttatcactgattatatctcttaaatacctccttgaatgtataccattctatccttctctactacaagtacattcataggaatcgttgagctaataatttcttccactcaggatcattcttttttttttttagacggagttttactcttattgcccaggctggagtgtaatggtgaatcggtgaatctctcctcatcgcaaactccacctgctgggttcaagagattctcctgcctcaacctctcgagtagctgggattataggcatgcaccaccacgcccagctatttttgtatttttattagagatggggtttttccatgttggtcaggctggtttcaaactcctgatctcaggtgatctgcccgccttggcctcccaaagtgcagggattacaggcgtaagacaaagctcgtggccgtgaaactcttataacatgcttaccaaagaagttcaatgctcaaaatggtgttttaacatgatattaaaatttaagtttccaacaggataccaaaatacagtacgtatgaaattacaaaatcaattaggatataaaggatcttccaaggaaataaacaaaatttgtatctgtgttatttaaaacttctcactttttatgagtgtataaaaaagatcaagagaccagtttgagaaaatttattctaaaataaatcctgtgaatccctagtctctttctaaggagaaggtaggatgtaagctgtcgtctttatcacctcaaatatacagtgactgaacttcaaagagatagcccagagagcttggtatgtgttatatacactccataagtgttgagatacaatgatctcacccagaaatctagaaatcaatgcatgggttggcaaactgttttaatagagaggctgagagccaaattctgtcttccatcccagacggtatgaagtcctgttcaaggggaatgtgtgggagcatgtaaagactccaacatatgcgtggtgttgcccacctgtgaagttcactaaggaggagtggtcaagcagcgacacacaataacttacgtacaaagcatgcagaaatgtatcctgagaatatcatggggatccacagtgctgataaacttcaaagaacccatgaacactccaatagataaggtgtcaacttcaaccaccagccaggttacttcttttttctatcatcccaagctgggagttaaacagcaactagactctggaattacggaagtcagcagagagaacagaagccatcattcttctttcttcaaatgcaagttgtagccttttacgtgattctactttgattttctcaaggttcatctcccataaaactatcagaaatatctattaaaatacaaatcagacaaatcctacctaaagtcctacatgaaactcttcagtagctcttttatctgaaagctcctatgctgtacaataaccttcacaatgctgtgcctgcctatctctctgaggcaaattctcagtcaattccccccagcccccgcaacccccccgccaaaaaaagaaaaatgatggggaaatgttgagcaaaaaaagacaagtctcctacatctggaatttaatgctgctggcaccagggaactggagagtaaattacagaaatggtgagtcaatattattgcttttttctttaactgtgatttctttgaaaattaaattatacacatacataaatacatgtgtataatctgagtttcacagaaatcacaacgtatgtgtatatgtgtgtgtgtgtgtgtgtgtgtgtactttaaaaaaaaataagactatgagaaaatgtttgcttgaatgcatgtgaatgtaggtatgtatcttggtgttttggagaaaaaacatgcagaaatcatagttcaaatatacttaactataatgttaactttctccatgacattttttctacagaaataaataattattattccttcttataacacattttttgagagctttttactgacccaaatcagtttgcttcaataaagccaattatacaacatgtttcttatactatagaaaattaacttaaggttaaagtacatgcaatcaaatggaaaactgcaacataaggagttgaaaggggaatatagcttaattattctagaactagagcaaagaatgtgtggaggaaaagggctctaaataatgttcaatatcatgaattgaaaatcataaatattaattttaggactataatactagttcaacggctatacaagtattagttgatgaacccaactgacaacataattgaaaggaacaagcatcacagatattacttaaggaaatgattccatctataaagatttttgcagaatttacataattcttatcaataaaatcgtaccgcatagatatgtaccttggaaaaatayatctttgtatttcaacccagggttactacatttgaaattacagaaactttaaattcaggcatcactttaaattatgtctctgcatattaacttctattccatttagtgtgaataaatatatactacagagtttaagcactctagaaatgtaagatatgctcctcacattgtagcatgctgatggaatttacatggaataggtctcttctgattatggccattatgaagaacaaatagcagagttagaaacctactaataaatttaaattttcctttaaggttaaattctatcaggaactctcaataatcttcctcaattttaagtttttatttcagtgtacattttggttcttcatgttcataagcaaattattaaaaagaaatatatcattacctaagtgaagtcagacattctccaggtaagataactaagctatcaaacaggatcagattgtcaaatccgagtagcataaatctcactcactgatattctactcaatatctctttactaaataatttcatggatgcaagtagtcaggctcagatgaagcagagaatgttctaggctgttgaggctgttgcccagctcccttcctcccatgttggatgtgtcacacttgtccaatacagtgaggtccctaagggagatttgtggggtctgtctttgttttgtgctgctattacagaataacaagactcggtaatttataatgaacagwaatttatttggcttgtggttgtaggaagtctagggacatagcaccagcatctgctaagggcctttgtgccgtgtcacccacggcagaaggcagaagagcaagtgaattcccaaaacagagaaaaaatagggccaaccttttatcactsccaagatttctaactcacaccratgatgccagcattaatccattcatgagagaaaaaccctgatggcctaataatttcttaacagttctgcctcttaatttcatcacaatggcaattatatttaaacacgcattttgaaggtgacattctaacagtagcattctacccctgccctctcaaaactcatcattctcacatacaaattacattcattctattccaatagccccaaaggtcttaattccttccagcaccaatttaaaatttagaagtagagtctcatctgaatcagaaatgggtgagactcaaggcatgattcattctgaggcaaatttcctccagctttaagtctgtaaaatcaaaacaagttatttacttccaaaatacaatggtgggacaggcaaaggagaggcattcccatttgaaaataaaataaataggtgagaaaagatgggtaactactgccaagtaagtcaaaacccaacagggaaaaaaaatcagttataaatctgaagaataatgacgtttgactccgcatcctgcatcccccaaggcctcaggcagccccactcctttggctttgcaggcctcagtccacacagcagctttcaagtggtggagtttcctgtctgcagctttcccagaatgaagctgcatgatggtaactctacagttctagggttttcaaggtgaccccaccttcatggcttcactaggcattgctcaagtgaggattctctagagtggcttcactcctgtgtttttgctgggcattttcctagtgggggctgtgtgaagtggctcttcccctgtgaggaggtctgcctgggctcctaagtagtgatggaggtgaagatcatcatgcctttacagctcttacatgatgtgagcttgcagaattagcaccatatggtcactgccaacttgtaccttccagtgtggcaggccaagccacacctggggccacttgagcgtggctaggctggtcaagaagcattgcactggaatggcagagtacagatgaccatcgcagatctgggcaatgagcttgtagaaggtgccctgggttcatctccaaaaccattctgccctcctatagcatgggcctgtcataaaagtagcaccatcaaagttctctgtaatgcctttggtgctattctccctttgtgttcatgataccttttgtccatacgaatctctttagcaaatgatggatggctacacccttgtttcttctccttaacacasttttttactcttttcatggccaggctgcaaattttacaattttttacattctgcttctcttttaattaaaaattccatctttaattctttgtttctctcttgcatcttactgtatgtgatttattaatttttttatttccataggttattggggaacaggtggttttggttacatgaataagttctttttttttttttttttttgagatggaattttgctcttgttgcccaggctggagtgcaatggcacgatctcggctcactgcaacctctgcttcccgggttcaagtgattctcctgcctcagcctccctactagctgggattacaggcatgcatcatcatagctggctaattttgtatttttagtagagatggggtttctccatgttggtcaggctggtctcgaactccggacctcaagtgatctgcctgccttggcctcccaaagtgctgggattacagatgtgagcaactgcgctcggccaacaggaatacgttcttcagtggagatttgtgagattttggtgcacccatcacccaagcagtatacactgcacccattttgtagtcttttagccctcacccccttcccacccttttctcctgagtccccaaagtccactgtgtcatttttatgcctttgcatcctcatagcttagctcgcgcttatgagtgagaacatacaatgtttggcgtatcagtctgttttcatgctgctgataaaaacatacccgaagctggggagaaaaataagtttaatggtctttcagttctacgtggctgagggggcctcaaaatcatggcagaaggcaagaaggagcaagtcatgtcctacatggatggcagcaggcaaagagagcttgtgcagggaaattcctatttttaaagccatcagatcttgtggcactcattcacgatcatgagaccagcacaggaaagacccgccctcataattcaatcacctcccactgggttcctcccatgatatgtgggaattgtgggagatacaattcaagatgagattcgggtggggacatagccaaaccatttcatttggtttaccattcctgagttatttcacttagaataagtctccagtctcatccacgttgctgcgaatgccattaattcattcatttttacgtctgagaagtattccatcacatatatatatatatggaacatatatatatatggaacatatatatggaacacatatatatggaacacatatatatggaacacatatatatggaacacatatatatggaacacatatatatggaacacatatatatggaacacatatgtacatggaacacatatgtacgtggaacacatatgtacgtggaacacatatgtatgtggaacacatatgtacgtggaacatatatatatgtggaacgtgcatagacgtggaacttatatatatggaacgtgcatagacgtggaacgtatatatatatggaacgtgcatagacgtggaacgtgtatatatatggaacgtgcatagacgtggaacgtgtatatatatggaacgtgcatagacgtggaacgtatatatatatggaacgtgtatagacgtggaacgtgtatatatggaacgtgtatagacgtggaatgtatatatggaacatagagatatggaacatagagatatggaacatagagatatggaacatatatatggaatatatagagatatggaacatatatatggaatgtgcatagatgtggaactatatatatggaatgtgtatagatgtggaacatatatatatggaatgtgtatagctgtggaacgtatatatatggaatgtgtatagctgtggaacgtatatatatggaatgtgtatagatgtggaaggtatatatatggaatgtgtatagatgtggaaggtatatatatggaatgtgtatagatgtgggaggtatatatatggaatgtgtatagatgtggrasgtatatatatggaatgtgtatagatgtggaacgtgtatatatatggaatgtgtatatgtggaacgtgtgtatatatggaatgtgtatatgtggaacgtgtgtatatatggaatgtgtatatgtggaacgtgtgtatatatggaatgtgtatatgtggaacgtgtgtatatatggaatgtgtatatgtggaacgtgtgtatatatggaatgtgtatatgtggaacgtgtgtatatatggaatgtgtatatgtggaacgtgtgtacatatggaatgtgtatatgtggaatgtgtgtatatatggaatgtatgtggaatgtatttatatggaatgtatatatatggaatatatatatggaatgtatatatggaatatgtatatatggaatatgtatatgtggaatatgtatatgtggaatatatatatggaatatgtatatgtggaatacacatgtggaatatatatatgtggaatatatatatgtggaatatatatatgtggaatatatatatatatggaatatatataccacagtttctttattcactcactgattgatgggcatttagattggttcaacatttgcaactgcgaattgtgctgctataaacatgtgtatgcaatatctttttttgtataatgacttcttttcctctgggtaaatacccaatagtgggattgctggatcatggtagttttgcttttagttctttaaggaatctccacattgttttccatagtggttgtactagtttacattgacaccagcagtgtagaagtgttccccgttcaccgcgtccatgccaatatctactgttttttgactttttgattatggccattcttgcaggagtaaggtggtatcatattgtggttttgatttgcatttccctgatcattagtggagatgagcattttttcatacgatgttggccatttgtatatcttcttttgggaactgtctattcatgtccttagtccactttttaagggattttttgtttttttcttgctaatttgtttgacttcattgtaaattctggatattagtcctttttcagatgtatagatgtatagactgtgaagattttctcccactctgtgggttgtcaatttactctgctgactgttcctcctgccatgcaaaagttctttagtttaattaagccccagctatttatctttgtttttactgcatttgcttttgggttcttggtcatgaaatccttgcctaaaccaatatctaaaagggtttttcctatgtgtgatttaaagtagccatgcagcctcttaaatattttgcttagaaatttcttccaccagatatcctagttcatcactcttaaattctgccttttatgaagcctttggacttcgatacaattaacccaaattatccgcaactatataacaaggatgtcttttactccagtttccaatactttgttctttggttccatcttagactttgattggacttcacagtccatctttctgacaacattctgactatgatcacttaggtaatacctaagaagttttaggctcttcctagttctaggatcttcttctgagccatcgccagaattgcacttaatgctgcattaatggcaatccaggcttttttctaagttacttcttcaaattcttctaacctgtatccgttacccaattccaacagcgcatctacattttcaggctgttatggcaataatcccactcttcggtatcaattttttttagtctgacttgtgttgctacaacacaataacacagactggctaatttgtaatatacagaaatttatttggctcatgattctggaggtgagggcctttgtgctgcatcatcccgtagcagaaggcaaaagcacaattgagtttgtgagacagactgggaagctagcccaactttatccttttatctgcaactcattcccccaatactagcattattcatttgttgagggcagagcccttatgccctgatcacctcttaggggtcccaatcctttattccattacaatggtaattaaattgcaacatgggtttttgaggggccattgaaaccagggcactaacacagtgggatgaatttaaattataaaacttttacattttatgccccgacgacttcataagtttcatgacattctccaggaggctaggcctcgtacatactgagttctatttaaaataagaatctgctgccagggcattattctccgggcattttagagatcaggtctcttccttatggcaagtctaatcagttgatttacccaaagaaccagatgatgaaaagattaggctgggtcacctggcatcttttctttctttggggtatgtcctggatgaagacagaaaatatatcaggtcacctgctttaacttcacttaaatacatacaccttgtttagaggaacttgtgtctttatggagtttaaacttgttttttataatagtatattttgttttggggggacactaaagaagcccattgaacaaagtaggcaatatgctcagattatatacttgccataacatgtttacaatatgtattaaaacacattaagtaaaagccaagtattatattagttaaataaaaaccagttaatgtagtatccagaaggaatggtgagtgagaacaagaattaggctggttaaatgaaaatttagaattataaaaagaagaaatatagatgatttgataatgagagagctataaagaagtagtggaaggaatgttgtctccaagataattattacctataaaaattagcatttgcattctcaccaagaaaattatattttgcaataaatgtagctttgatgcaattttctgaaatgaaagataagttttgggagattgaaattttcatgtcctggtaacttgcattttttattgtattgatattaatatatttttaccaagcatgtataataattctaataataattttataagtgcttagccccatgattatattatcaatattctaaattttgaaatcttagaaaaacacaaaataatgtacatgtatcacatatgcagcttaaatatggttcctggtagtcatgtaaaactctgcccaaggtccttgacaatggaggatctacagtctatcctgcaatccctgataaaaatcacttatttgaatataatagttatagaagcactctgtataacttaattgatttccatcatttttactctattggtgaacaaatgatttaaagtcaatataatagaggtaagattgtttgcaaagaaaacacacaatcaatattaaaatacatattattaagaatttttaaatcagctccatattgtttatgtggaaaaagagattttgtaaacaaaactaaaattaagatatttccattttgtactgagaattttaactctattctactaagaaatctgtctgctatatgttatactagtcaatgactagtttgtaatgtggtttaaggacacttggaaattagtacattcagagtgaatttgttttttgttctcaatggctttcatttgtacttttgagtataaattattagtagcttcatttcatttataattataaatttaaaatattttggctgcagtagcctttagtggtacatgcatgcttcaacagcattttgacttacaaaaaaaagctagattttaagagagatgtttgttgtggttcaatcacatatatccatattaacatatacatgccatattaataaatcataacatcatacccttattaatatagtcaatatgtattaaatttgtcttctcaatttttttttacaaaagaatatctaattgttctaaccagatatactttctctactatcctctgcatgtaaacaatcaggagcaggctatgtggttgggcactgggcagcatatgatccaattatggattacctctactccaaaagtaaaattcactcttctggatgacatttttattaatgattgcctttttgttcctaaataactgagacattttataatatacctagcacattgtaacactggattgatctcttatcatctgaatgttttaatatatattcctttgtaaaataaaatggttttcaagatagtgaattctatggcaaaggaaaagcaagtttatatctggtgtttcccaaaatgaccttcaaggtgtctaagaatctcctgccaggtggcagaagatgatatttgaaatctgagtaggtttagagaaacaaggaatggcataaagcagtgatctggataaaatagtattctatgtarcaatgttttatgaagaaataatatctgtaatgtggcttttttatttgggtaatgtgtttggtggataaaacaaaaacaggaaatgcatatattgaataaaaatttctatgaaatgtatttgaattctgtggaaccccaaagtataattaaagagaatccttagcaatccatctgtgagtttttgtaatagtatgttgaagttctaaaaagtcaatttgctttattaaacagtgtgttctttcctaataatacttagaaaatatttgacaacttttaaatgtgcattctgtttgaatgacttagttgtaattgaaaccattttgtaattgaaaatcaagtaactaattgaacaatacaatttatcttaacagcactacaaattcctagatttcgttatagaaaaactctttcctaatttgaatacacacacacacacacacacacacacatacacacatgaacactcaaaacaaaacaaggaggaagtatgattattacagttctttttctacaactggtcacatggtcatagctggtatttatcactaccttcttctactgcccattctatatactttttgccttcagcaagcacctcagggggtcatacttctttacctggtgggatgacccacaccttcattctggaagggtcggagtcattagcagtcttgcctggattgggttgttgtacttttccattgataatcayagggcatggtaatactacaagatgccctaaggtatctcctgtattgcatacatattatccctttcctccattgtggagtactatccaatatcccccaataggatcaatcaccacagccaacatagtaactcccttctttccctgttaaatcagaggcattagaaagccaaagtggtcaagtggcagtcttcattgctaattcagtggaatcattgttgggtcttctgttggaagtatttctccatttggagataaaacctttagatcagcaacacataaaattataggaacagagagcaagcattttgctaatgagccattaggagtaatactgagtgatgtcattcctacttcctcttctggatttctggacccatgaattctgtctatgggataagcagtaccgtatactggacaatgattcagattatatacaggcttctgaagaaccttgccctagctgcaaagaattgccacctacttggtgctgtaactgagtttttaaaatgcctttccactaatctatcaaagcagctgctttgggttaatgcagaacatggtaagaccaatgaattccacgaaaatcccattactgcactttatttgctatgaagtgactgccttaattggaagcaataattgatggattaacatgactataaataaggcattctaaaagttcacggatggtagttttggcagaagcattgcacggagggaaggcaaatccatatccagaatgtctatttcagtaagaacaaaatgctgctccttccatgctagaagtggtccaatgtaatcaacataccagcaagcagcagactgattaccttagggaatgataccatatcaggaaatcaatgttggtctctgcttctggcagactgtgcatcagtggtggccataaccaggtaggccttcgtaagtaggagtccatattgctgagcccgtggataacatttattcctgccaccatggccactttgttcatgagcccattggacagtgacagcagtagactgagaaagagctagtattcatagaacaattagtactatctacttggttattaaaatcctcctctgctgaggtcaccctttagtgaacgttcatatggaatacaaatatgttcatatattttgccctttaagacagaattatgcacgtacttcttcccaaaatttgttaccaatttttcaattatttttcctccaagtgcctgaccatccaaacaaacaccattggccacagaccatgaattagtatattactgcataattggccatttctccttccaaacaaaatgaacaactagatgaaatgtttgaagttctgccagttggaaagatttctcttcaccactatcttttaaggatatcccaaaagagcctatagtgctgcacctgaattttaccaggtcttgcctgcatttcacacagaaccatctgtaaacctggcatgagtcttctttctctctgtttgatgatcatagatattttcyaatgaggccataggtgcaggttgggagagaaatgtccatggtcctcatatcaattacacacaaaaactgtgtaattggtgtgacgccagtgggcatttgggccacttcttcatatatcttgccatgcctttaggaccagcttgaccccagtggagcgctgctgggattgcctagctttatgacttgacaggtcagataatacccagttcaaatgtattgtgaggacttgactctctatttttataatccaggttagactttgctcacttaacctagaactgttcatacacaccaagtaagaatttagtagccatctatctcttttacttttaggagctctatgatcaacaagccaatgctcaggttgcatggtaactttgtggcaaatggttaagtgttcagacctaataaggtccagtaggccaaaagatgttttccaaaagtagagtagttatccaaggaggatgacaaggcattgctccaaaattctaagggattttgctgtgatcacttaaaggggcctgccaaaaactccaagcagcatcctctgccatcgatactccaagcaccattgatttgatagatcatataacccaagtgacacagcagcttgcacagtagcctggacttactgcagagccttyttctgttctgaaccctactaaaaaatctcaaaaccagtagattttcaagtcattaagtcaatgtgctggagtaacacacatcagtgaggaatacattgatgcaacaacttatccttcaccttagaaaatatatctcgacatgaccaataccattagcccctaaacattttactgaggtagaaggcctctgaacttttgttggatttactccgtaccatcttatttgcaaatgtcttacccataagttcrttaggtctaatcaatatgatgtcattaatgtaataaactaatgtggtaagttatagaagggaagtgtgatcaaggttcctgcaaactaatttaggacatagggctggagagttgatatagccatgagactcagggtagtgcaaaagcattgctggccttaccagccaaacacaaactgctttaggtaggccttattgataaggatgaagtaaaaggcatttgacagattaataactgcataacaagtacaagaggttgtgctgtttctcaagcaataaaaccacatctgatacagcagctgcaatttgagtcaccacctgtgtaggcttagggtaatccactgtcattctccaatatccttctgtcttttgcacaggccaaatagtctattcaaatggggatgtggtgagaattatcacctctgcatctttcatgttcttgatagtgaaactaatctctgcaattcctccaggaatgcagaattgcttatgatatactactttcctaggtaaaggcagttccagtggcttccactggccttttctatcataatagaccttacttttcaggttatgaaaccaatatagggattctatcagctgctgagtatatccattccagttatgcattcagaactgcagaaataaacacaggatgagttcagggaactgctgggcctactgtgaaatggacttgagctaaaactccattgatcacctgacctccataagccygtactctgaktrgtggaccacagaaacatttggtgtctcctggaattattgacagttcaaagtcagtctctatagtmcctraaacatctgattatttccttttcttcagtacacattttccctggtcaaagactgtagatccttatggggcagattgggagaaagattaacagtgtgttataagtttttaagttttaatttctgtgggtacatattaggtatgtatgtgtgtgtatatatatatatatatatatatatggtatttatatttttatggagtacatgagatattttgatacaggcatacaatatataataatcatattagggtaaatgggatatccatcacctcaagcatttgtaaatcatttctttgtgttataaacattccaattatacttgtttggttattaaaatgtacaataaattattgtttattgtagtcaccctcttgtgctatcaaatactagatcttattcattctctctaactatatcttcatatattaagcatccccactttccccctacccccacccagtaccccctcctaacacctggtaaccataattctaccctctgtgttcatgagttcaatcgttttaatttttagctcccacaaataaatgagaacatgcgaagtttgcccttctgtgtctagcttacttcacttatcacaatgtccttcagtttcatcccttttgttgcaaatgacagaatttcatttaattttacttctaaataatactccattgtgcatacattttaaaattatgtaccacattgtctttatccatttgtctactgatgaacaattagattgcttccacgttttggctattatgaataatgttgcaataaacatgagagtacaggtatttctttgatgtactgatttcctttcttttggatatacacccagcactgggatttctggatcatatggtagttctatttttcattttttggggaacctccaaatttccaaatatagttggcaaaattaattgtggaattgaaaagacatttaaatcaaacctttatattaaaattcatggagtaaaaacatacttcaatattaactgtttattttacttaatttgggtaagtaaattccagcaagaaaagagcacaagtgaggtcacttaagccatggtgttggaatgatagttttactttgcaaccgtcaagtaataaaacatttgatttagaatgacattgagccataacatcaagtagtgaaaatttaagatgctggttcaatttcccatcagataacccagccttttataaatgaaagctcccatatatcagtgataaatgtaaaaacaagatgttttgctggttgtaaaaaatggtctcagaaatacctagctttaataggtatgatatctaggttataaaattgataaattatcatttgttttatgatgggatcattgattcttggaatcaattgttgcctgtttattggtttgtaattttttgttattgttttattttcttttgtgaagtaatttatcagctctaagaccctagtactcattctaagtaggctttgaatcctctcttactttattcactttactcctatcacacgtacacacacacatacacatttttctctctttcatgttgccattcatgtatcctatttgtaaaatttaaaaataatttagtatatttttgttaaattaacaaagcattttatttatggacatgaaaaattaacactgcttcatgaacttgcaacattattcatcaagggcgatgtaactattgtacaataaatatgctttcatttctgttcctgttatttggcttccatgtgaaattgagttattttatcttgaggaagctatattggaatataaaataaagtaagttctatatttttcacagagataaaaacttttaatatttaaatagacactacattacttattattcctgaatgaacagatcttacaatagatttttattgtttattattacctgaaactgctatttctctaataaattcttcacttaaaaaacaagatgtctaagttgacaatgataggtcttacaagaaatgttagttcataaagctaccaaccattttaaggaagtgagtactggagattgcaggaaaaaaaaaaaatagtgatgccttcatgttagtctaaactccattgtaaaagtagaaagtttgatggtgcatgaagtataaagaaaggttaagaaatacgcttgaatggagtatctgaagagataagtgataagacttttctcagactgtagaaatatagataagtaccagaatggcatgacagccatgaagcacagttaaggtaattgtttggcctatcagtagacatgtaacatacagatgaatagaaaccattcaagagacaagtaagtcatatagcaggataagataagcatattattccttagtactaagcttctgaaggcaaactgcatgtacatagcatgaatgtttctatcaatttcctttttgtatctatttgtcagttgttcggtattgtgggaattgtgggaaaatgaaggcattacaattatattacatatgaaaattaaattattatcaatgtgaaaagatcaacataggctttattaactattatttttgccatgtttaattctgaacctgtgctaaattcaacattgtatttartcaaatggttataaatttgtagcaaaatttttaagcaataactttttattagtaagtgaccaaagtgcctagcatcttcatttttagaagtagtttagaagaaactgaattgtgtttgaaagaagcaagaatatatctggtgattgtctttcatattatctgatatttcaagtctataatcctacaatcgctttagatttcaaagtcacaaagagccatatatgtattcttttttttattattatactttaagttttagggtacatgtgcacaatgtgcaggttagttacatatgtatacatgtgccatgctggtgtgctgcacacattaactcgtcatttagcataaggtatatctcttaaagctatccctaccccctcccccaaccccacaacagtccccagagtgtgatgttccccttcctgtgtccatgtgtactcattgttcaattcccacctatgagtaagaatatgcggtgtttgtttttttgttcttgcgatagcttactgagaatgacgatttcaaatttcatccatgtccttacagaggacatgaactcatccttttttatggctgcatagtattccatggtgtatatgtgccacattttcttaatccagtctatcactgttggacatttgggttggttccaagtctttgctattgtgaatagtgccgcaataaacatacgtgtgcatgtgtctttatagcagcatgatttatagtccgttgggtatatacccagtaatgggatgtctgggtcaaatgatatttctagttctagatccctgaggaattgccacactgacttccacaatggtcgaactagtttacagtcccaccaacagtgtaaaagtgttcctatttctccacatcctctccagcacctgttgtttcctgactttttaatgattgccattctaactggtgtgagatggtatctcattgtggttttgatttgcatttctctgatggccagtgatggtgagcattttttcatgtgttttttggctgcataaatgtcttcttttgagaagtgtctgttcatgtccttcgcccactttttgatggggttgtttgtttttttcttgtaaatttgtttgcgttcattgtagattctggatattagccctttgtcagatgagtaggttgtgaaaattttctcccattttgtaggttgcctgttcactctgatggtagtttcttttgctgtgcagaagctctttagtttaattagatcccatttgtcaattttggctttccttgccattgcttttggtgttttagacatgaagtccttgcctatgcctatgtcctgaatggtaatgcctaggttttcttctagggtttttatggttttaggtctaacgtttaagtctttaatccatcttgaattaatttttgtataaggtgtaaggaagggatccagtttcagctttctacatatggctagccagttttcctagccccatttgttaaatagggaatcctttccccattgcttgtttttctcaggtttgtcaaggatcagatagttgtagatatgcagcattatttctgagggctctgttctgttccattgatctatatctctgttttggtaccagtaccatgctgttttggttactgtagccttgtagtatagtatgaagttaggtagcgtgatgcctccagctttgttcttttggcttaggattgacttggtgatgcggactcttttttggttccatatgaactttaaagtagttttttccaattctgtgaagaaagtcattggtagcttgatggggatggcattgaatctataaattaccttgggcagtatggccattttcacgatattgattcttcctacccatgagcatggaatgttcttccatttctttgtatcctcttttatttcgttgagcagtggtttgtagttctccttgaagaggtccttcatgtcccttgtaagttggattcctaggtattttattctctttgaagcaattgtgaataggagttcactcgtgatttggctctctgtttgtctgttattggtgtataagaatgtttgtgatttgtgtccattgattttctatcctgcgactttgctgaagttgcttatcagcttaaggagattttgggctgagacaatggggttttctagatatacaatcatgtcatctgcaaacagggacaatttgacttcctcttttcctaattgaataccctttatttccttctcctgcctaattgtcctggccagaacttccaacactatgttgaataggagtggtgagagagggcatccctgtcttgtgccattcaaagggaatgcktccagtttttgcccattcagtatgatattggctgtgggtttgtcatagatagctcttattattttgagatatgtcccgtcaatacctaatttattgagagttttaaattttcaacccagaatttcatatccggccaaactaagcttcataagtgaaggagaaataaaatactttacagacaagcaaatgctgagtgattttgtcaccaccaggcctgcccttaaagagctcctgaagctaaacatggaaaggaacaactggtaccagccactgcaaaatcatgccaaattgtaaagaccatcgagtctaggaagaaactgcatcaactaaagagcaaaataaccagctaacatcataatgacaggatcaaattcacacataacagtattaactttaaatgtaaatggcctaaatgctccaattaaaagacacagaccggcaaattggataaagagtcaagacccatcagtgtgctgtattgtatttctaagactattcttgtggtcagctcagaaattctgttgtggattagaaacctcagagaaactcactggcctgtaggtcattcccagggtttctaatttagttgaaaaggaaataaagaaatttagtgcccattgtgtggtggatttaaaaataaattttattctagcatctttggaaccacttgaattccaaggacaactcaggaacagagccagcttttactcaggcctcagatcctttcaggagcaatgcaaacagagcccagagaggagttgtgccagatggtctttgcctcagttacatttctttcagagaagcaaagggaaatgcttggacctgctgaacatattccagaaagtcttcctgttgtctttagcatctaagcagatatcagctaatgaggtcttttattttggtttgtttttgtgtggtaaatgattccctgcgtttcatatcccatttctcccaaccttccttgggactttattccatcagtccttctatctcttggttgtatcatcattccagctttctgttggaattctcagctcaccctactttcctcttaaacaaaccaacaaaaaacaaccgaataaaaaactctttcttaatccacatgtatcattaccttctgtttcatcagtttttgtctgtttactcttgaaggtgctgtctacattcgcttctcacttaaattttcaattgcgtatagcctgtgttcttgccactatcaccccattgaaatggttcttgttatttcccagtcatatttacatggtgaaagtaaaagcacattttgtcaccatttcacaaaacagaaatataagggttaagcatttagaagttttaaccatactacagctgcatgtttactggttccatagtctgtgcctcaattatcatgtatgtaaaaggaggtgatagtatggtagtgagagttaaattatttacatgtagtgttattagcagtgtctggctcaacaagtttaatttaactatcagtatctccatttcctgagatataaaatggagaattacaatagttcattttatacgggaattaagccctgaggctgaatgytttaaccaatgtaaagtacatagagtaaatatgcaataaaacctagccattttataattctcacaattgtaagtcttgatcacatctattattattactgttgttgttattattattattatcgcaatttttctggctgtttcttagtagtcttcttgctggctgcctttctccattcacaccataaccattaagtgttcccaaggtgctgtagttggctttctactatactaattctacatatgtctctgtaaactttatccaaacccatggtttcaacttcaccagacacatgacaactccagaatcctctccttatgtacaatttatatataccacttctgggtgtctcagcttgactattcctcaagtagttcaaattcagcctgtctcaaaaagataccgtcatcttttcccacaaacttgttcttcctctgcctgtgaatctcattcctatgcctctacatgtttaaaagaaaaattagggatttaaattaacaacttctttttgacttctcycctatattaaatctgtatctaatacctgtctattaaactatgttgatagctttcatatttattactaccccttttttcccaagtccagtttttttaaattatttttatagttataggattccaactgcctataggctgattcagcttctattcatctgcaatgaatgatatctgtttgatcatcatcattcccctgattaaagatattaaatggcaccctattactttgaggatgaaattcaaatcctttagtttgttacacaaagcctatctttatttttgtctcctgttcttaatcaactcttcctcagtcataaaggacttctagccatttcctgaatgtatgttttgtgttgtctttccaggctttacatatacctatttatttcttttttttctttttttctttctctttctttctttatttcttttctctctcttttttctatctctccttcttcttcttctttttttttttttttttgagatagagtctcactctgtcacccaggctggagtgcagtgacgcgatctcagctcactgcaagctctgcctcccgagttcaagcgattctctgcctcagcctcccgagtagctgagattacaaacgcataccaccacacctggctaatttttgtatttttagtggagacgaggtttcaccatgttggccaggctggtttcgaactcctgacctcaagtcttccacccacctcagccatatacctgtttctgttttattttttctggattgcccccaccatcttatccagctaacttgtactcaaccttcagatctcacttatctcttggtcaccacctctaggatgcctctagtcttattcagaagccccattcatacctaagattagtttgaatatagtaaaccctgcacttttaggatcagtattcttgccttttcccactggactatgagctcaataaaaacaaggacttgtcactcattgttcaacctcccactctcttctccccaaccatgtgrgcctcctagttcttcctctactacctcagacatgctttcttcccamgatattggtgttgcttgccacttctgccatatatgcctatggctcactatctccttctctttaaaactctggtaagatcccaatagcttagaaacacctgccattaccaccctatttaaactgcaaaccaccctatcagcaggcccagcaaccttaccttattaatctctatgatattatgtaatgtgtttattaggtctatagactgtctcctctgtttaatgtaagcatgaaagaggggccatttgtgtgtattgttctctattgtatcaccagtgcctggaaaaaagtgaacactcaaaaatatttagcaaacaatgaatagaaagagtgatgaattattcttctttgtaggcagtatagtgacaatcacataataggtatcccataaatrtttatagaattaataagaaattaaaatgtttaagaaattcaattttaataattaaattcaatgtaagcaatttaaaattaaagaatccagttcttgttaaaattagaggaaaaattctcctatcatgaatgttgaaaaatagtcaatcctgtaaatacagctaaactcctgtgtgttcacctgaaaattaagctgtaacaaacttaattttgtggtagaaaaagctaaactattttccactttttctcctattaraaatttaggaaaaaccctgggaacttttgcccagttagtcctgaaaaggatgaaatattaagtactaaagaaacaccatacatgtcttatacaactcactggactaatacacctgttatagtagaataactttctattatatgttcaaattgtactgtgatttggggttgattgagaaggggtggttggtgtgacgagcagcaagatgaagatatatttataccaacctcatgctcagggccagctttacttatagaatgacaaatagatttgcttttttctcagccgcagctcagaaagcttcctattgccttcgttgtacatagtgcacccaaagcttaagacttgggaaataaagtattaccatgagccagctgcaaaagcagtctgcaaattcgctttacctcccatagggatgaaaactgaattatgttgtttgcaagcctgtacctttcctagatctccactaaaaattcttatatatttattgttttggtaaatcatgatacaaattttgaagccaagtaagtgttaataattaagtgttgtcaggctaaaaaarcttctaattaatttttttggttttaattggttatgaaattaagttggtacaaatgattttcagctgtttatatttttaatcattgggtattttttcctatttgattaaaataaacaaaggcttaggcgattagatccatagagataggcaaagagcaggaaatttcttatttctataagtaaaggaggccacatgtcaataagtaaagaaagagcagagtcttggtagaatggaatgtccagtggcctagaggtacacagactccaagttctcttccccactcagcctcttattgactrtaagaaggggaaacatctatttaaacactgcgcacctcattttctttattttaaaatgacattaattataattaacttttttttttttgagacagagtcttacactgtcgcctgggctggaatgcaatggtgtgatctcagctcactacaacctccacctcccgggttcaagcaattctcctgcctcagcctcccgagtagctgggagtacaggtgcccgccaccgtgcctggctaatttttttatacttttagtagagatggagtttcactatattggtcaggctggcctcmaactcctgacctcatgatttgtctgcctctgcctccaaaagtactgggattacaggcgtgagccaccgctaagtactagtaccccttttttwaaaaaagaatacagtctttaaatttattcttaaaaatttttgtcagtgacttcaacaagatttccaggcaaaggtgaatgcatcataaaattaggtaaaggcgacataaaatctggagaataatagacactaggtttaggaacatggtgagagatgaccttgtaatcatgcatcagctttgrtttccatgcatttcttggagaaacaaaatatataagatcrctgttatcactacaatctgtgaattcctatggccagtagtagccaaagacaatcttaaattttgtttgattttaaacatctagaattcttttttcttcttctttttaactttaagttctgggatacatatgcagaacgtgcaggtttgttatatagctatacatgtgccatggtgctttgctgcacccatcaacctgtcatctaggttttaagccccgcatgcattatgtatttgtcctaatgctctccctccctttgtccctgcagcccyggtcaggccccagtgtatgawgttcccctccctgtatccatgtattctcattgttcaactgtaacttatgagtgagaacacatggtgtttggttttctgttcctgtgttagtttgctgagaatgatggtttccagcttcatccatgtccctgaaaagaatgtaaactcattcttttttatggctgcayagtattccatggtacatatgtgcaacattttctttatccagtctattaattatgggcatttgggttggttccaagtcttcgctattgtaaatagtkctgcaataaacctacatgtgcatgtgtctttatagtagaaagatttataatcctttgggtatatacctagtaatgggattcctgggtcaaatggtatttctgtttctagatccttgagaaatcaccacactgtcttcctcagtggtttaaaggcttaaatgtaaaacctaaaaccataaaaactagaagaacacctaggcaatacgattcaggacataggcgtgagcaaagacttcatgactaaaacaccaaaagcaattgcaacaaaagcccaaattggcaaatgggatctaattaaactaaagagcttctgcacagcaaaagaaactatcatcagtgtaaacaggcaacctacagaatgggagaaatttttgtaatctacccatctgacaaagggctaatatccagaatctacaaggaacttaaacaaatttataagaaacaaacaaccccatcaaaaagtgggcaaaggatatgaacagacaattctcaaaagaagacattgatgtggccaacaaacatgaaaaaaagctcatcatcactggtcattagagaaatgcaaataaaaaccacagtgagataccatctcatgccagctagactgacaattattaaaatgtcaggaaaccacagatgctggtgaggctgtggagaaataagaacccttttacactattagtggcagtgtaaattagttcaaacattgtagtacccattttatattactccttttacatcttcatatactagcatcataacttgaagaaagaactttttaatttattatttgatagaggaggagataaactatagggacattgaataagatgccccagcagacagagcttataagtaacggagtagggttcatacctcactctgcctgggctcttacatatttaccatgctgcctttaggcatgattataatacctgccttgggaaaatgcacacagtgaatatgaaaacaaattaagttcatttcatgaagtaaattgaaagctgcaagtcatttttgaaaacaaggcatcatttacacaattatttattaagcataaaatacagctgactgctatgttgagggatgctgtaaaaataaaatgtcctatttggttctagtcctgaaggattctaaattacattataatatatatagtatattatattagagtggagcgtataattattatatagtaaaaattacctaatacagggagtcatttttctttggtaatcaaacagaattctactctggtatctcatgccaaatcagttgattggaagtcacaagacagcttacatattcgtataaaaagcaggaaaaaaaaacccatgaatctcctaacagggggcagaacaagctctgatagtctaggtggggaaactaatggttgtgctctccgcagcattagtctggtgggccgatcaactctaacattctgtctttgggtcactcttctgaataattacatacctrggaaagagtcttgctagcctagtttgactgtatgctgaccccttgatcaaggcaaggcaagccataagcatcccactgagacctcatgcaatgccagaaaaccaaggtgctattaccagtaaaaaggaaaatgattgattagcaagaaaagcaaaagtgatcactctaacaagtaaataaatgctatggtctgaatgtttgtgtcactaaaattcatatgttaaaactctcacccctaaggtgatgatattagaagktgaggtctttgagggagatgaagagtgggtcatgaggatgaaggcctcatgaatgggattagtgcatttgtaaaggtgcccaggggagttcatgcatcctttccaccatgtgaggccacacatagaagatgccatctgtgaactagaaagagtgccttcactagacatcaaatatgtcattgtcttgacttctgacttctcagcctccagtactgtaagaaataaatttcttatgttaatcagctccttagtctgtggtcttttgttatagccgaccaaatggactaggacaatcaaagatcataatggaaagatttggatgaagatttcaggagagatgtaattcttgaaggacagaaaggttttcaacagttgagtgcagaaaattcttgcagaagggtaagaaattttgcgtagtaattagtgtcatatcaaggattatggactactacttcattaataataaagacagatagtaagtatttgcctcatgtagttttaggtttgttttgttttattttgctttatttttaaattactgacaatccttttgggtccatgtgtaaatagtcctcactgcatacattgaaagggtctgaagacatcttaaaatttgtyatagctttgtgatttatcatcattagtttattcaatgagatgtttgatttcttagcagaattctaagatgtagatattctcatgaggcaaaaaataaaaaaaaatgaaaggttaaattcctgaaaaatcaggtaagatgataaatgaagatactttactttcttacattgtaattkatgtcatttaactttaccctcatttcatcattctttggaaccagcataatagtcaaatcagttcctcttaatgtcagatgatctagttgccatcacattttggaagtgaattgagttgagaaaatatacctcttaaacaattatgcaagttaacatttcaaaacacaggyttgtataacatttcaaaacacatagctaatgctatggcattagattacaacatagaataacagttgtycgtgacttttgataaaagaatcagaagtatatacttaaattacagatttggaagatattcttgaaagataataacattgacacataagattggcaaaaagaagattttttgataagtataggtccttcaytgatcacctccccaagggccttccagacatatcaattacaagtttactaaatacctcatcaggattctgaggtattatatacctcctaacagcctttaygacaataattcctttcctcctgacttccatattttaggatacattttctggaaaacctctgtgattacctgttgcctaggaagtaagttcaaaattctcagcaagaaaataaaaggaaggaatgctactctgaatgttttaccattccatgaataagctaagacctttgataatgctattatttatttacagttattgtgcttcaaatcttctttatttggaaaagccaggtgtccagtaagagttttcttaatgaatgaatatccaaataagaattataataaacttttaaatttatgatgataatattaatcacttgcttttatggagcactttctgtgcaagcrgaatcaatcctaagaagttactatgtagcatctcaattatttctcataaagtaggaagtagatrtgagtattagtttcattttacaaataatggaattgagaggtgaaggagaatctaaatggtcacaccactagtacacagcggaccaggatacaaatctagagctcctacaaggactcagaagcaagactgcttatgattaaatccacagtgcttcataacrgctgttctattacctgctaattcytatggaagccaaacctataggcattcacaaaaacgcacaactaattaaatatctcagtgaagcaaataagtaaaaaatagatatatgaatccacccattcattaacaaatatgcatcatgtacctaattcactccagaagctgtgcccagtatttgtgatataacagcaaacaaaatagaccttgacctcatcttcatgaagtttactttctcaatcttgtgtgattatgatatgagataaacaagatgcattttcaactcgacccaaagtttaggccacacaatagggggaaatcacaagtcacgcctaatcatgaggcttggtggatgaggtaactcctctgaaaagggcaagccaaattcaagcccaaggtctacagggaatttatttaccagcaagagtcctttgccaaaaaggaaaaatataacataccatgaagcagtttcccagggaaatggargcaagaccaccaaatactctattgataaagtttaggggcatattaaaaaaggaaactctctaattgcaaaactatagtcagaccacaaaagctcctgtatcagcaatgtcactttgatgatgtatctgagagcaatgaggcttaaaagcctgaattctagcacttatggtatgagactgcttttaattcttgcccagaatctgttttcttttaaaaacaatgtttccctaaggccttcatcaaaggcatgaggtatgtgctactccagagtatctgttccccagggaatagttaatggggttgcacagtgtgagccatgacctcctcatctctgcactttggggaattcattttcaacttggattctaagctggaagtgattctttccactaaaacaggttttagaaaacctctatcatagcacacagcatgcagaaaaaagctaatctccagaagaggctgtagatataggatgctcactttggggatagacaaagagaaagttacagtgtgaagcatccgtttttgcatttagcaaagcaaacaccaagttttgtggacagctgcaagaattctgaaactagagggcatgacaggaaagcaggcaagggataagaaccactggtggaagtgattaatccttaggtcctctaagtataggaatccagtataaagcaaaatgattccattagccatactacttagaagttgtcatcagtggaggatacctagagatgactaccacaacatattatatatgcctgtgtatcatagacyacatataattttcaacatagcctgtcatttccaacaaatcctttaatcctcttcaaaaagatgcaagtttaaaacccctagaaccagggggaattatttgtctattataatcaggattttgatggttggagtgggcagaaaagaacatcgctaacataattcttttataatgagtcatagttctctctgagtgtatagagcaagctaatggagtattcacttcaatgcattaccttctgtgtctgtactatagataaggcattgtgcatgtttatttatgtgagaaacatgaagataaataaaagttccttccctctaagcctttactatcttgcaggaagttaggaaaagtttcacaaaaacaatacaagactgaattaatttacatagctttcttgggtgtaatatttatgcttcaatattctgattacttagacatcaatgtggtaggctatgttctgccatactgaaaaaaaaattaatcaccaaccaattaaaacagtgataagtttcatactccttagagctgggtttatgaatttttgataatattatcacctatctgacagatatatttttcctttagcaacttgggtaacataactctttttgtttttttctcattctgtctccttgatataaacatgctaggagaagtagaaagaaaataatatgaaacaataaattttctcctcttaaataatctggaaaaacattgtggaagttttgggtttataagaggactagttagtgggaatactagttttgcaatagggctttggtggaagtgaaaaatactccacataagcaaaagctccgaagttagaaaatgaatcatattggcaaataggtcacatcattatcctggataagcggaaaataggaggaagtgaaaaatatctaaatgactttgtccatggtagagacatttaagcaacraaatacaacattgctaggtcaggtagctgcctcataggtaccagaagtacctatttaatacaataccctgcagcaccattgatatttatgaactcatttgagtaaaagtaagtagatatttcttctaaacatgactttttaatttttgttttgctctatgaggccacctatgaacacatgaaaaagaaattatctagaatcattttctaattttgcctgcatgaaaagaagtacattggcaagtagtttgagttctcaatttaaactagtgaggaacacataccgaatgaaattttaatttttagtatcggtcttctttaaataacctaaggaatttgttgtaataaaaatgagatgtgcttatttgatttttggctgaccattctctgacaggtacaaggagggggacttggcttgatgcagaagctagaacctaggaaacagagaggagagctaagatcagtccttaaaaggcctcttggatgtttctattacttaaaggtgttcttatcttgaaaaagtcttttcatacacaaaattgggaattagttatgagtcataacaatataacatgacagaaaactgctgtattagttctttcttacgttgctataaagaaatactcaggtctgrgtaatttataaagaaaagggatttaattgactcacagttctgcatgatttggggggactcaggaaacttacagtcgtggtggaaggcacctcttcacaggggcaacgggaaagagaatgagtgcaagcaggggaaacaccagacgcttataaaaccatcagatctgagaactcactcactatcacaagaacggcataggggaaactgcatccatgatctgattacctctacctggtcctgcccttgacatgtggagattatggggattacaattcaaggtgagatttgagtggggatacagagccaaaccatataaactgggaaatcagagaacctggattatgatctcttaagataagtttcctatggaaatgtcagcaatattatgatcattctagttttttgtttcttcatgaatataaatactatatgcatattgcatatgacttgtatgagtcatttcatttatattgcacattaattctttaaggtaagtatttttctccctattttaagaataagaaaactaaggttcaggaaactcactcagccagtcagtggacaacccaagtttctactttaaatctttactgagttgtcatttaatacatcaaaaaaaagttttttgcatagtaagttacagagagattttaaaaaacatttgtaacaattaaatgcaccatataggaaataaaaacaaataaaaacagaagcattctgataaaaatgaataattgggaagatcattttggagaattcaaataaaattcccacagaagtatcaggattgtttaacatcatttagtctgtaaccatatttgatggtctgaatggagtacattaggcagtacaaaatgactgtacatgtatgtctaagtcagatgcttattcaaattaacattacctttcaatgccaggatgtcagcattgtaatgataatagttatctctacaaaagagatgtcaaaatacttttgctgtttgttacttctaagtgaaaatagaaaatagaggtagcaattgaaaatgaatcaatagtatacatgattatgaatctagctaatctcttaattcaaataagaatattatcagcctgtcattgcaaatgtgtcacttacattcacattaatgtaagaatcacattaatgattctacattcayatttcccttaacagtagtaagacagttctggcttcatcccattatatcattaaatggactgtttataactgcatagctttctactcggcttaggtgaaattagtaataatgagaaagaataataacttaaatgcttcttggggattctagaggaaaagttgtgagaattagccagttcaacacacattttagtgtctaaatttatacttctggtccaagttcaataatctataatattgataaatcagataaaatttcagacttcctgaagtgacctatcccaaaaaaagcagataatttagtcaagaatttttcttctgctgcttaagaaatttgtggagattttatgattcccttcattcagcctgtcattttctggttagttaatcataaatagttagtgatggcttgttgattaattaacaggaaaaatgaaagccattaatgttttttaaacccaagaggataagattttttccaagctcaaagtattcttcatattgcagtcttattcttgttgtatcatcatctaaccccaaaggctccaaaacccagctgtatacaatggttcggtaactaaggaaaacatttttgtatttgaacatgatttcctattcatctcagtcaactgacagtaattacagcaacactggaaatttctttaccctggggacatgagtgttgagcacctacctccttgtaactgatttccatcagtttcaaacgctactagcattcatcccatacacacttattgatcactctgtgttctargtacttttaggctcatgggatgcatcatggtacaaagaaagacagaaaaaaagcaaggagatttgaggtgaagccaaatattccaagcgtgtatgtatacttgcaaagaaagaaaggttctctgctctcattcaagtggctgggagaaagtttagatatataatgctaaattatatggtataccagaaggtgttaagtcatatggaacataaaattttttagacaactttattctgttttgtttgttcagcagaaaattacrtattttaaatgtaagaacagttactttattatttttttcttgctaagatcacggagcagttctaagtggctactaagtactccagcaatacaagtttcattaaatagaaacaagaatatgaatttttacaaagcagaatactctatcagaaagtcagatattctttttggaatttatacaaatgtgttttaacaatatggcatcaatgtctgggccaaatgtctggattcaatatggctttgaaaaatggaatagaggaagcatcatacttttagcaatttccttaagatttgtcaatagacactgttgttagagaagatatggaatgtatgtgatcacttaygaatcatgaataaaaacaaaattcccaattttattttgcatcctgagttgcagtggtacaactgaaaactagaaaagcaatgtctttaaggagctaaatttatggacaaggatggaacttttttagacagttgattagcggaagatagactttatgaatgcacaggtttccatatttcacacaacacctagatgagcagttgccttcatcatttggtttttaaaacagaggctaagatatttttaagtattttacatgtatttctatgtcaaaagcagatttaaggaaaacatatattctccaacaaaaataggtgtaaaggcaacagaatatatgtccaattgggaagtgtgataccaaactgcaattaatgctgagtgagccactttctatttctgatttctccacttggtacccagcactacctctataactagtattacttaaaacagaaacaataattttaaggctacaaggtgaaggaacgttcaagtaagttttttgcctactccaattcttacagatacatgaagaaatgcacaactaatacagatattgtccaaatagatgaatcctaaactttcaaaattagatccactttagtagtgcacacccagatgtcatttctatattcccmaaaatcctaggatcttagcatctaaaaaagaataataagcaaaaatatttgtaatgcctcagctaaaattataaataaaatatggagcctttgcaatatgagtgtcatctctttatttgaaattctaagcacttactatctatagtacaccatgaaactaagttagaaagatatataattatttaaatactatttcatttctgtgaattttaattctttcttttggaacattgaattctggaactgaagtggttattttttaagtaaaatatacaaatatcagataaaatatttacaattcagctgaccatcagtgagtagttgatgccacctatacccaggagctagagttctcataggaaatgtaaagaacagatttgggatcagagatttagagtttagatcagagatttagagactggttaagcaacacccctttctaaattaattgtaaaacttatctgtgaaataaatgtgcatagaattattgtaaaagttaaatgaaataccatataatgaccttttgaaaattgtaaaatgctcaatggagattatgcatagtatccacaggtttggcatcctgtaaatactgtattttctatctgagttttgtggcagatgtgaaacccatggaaacaaaaggtcaactttatttattgaaaaaaaaaaaaaaccttcctataagcagacccatatagttcaaacatgttctgtgaagggtcacctgtacaacccagtgaatcctaatgtaaattcggaactttaattaagagtaatgtgttaacattcattcataaattgtaataaatgcatcacataatggaaactgtcaacaacagaggaatctgggtggtggggcgggagtgagaagacaggggacatagaactctgtaatttctgcttagtttttctgtaaacctaaaacatctcttaaaaaaattaagatacctttaaatgttgcaggcaagagtagcttaaggagatgtaaaaactataaataaatgtaatgtgttatcctgatgggatcctggaacagaaaaaggaaattagggaaaaactgaaaaaaaataaagtatgtacttcagctaataataatgtaccaatattggttcgttaattgtgacaactgtaccatactaacatataatgcaataagtattcggtatatgggaaccgtactatttttgagatttttctgtaataaacaatgtattgaagaaaaagatatactgattatatactttaaaccagaaacaatactagaaacataaaaaggtatatgccagatctcacacattaaagttattgaaggcatatgtacaaataaaaatattttattagaattaggttaaattttaattaaaaagcagtgtagtacaagattcaaataatccatatgtagaatgtgtatgtcatcagagcaccatgaaaatttttggtttgtaatataagcacattatttgttaagtataaatactccatttaattttgtgcctaagtctgttaatttcatttgtattaaattttatataagtaacaagttgttcatattatctgttttgatattattgagatttcgcttttctcttgtggctagaggtatgcattgcctgcaaatgtgaataacaactgatatttccaggmatgtcacattttagcagccaggtttttctgaatatacaatgtgtattcctatatcacatgctgtgtccacataccctttatgttattaaaaaatagttcttcaaaatatttatttgcctttgctttactttcagtggtaaaatatttgagaatagtttttcttggctcagttaatgtggcatttgttctcttcaccccataactcattcgtcatgcaaaagaggagtcttgctcctgcagtggtattgatccacaaggcccttttggttaggagtaaagcctctttaattactttggctgactttcattttttacaaagtcttaggcacattagctatcatgttgtattattctcatttgtcttaaataagtgcaccatggtctcgagagattgatcgactgtctatagtcttgagaaaccagggcctacaccagtctatactcattctgcttagcttagaaatccgaaagagctatctctcatcttctcccagggtttgataacctcttctctttacttcgccagaggtgttttgacctttaattaaaaggaaaatttgttgtcttcctctcagaagacagcaaataatgaactcattaaaatgaggttagtgttcaggccttagagcaataagagttgaagtctcattagcagctaacaatgcagaacacagcacataaataaacctaatatggcacagcgaaatgcctcggtgcrttaaatttgagcagaatcaaatgtttactgtcaatgatgtctggggcataaagttttaatgcacttaataaagaaaagcaaattgcttcctattagccatgaaatgttaccacagaaattgtcccaaaaagtgtattatgtaaatgtgtgatgtgttagttattaacaaagatattgtagaaatatatctgtcttgcttgatacatgcaacaattaggaagaataaagatcactcaaaaatttctaaacgtaattctagtgattaatgtaaaataatgtgggatgtaagatttttttaagtgactttatctcactgctggcccaagataagagatatttgcaatgtcaaactaaagaatcagttaataaaacatccttgtagtttataaaatatcttttggtcaagggattccttaagagcttatttaaaagagctactatacttcatttatacaatacaaagaatgttgtatccataaatttgaatactttgtgaatttttataatattaaatgagctatagttagtaaaataataattaggagttttattttaataattcagtgaatggaataaaagtgctagtaataatgtgttttttattcttcattgttttagattccttatgtaaaattagaaatttgtttcaatttgatatttcctccacaatgaacctgtatctactatgcttcttaaattttaaaagaattaggatagttattttgcttgattactcattctatcatcttttcttcaaaatattggaacaaaattgcttctattccccacttcttgagctctcatgaaaacgcagacataaaaaaaaatggaagtgtcaaaaatgtcatagattaagaacacctgatttatgccgatgaagtcaactcactaaaggctagacagggattttgaagagacacttctctactgaagaataaaggtagctggtactttgcaaacagtgttcatctgatacataaagcctgggaacaaatcagaagtcatcatatgctacattcaattctttcacaacctgcatttaatgtatcatttgatattaagagttctagaaactttatcttcaaactacgtcccaaatctgaccactttcttcctgctttactacaaactccaggaccctcatttctcaattggctaacctgtttttctcctctacatgttttcctatttcattcttctccagctctgacccaggcaattcttcatacagtggccaaatatttaaggtataaatcatgaatattatgtatctgctcaaaactctccaatggcttcccacaggttcaactgcaatgtattagtaatttctttgtttattgtttgtgtcactgaaatacaaactcctaaccaaaggactgtttgtttcattcaaaactgaatctccagtccctacaacagctggactatattagctgcttaaatatttcttgaataggtaagcatggcaacatagttcwcttaaagttaaattacaccaaaatgtctttattaaagaaataatgtcaaaggtagataatgtcagtcacagaactccaaaggataccattcatacagaaaataattatwctgtttctgtctcttgttgggaaatgagagctgtactggaaaatgttaccattcatgcatttttggtattgctgttctctttcatgagtgtctcactagcttcccttcatctacagaaaatcacttggtagactagcaggtgtttattagattatgtcacctactttgtyataaatgtgcatcataattagactttaaatagggctgagtcgaggtgacaacaagatatcacaggagtttttgtttttgaaactcttaagtttttgtcagagggagagactttccacaagaaaaagatttatctgccaagtaaagaaaaatccatcttaaaatattttgctatactatggattttagtatatatgtttttcttctagtttctataaccaattatggtcctatatgaataataatggttttcatatttataacaaaatctaaaattagttatatttatcctactggcggtgcactgagaaaattctactacatttgagcttaaaaaataaataagccttaatgcctcaaatgtatataaactgactcataatttgatattcagcctttgaaagtggttttgggggtacacatttaaagaygtatgtaggccgggcatggtggctcacacctgtaatcccagcactttgggaggccraggygggtggatcacaaggtcaggagattgagaccatcctggctaacacagtgaaaccccatctctactaaaaatacaaaaaattagccaggygtggtggcgggcgcctgtagtcccagctacttgggaggctgaggcaggaggatggcatgaacccgggaggtggagcttgaagtgagccaagattgcgccactgcactccagcctgggctacagatcgagactctgtctcaaaaaaaaaaaaaaaaaaaaaaaaaaagatatgtgtatctgtgygcttacaaaatactcaaccacgtwtcatatgaaaattttcaaaaagtttataaaattgatcatgaaaatttgaattaatccacatttcattaacaacttaaaagttgttttcattaacttaatagttgtttttcatgatttctcagcaagaataagatgctttaagaaatatactataatatttatcaaaattataattgttaattctaaatatattttcagaattccataatatgaaggaatttatctttatttgaagctccttaacaatagcaaatcctggaataatggaaaaacactcctttgtacagatcacttgcagagagttaatgtgattatttgactgcatgcatattcagaatcacatttcatgtaaaatcacagctattacatttttcatttgcattgcataataagtaggaaactatattcaatagaggagatcatgaccccaaaagacacctcactttcccatgatcagacattcacttaatgttttttcctaaataagcaaaccataaacttaagcaagtggaggtgggtgtttctggctgattatttgaggtaaaagataagatacattaagtgcaagatttttcctatcaaaggacttcagtatgttaatgtgggttgagaccttctctagtggtgtatgatacagtgtgtttcctaaacattttgaagatacaattattttttcacagacatttaattttatagacccaaatttatagtgacccatggatcatagtttggtttaccacttgtctgtggtaaagatttctgtttcactacttatctcttcctacacagtgaaattttctataatcacttgaagaagaaggtagctcaaacatccacattctgcagatcttaagccatttctgacagtggtaaccaaatctgtacctgctctggagcttccacatgcaatgcaaagtatctccatcaagctggccttccaacacaaaagccaggattttgcagagggattcaagttacattttaaagttgcaacaaatgcaaagagaacttggacccagttctcagatcctttctgagaattcttggggatattttgtgttataaactccttgtctcccactctgacccaaaaaagattttgacttgattattttgtttatgtcgtatatgtatatgtatgttattcttggctatttgatttcatattattcctaaagccatttttaagtcattgaggttaaaatgactaaaagattcattccgctattttcaaagaaatcctaactagcttgagttctacgtcactattactctatgacatatttaaatactttgcctttargaaatatgagttatttttgtgattatcttataagaagcttttaaggaaataattatgccacacaaacaatgacctctgaagttaaaatatatatttatctttttacaagacaaaaaaattttataagttataatggagacttgagagcaagagcttataggaatagtatattaaaawatatatatatatatatatatatatatatatatatatatatatatgtataattggataccaggcttagaggaactaaattataaacaaaaatgccagtgccctaactgataccatttgaagggtcataatgagatcacattttattcaaatatactaacttgattcaaaatttcaatcaattcagtagagcatgggaaacagaaaccagaggaagagagtgcrggacgcagacatagtttgagatgatctttatgaactgaaataagatacaattgaaagagagattaggacttataagaactgaacagtatttcagcattcttaaggaaattttctgatctcagggagagaaccagaatgccaatcagaaaacagaagcagaagctcgtcttacacactttcagagtggactaaaatcagtggcttatagttctgtggaaaggagatgaccaggacaccctccagtaacaacgtttagggcacgagacacatccactcacatctactaggaaaggagtcaaagacacgtggagtgtttggctgatgcaatgaaataaaatttacaacacaatgaacacactgcagtttaatgatttatataaccttcattgtgttctttgataatcaggcagaaaatgcaaactcttcacatatgtgacatgatttaatattattttataaggtcaaaccaatttttaatttttttcttctctttgccagtatgwttaatcagtatcaacgtttaaacttccagtattcaaaaaatactcctaatgcaatgaaaccattatccttaccggtatatatacattttgtgtgcagttagttcctgaaacttaccctccaatcctgtgtaacaaagttttgaaattaacgacgctaagttctttcctgaccctaagatctgttctcactggccccattgtttggagcagactccccaggtcccattttaggcataactggtctgttattttccatgcctcaacaaaatggcctgccacttttccagggtggactttattgatctcattgtctaccttgttgaaacgtagatactgatactttgtgtttctttcaataatagcatggtactaaaattaactttgcaacactagtaacaatttgtaattaaaaaattatttgattgatttgttatgtgtatcctctgtgtgtctaaaaagaatgtaggttccatcaaaaaccagaaaacttaccagttttgtttatcaggtactttctaactccatacctagcataatttatgtagcctctccgtgcattattttctccacttgtaagacaggattaataaaaaggtcactggaagatttaaataaataattagagtgttgctcatcacctaacacatagtaaaagcttgataatattagatattatttttgccattctccactctatcctgagtacctaaaacatacagtccaattaatattgtttgaatgaatgaatgaagagtggcaaaaggagggaagagtgcccaaagagagtgagcttttagattcctgtcttcctggagacagaccaaaaaagaaaaatggcaacgaaatacttaactggtgggtgaaaagaggaaaggaaaaattgctctgaaatgtcaaggtgttctttggctcactaggttttttttcagattgagtgtgatttcagaagtaggatccctacagttcaaactttctccccataaatacccttgtacttgttcagtattgtcatcagaagcattcactcatttttaattaattaacttatccatttcacaatctgagctaaaccatttaacatgatattacgtagaaaacttggtataagttttttgttaatgtatacattatagcaaattcctcctygagtagcagtaacagtttatcagaaagaaatgagatcaagatgagtaagaagaaaggtagagctataaaatgcaaattttaaaagcttcatattttcatcctgggtcagccctattcatcttcaattgtaaatttacaaatagtatcgaagcaaaagtttatggaatcccaactccattttactgaggtaggcacacaaacttgctatattggaatataaggttactaaggttagactgagttttaaggcaggcatggtcaattttggycttcttcttgtgttatctgggtggactatttaatctttccataaagcaatattttttacctggaaaatataaatataagttatctcttctgattcccatatcataatctacttaggataaataagacacctttttattgagctattaagtatgataaaagaccatataaaacaaacactatcactctgaggtagctgttttgaaattttgaaaatataagactgtattaggcctggcgccgttgctcatgcctgtaatcccagcactttgggatgggtggatcacaaggtcaggagttcgagatcagcctggccaatatggtgaaagcccatctctactaaaaatacaaaaattatcctggcatggtggtgggtgcctgtagtcccatctactcaggaggctgaggcaggagaatcagttgaacttgggaggtggaggttgcagtgacctgaggtcatgccactgtactccagcctgggtgactccatcagccagagtgagactccatctcaataaataaataaataaataaataaataaataaataaataaatagtattagtttgttcacactgctataaagacatatccaagactcaataatgtagaaagaaagaagtttaattcactcacagttctacatggctgggaagacctcatgaaacttaaaatcatggtggaaagcaaaggggaagcaaggcacatcttacttggcaggaggaggaagaaataaagagtgcaaggggaaagtgccacacacttttaaacaaccagatcttgtgagaactctgtcacaagactgcacttgggggatagtgcgaaaccattagaaaccaccctcatgatccaatctccttcaaccatgccccacattccacatgtggggattacaatttgacatgagatttgggtggggacacagagcccaaccatatcattctgcccctggcccctcccaaatctcatatccttctcacatttcaaaatacagtcatgcctttccaacagtctccctcagtcttaactcattccagcattaacccaaaagtctaagtctaaattctcatctgagacaaagtaagttccttctgcctatgaggctgtaaaatcaaaaacaagctagttacttccaagatacaatgcaggtaaaggcatttggtaaatgctcccattccaaatagaagaawttggccaaaaaaaaggggctacaggccctgtgcaagtctgaaacccagcagggcagtcattaaatctaaaaactccaaaataatcttctttgagttcaggtctcacatccaggacacgctgattcaaggggtggactcccaaggccctgggcaactctgccctgtggttttgaagggtacagcccccatggctgctttcacaggctggcattgagagtttgcactttccaggcacacagtggaagctggtcagtgaatttaccattctgtggtctggcggatggtctccctcttctcacagctccactaggcagtgccccagtggggatttggaaagggtgttccaaccccacatttcccctctgcactgccctggtagaaattctccatgagggctctgctcctgcagcagattttgcctgaatatccaggaatttcaatacatcctctgaaatccaggtgaaggttcccaaatctcaactcttacctccttcccacctgcaggcccaacaccacatggaagccaccaaggcttggagcttgcaccctctgaagccacaacgtgagctgtaccttgacccgttttagccatggctggagctggagtggctgggatgcagggcaccatatccctaggctgcacagagaagctgggccatgaatttgrcccaagaaaccatttttctctctcaggcctctgggcctgtgatgggaggggctgctgtgaaggtctctgaaatgctctggagacactttccccattgtcttggtgattaacatttggctcctcttgacttatgcaagtgtctgcagctggcttgggcttgaattcctccccagaaaatggatttttcttttctaccatatggtcaggctgcaattttttccaacttttatgttctgcttcacttttaaatataagttcccatttcagaccatctctttctttatgcaaatgagttaggcttttaggaagggccaggccatatcttcaacactttgcttcttagaaatttgttcctccagacgcccttgatcatctctctcaagttcaaagtttcaaagatttttagagcagggacaaaattcctctagtctctttgctaaaatatagcaagaatgacctttgctctagtttccaataagttccccatctscatctgagaccacctcagcctgggcttcattgtccatatcactatcagcattttggtcacaaccattcaacaagtctctaggaagttccaacctttcycacatcttcctgtcttcttctgaacccttcaaactgttccaacttctgcccattacccagttccaaagttgcttccacattttcaggtgtcattatagcagtgccccactcccaataccaattttctgtattagttcattcttacactgctgtaaacacatacctgagactggatcatttataaagaaagtaagtttaattgactcacaggaagagagagagtgtgtttggggggaagtgccacacactttgaaacaaccagatctcgtgagaactctgtcatgagacagcactagggagatggtgctaaacctttagaaaccaccctcagaatccaatcacctcccaccaagccccacyttcaacatgtggggattacaatttgatgtgagatttgggttgggacacagagccaaaccatatcaaagactatatcaaaatgtgaatatgcacatgacttattaggtacatttagggaaagggttagcytgagagtaacaacctaatatccaaatgatttaagaaatatgcataacmccttgaaattaatataaatagtatactaactcagtattattaggacactaatgttctaatggtgatgatctccaggttgaagctataaaaatcattgttaaaaacagatttttgttttcattttatagtctccaattcagaatccccagaggataagcctgggagtagatactttacaagcatrctggtgattcatttcatgtgggcaacttgaaaataattgctcgacgtttattagaaccagctggagtatatgatgaagtgcacatttgtaggcattatgacagacaaaaatcagtatttcctgaagtgggccccagaattgacaattttagcaattttctctagaaaattgtacacataataaagtttgaataccattactgctttatcaaacagtatgtagctatataggggcaaagttggactctcattctttttcctgctttcttccttccttccttccttccttccttccttccttccatcctttcttcttctctttctttcgctttgtcagattggcatgaacatggctcattgtactctcaaactcctgggctaaagtgatcctctcgctcccaccctggaagtagttgagactacaggtatattacacaccccaccatgccaggctaatttttgtatttttttgtagagaaggggttgcaccatgttgcccaggctggctttgactcttaagctcaagcaatcctcccagctcagcttcccaaagtgctagtaatataggcgtgagccaccacacccagcctagacttcctttctgaaatactaagaaatttattaggagactattgaattaatggaagttatgtttattaaaataataaattattgatttttataaataagttacatatttattctctttaatatacaatcaacttagtgagttcttcataagcagtaaaagaaaaaatttcaaaaccatttatattgtttgttatgtcatgcagactattaaataaataatgtatattgtcaaagctctaaacgcattttattatttttattttatttatttctttatttattttttgagatggagtttcactcttgtcgcccaggctggagtgccattgcgcaatctcagctcactgcaacctccacctcccaggtttaagtgattctcctgactcagcctcccgagcagctgggattacaggcatgcactaccacgcccatctaatttttgtattattagtagagaaggggtttcaccatgtgggccaggctggtcttgaacttctgacctcaaawgatccacctgcctcggcgtcccaaagtgctgggattacaggcatgagccatcatgcccagccacattttattacacatattcaaaactaaagtttccgcacgaaatattcaggtagaaaaaagtgtatttcctgagctttactattttatttgtatcccaaattgagamactttatttctagctcattaacaagcttttccaaaataaggggttttaaaaattgaagggttttaaaagaataagttaaatttgtacttaatttattcttaaatttatatccatattatttttgccctaatatttcttctgacattttacattattcctatattggaattctttcatctttctacttttcttctgaatttgtatggtttagcacttttctcttttaaatttatttctgattttttttagtttgaatcattttgtgtatattcattgttatttttttctcccttcctttgtaactgaatggcatgaaaacttttctgaagtttgaaaactaaagaacatttacttgtactaaacaaggaagccttgaaaactttttaagatttgcttttttttcattcgttttgtttttacttatagaatttgtcatttttactccctcattaatccagactacatgttagtaggccatgactagatagctctttttttcaacaatgaaaaggtctgttaagttcttcacatagctaactagccccccatctgcctttgcctctctgaacttgctttagagatctatgacacaaggctataaaacatctgtgttataaaacatcctggtgaaatgctagatcctatctatattgttctgatatcatcttgtggtatggcccatgaactatgtttatcatattaccattggaaaaatgttactgacaaaaattaaaaattaaaaataaatgaaactaatccaattattgctgtgtattagtatgtacttttatcatactttggatacatcaaaccttactcattttcatgtatctcatgttactaaatgcaaaaaaaaaccagtaacatgagatacatgaaaatgaataaggtttgatggagcttcaggtgcatagactaaaggaaaacatgagatagagcatggatgcaataaagtcaaaaataatgcaagttttaagaaaataatttaggaatctactttggtgtaccagaggaggctttatacaaaaagttgacatttgggcggagatataaagaattggtaggatttgggaaatggcattgggagctggggaggctttctaggcaaagagaataaagagagaaatagcactgggaaatgtaggaggtgggagatagttaagtttaaccagagtacatggtgatttgcaggaaatagcaatgggtgttggaggcaccaaggatacctaactgatggagagagaatgatagactcagttatcagtaatagtatttattgagctcatgctacttgccagacacttagctaaacaatttgcatgccttacccaatgtaattctcctaataagagtataaaataaattttcagaagtaccccatttcacagataaataaatgcagaataatgaatgacttcaagaacttagaggaagaaagataagtggatgaaattggagtggtgaggggaatagcagacgggagaaatttttttaaaaatcaagataaggagactaagaaattgtgcatggaatacagccaaaaaaaaagccagaaaagggaactcactaagggaaataatgcataatattcttattttaaggctgtattccagagcatttaccaatatgttcaactagttcaatgcactttttatctcaactgtttttaatatttagtttaatctctatgagaaatgtatttttaatattttgtagaactcagttaagctagtggttctatttctgcctttgtctacttagttgataatatttaataatgttgaacatgataacacccagtctaattgtggtcttggataaccattgactatatattttatcaacattttagttacttagtcatttttttaattaaactaatgtacaggagactcctttcattgtaaaggaataaacagttaggttcacaagtctttgaaacaaatgcttagccaccatgactaatggaaaaaattgtttaacctctgactccttagtctccataacagatggataggagtaatcaaaaatcagtcttattattaatatctcttgtttgaaattagcttctcattttaatcagaacaaagtatgtcctctttaaaaatccattaaaaatagaaaaagcattctgaatcaatatgcataccagtaagcaaactaaaaagcccaaggatataagggttctgaattatgctacaaattttgacataggaataatggcggtgaaaggattggcaacaaatttacataactaattctgtgtcattattagcaatgtgttattatcctgtccacaaaccagactttcacatagtataattccaaatctagaaactagggaaatgtttgtcacatttagaaaatttctgttatggaattagtaacaaaaaggggtatctatttttacatgttcttccctttttcataactaggtttgcaagcaatgtcctataaaatacacattgctctgtagtttgtaaggtaaaaacccaagctttcaatttaataattatgcctttaaaaatgatgagggaggtggcccagttaaataaaatattaaaytgcagttcaaacaaaagttctcctcctattgcttaccatgaaaacaggacttgtctgcattcaacaattctgaaaaattttcaccacataaaggaagtataataatccaaagttcaagaaatgtctcacacagaaatgaaaaatgatttcagtgctgtggagttggacaattgcctctcagcaatgcaaaatgtgcttaggacttaactgtttcataatatggtgaccttcaataaaaataatgactataataattataatacctgaaatacgaatactacataacagtacccatcaaaaacaagaaagctcatatcatttwgttttactcatgcatacacatttgcaaaagaggcatcccaaaacttcatatttatttttctaaaatcatgttaatttcttatttatttcaggcattactagagactcaaaatttactgcgcactcaggttgcaaattttaccttcaaccttggattttcagggaagttttaccacacaggtaagaaggagctttgtgttctcaggcagctacatataaataggaaataaattttgaatgattcataagtggtagagatagattctccagattgattatgggaaaaacttgggcacattatttgagtagccaaatccaaaatcaatgagcatatttaccttggcaaatactgtttaaaatcaagggcaaaagagaaagagaattgactttttcaactcattttttaaaaaatagaaagcataaccactgtactgagtatgactgtgcatcttgtttctcagcacagtatgggtagaaggcatagtaatagtgataatgagaatactactaataataactgacagaattttaaaattatcaaatagttgatgagatagatacttttgtacatattattttcctttggaaaacatctgatgatagagagaaactttatggtctcaatgaaatgtaatagactctaaacttgttagtttaccttcacttgcaggattttttccctaaaacaatattaccactaatttggcctaacatagactaaaaccatcacaattagacttgtatttctttccatctctatccagccacaattgtacttatgttcagtctcaccctctaaataaattcttaaaatgtgattgctattcatgtgctgtgttctgatattccttacttctttacttaccctcacctccaaaatgctgactttttattttctgaatattagcattgaaatatctggtaccatgttagagaaagctatgctaataaaattgattgtctttgacaaaaagagtactaaactatgtgttggggcctgtgttaggggaatacctataatctgcttctatttgtgcatccatgctgtgaactgattgctttgtttagaagtttgcactgttgttgtttcacagcaccttagtgaaaacatttcacagtatttattctgtatccatgtatgcaatttattaacttattaaaatattctattcaaaggtagtctttagttttcataaataccttgtttactaaatgaggctttttaatgtaaaagctcaatatggtttgttagaatattgaaataacaatgtcttattggcttttccttgatgcttttttttctcctgctttgaaacatgtaaacctgcttaaagtaatagaaggaaaattagtatgtatacgagttgataaatcaaatgatttcatattttaaaaggatgttttgcagaaagagatttgggtcagcatatctgcacaggcaaagcaatttcagcttgcaattttgaaaatagacatggttttgtaaatcttttcaaaactccctcaagaaatgatttcagaccaaagaagctctgactatgaagttataaagcaratagctttaaaggctatatctactcatgcagggggaaaaattatgggattatttggagttcacatacaaacaatactattttgtcttaaatagctgtagattgtaaggaaagtcattcttttggctgaagtatatctggataactgcctcagtttttatttacttttcatactcagacctattaaatgtgcctgacatttgcaaagttaatgttgtagaggatacaccacttcccatttcttctttaaaacactgaacatgcatagagtacacaaccactgggaaatgagcagcactccagtcagtatcacagaaatagttattgaagaaggacagtaaaaaagaaagatgtattttaattatatcttttaagcaggcattattgactctttgtgttgaaaccagtataacaaaaacaatagaatagtttgtgttgtaatactgtggtgatagtacactttagagaataagcaatatttataaatctataaattttagaagtttaatttctttcacataaatatgtcatttttatttaatggatatatttacttcatttgtaggatcattgaaatgcacctataacatatttcaagagtgccatcataattatatgaatacttattaatgcactcagggatatcaaagtttcttctggagctgagttacacaacgtgataccctttcagatatcagaaagacgtgccttacccctatcttgtcacatttctatacggagatttcacattttagaaaaaacaattgcaaatcaaggaggtgcattccttacatgtgcacttggctgtgatgtgtaaccatgaggagatggccttgtcggactgactgtctctgttctctcccagaatgatctgatttcccagtgcgtgaggatgctgatggatgagcctcattgttttgaagacatttaatcacataggcccagtgtaataatgattgattctgcatttcttaggctacttcacttatgtgtatttctcatgtattctttcctgttcagtttctctgtccttcacatgctaaaaacaatctcacctcaaaagggcataccactaagcttttcctaaagtcattcacccacaggtgccaaactgaaagaggaaggacgtagtgcaggttaaatgggaaaaaaataaaagcacggagtttagaatgaaataycttagtctggaaatatttagagcttgaatggaattgcataacaaaagcttaattgagaaatggagacattatagtattcagatgccttctttgaaagaggagctacccactgtattttgccagggacatgatttctggtgacaatcattgctgttccttggaattaaatgtgacccaatcaataattaattcatgaataatgtttgcaaattgaattaacaattaacattggtcttttccatgagagattattttatgaaaaatagcattttctataaaatcattaactttcaagcatgacagtaagtagagtgttacattcttaccccttctgtgattttttkttttttgcatatgttgcttttctgtgtggagwattagktaaaagacctgatattggtaacaaacttgatgttcaaatccagattctgacattttgccagcatttgaacacagtttacttaaattttctgtgcctcagtttatatatctaccaaatggggataataatatctcttttattaggagcaatgcttagcatgttacaagtgctatgtaaatgtttattattaattttaaaattattttcatataagattcaaatattatcaaaaagtaaatagtagacaattcatatrgcactattttctaattttggaaccataggtagcttttaatcaatgtttatcattccacagttctttatatttagtataatattaaaaagtagtttattctatccccacatatatggaaccatgccaggttcgatgtacaaggaaaattagaaaatatctcaacatttagaaattatattttatacaaattacacaaatataaggtagaaatttttacaaaagagaaaataaatacactgaaattatatatatcttaatttaataactgtacttttaaggagattaacctgtagggcaaaattattcttattttggcagacttaaagaaatttcagaagcatacttttatctcacaacacagattctccaaaagtgatagtaaagaaacaaacttcatgtattttacttctgaattaaaacattttttattcattggtaattaggaaatgtaaaaaaaaaattttaataagtgcaaaatgtatttttttcattaataattatcyagaccaggatctagatcagattagaagtgaaaggtttaatttgagcacagatattttaatggtctgtaacatgctaatctggtcacatataaactgcaaatgatatttccacatataatttaagtatatattaggtacagaaaaataaatgtgctaatctggtcacatataaactgcaaatgatatttccacatatactttaagtatatattaggtatagaaaaataaatgcgctaatctggtcacatataaactgcaaatgatatttccacatataatttaagtatatattaggtacagaaaaataaatgtttacaggaagtccaaaatgtaatactttcatctagttggatttgaaatcatttgagattctgctgctgtccctcagtatggcttagtatcatattttttattaagctgtttccagtgtcaaaggtttgcctcatgtggctttgaattatatgaccagcataaaacaagagaaaagctgacaaaaattaatccatgatgcaaacaaaaggaaagtcttaaacgttactctcagctyttttgagggtgtttataaattaacataatctctaatataaaaattgctaagattttatgatcagtcatgcatctgtttctatcaatagtccacaaaattttctttaaattgagtaattgacctcctacctggtcaagtgtgcattatgtgcttcctgccacttgcaataatgatcagcagagtttaaaatgaatggaagcatttttcaaacactctgtattcaaagcacacaagacaattccaggagggtgggagaactatcaattctttcatcatatgtgacataatgtaactctttctaatctgtgcctcaatttgctaaaatatgaccatgagaaacatataaacacctcatctgaggaagtggtaaactcttcttcttttgaattttaatatttcatattcttaatatattaacaaaagtcaatgaattatgagtcagtaatactaacactgttagctaaaacaaaaattaagaaatcctctgctcatcttaattataggactttattactttcaaaatttctaatagtaatagaatttcttwactctgtgtagtagcattgaaggtgccaaagccctaattaaacctgaaggtccttatacctttcaaagattatgaattatgaactctattccaggaacagtgagtatacataaaagaaagaagttgctatatactttggtggccatgtgaagctgcttaatctactgactttgttaaatatagactaaattaaattattcatttattcactgctctgggtaagtggcgtgttacagtacaaggtaaagggatccagtccctgactgtaagaaatttataatctacgcaggcaaagtttctaaaacagtgtgaatacatataaattcaaaacacagcaaatacaaagcaatagatagaatttttaaggtatattcaaaaagtgcttactacttgcaagtagcaatattaagtgctttaataaattaatctcatcaactcttcactaagaccctgtaaaacaggtatttataatcctattttaaaacagggaactaagacctagagaggttaacttgtccaagatcacatagttaattaagtggcaaaactagggactctgctccaagtactgagtgacaccaaatacatgctttaatcctttcatggagctactctcatgaccatggaaatctttaagacacacacatggaacattcagagaaaatccttataaccatctttaatatttattccctaaatttaagtaaaaaataaaaataaaaaatcaaacatccatctgtaaaacatattcttttgtgagagaataaaccaaataatacamcccacactataagccaggacttattctcttatttacacagttaagtagtaagagagcaagcaggaattaattcttatgttatcgattcacaacatttgtaaattcagctgtatatagtaaaattgtacaaaatcatacgaaaactctatcatttcatttgtggatattcttggatagctgcaatataattaattctcttagaagtaagttttttttttcttaactgtggcataacaatgttttttgtttttatttcctatgtattgggtgctgttaacaaattttcccaaaagaagaagagaaagtgatactagttttaaattctcaagtcacacatattataaacaattatcagatccattgtttagtttttatgaaatatttatattaaaatgggaaatttgatatgtataacattaagtgaaaaatttaagcatgcaaaaatattagtacagcaagagctaaacttttaaaatataagtagaaaaagatttttgaaaataatacaaaaatgtttttactggttagctctagaagatggtcttacaggttttttgttgttgtttttgtgtttgtttttgggctttgtgtattacttgcctgtgcttttgacatttctttaataaacatatattatttatgtaatcagaaaaaaattaacaaatgttatgagttaaaatttatgtccaattatttgagaattaccattaacatttaagggtaaaaaatatatgttagggtataaaatacatataagggtataacatatatgtaagrgtataaaatacccttaaattctaaattaaacaactgtctgacctggtgccagccatgcctactcaccccatcctaatcccaagtccctttgcctttgattcattttagactgtggtcttttattctgatttaaaaagcccacagaattggatatatgtatcagcagcatgaaaaattaacataaatctgacaaaaataacctttaagatagtaagaaattttcactaaagttatttttaactttatgttttaaagggactgaagaggaagatgaaggagatgaccttttacttcggtctgtggatgagttctggtggtttcctcacatgtggagccacatgcagccccacctcttccacaacgagtcatctttagtagagcagatgattctcaacaaggaatttgcactggtgagcacattttattgtggtatcttttgaactataagttgtgatcttgtggtggaagtgtaaaattaatgtattgggttgaatatgatagaaatagaataaaatataatatcagggtgcatcacatgtattgagggtacatataactttgtgatattttgtttcaggcatgtgtgtatatgtaaaggaccattatgtaattatatagaaaatatatttcaaaaagtaagttattttcagaaagctttcaactcctattttacgagatgactactcttgtatctatgaagatgaaaaaatagtacaactttcattcttggtgcaatataattaaccattcaaaaataatttattgcttaacatcactaatcattagagaaatacaaatcaaaaccacaatgagataccatctcattccaatcagaataacagttattaaaaagtcaaaaacaacagatgttggcaaggttgcagaggaaaagagaacacttacacactgctggtggaaatataaattagtatagccattgtggaaagcagtgtggcaatttctcaaagaacttaaaacagaagtaccatttgattgagcaatcctattattagttatatgccaaagaagtataaatkcttctaccataaagacgcacacacatgttcatcacagagctattcacaacagcaaagtcatggaatcaacctaaatgcctatcaacagtagattggataaagaaaatgtggtccatatatacaccatggaacactatgcagccataaaaaagaatgagattatgtcctttgcagcaacatggatggggctagaggccataatcctaagcaaactgacacaggaacagaaaaccaaacactgcatgttggcacttatgagtgtgagctaaacactgagtacacatggacacaaagaagggaacaccaaaccctggagcctgcttgagtgtggagggagaggatggaaaaactacctgtctgatactatgcttatcgcttgggtgacaaaataatctgtacactgaaactccatgacacaatttatctatatcataaacctgcacatagccctgaacttttttttttttttttttttctttttctttttttgagacggagtctcgctctgtcacccaggctggagtgcagtggcgggatctcggctcactgcaagctccgcctcccgggttcacgccattctcctgcctcagcctcccaagtagctgggactacaggcgcccgccactacgcccggytaatttttttgtatttttagtagagacggggtttcaccgttttagcccggatggtctcgactattttttaaataatagttwaaaaaatcatttgttgcaagaatgaaggaaraaatgaatgagttgaatgtttggagccatgactctagaccagkggctctcatattttagkgtgatctatttcacctagaagacttctgaaacacagactgcttggtccattagcacagtttctgattcagtagatctgcagagaggcctgacaatttgcatttcagaaacttcccagatgatccccatgattctacactaagaatcacttgctctagacgaggggctggaaaattgtgacctttaagccaattctggagtgctacttgctgtttatgatccctgacctaagaaagccttttttaaaaacatttcttaataattcaaatcaaaagtaagcaatcaaaggaacagtgatattttgtggcatgtaaaaattatataaaatttacatttaaatgttcataaataaaattttgttggaagactgccacactcattcctttaygaattgcctgcagctgctttcacattgcaatggcggagttgaatggttgtgaaagagatcctatggtccacaaagcctaaaatatttttatctcaatctttaccaaaaaaaagtttgctcatccctgctctagacgttaattaagccatgtattcctttaagaatctaacaaaagacagaaacattttcccttgaaaaatgctcagatgcacattctcacatcttcacccagtgggacatacaatcacaaagggtttgtgaatccagcaaagaccctagttcctagttaggaactcctaacttaaactgttgtgattcattagtactgtgtgatttactgatattttcgttgttttaagccatctttggaagcatagcgcaagtcaaattaatactatgatatgttacaaagttatgcccagttgttaagctaatagctcatcactctttgagtctctaaatccccagaccaatgtcagatctgcacacaggattcttagtagtaaatgtagaaaacataaaaagtrgttaagatcaaggactcaggcaccagattatctgtttgaatcctcaccttccattgatggttgcttgaccttgaacaaatgacttagattctctatgtctgtttctccatttataaaactgagataatggtaacaactacctcatggaattgctgggaggatatacataatgtgcttagagcagcggctggcacacagtaagcattcaatagtgttaattaaccaattatgacctttctaaatacagaggagcatgcaattacatcttgcttttaaaacacctawtttttttwaaaaaaaatatggatttacaaggggtcattttttacttaacttttaggaaatgtctcataaatgtggtactgcttcatagcattataaaattaagtaaatcttttccatttcaaaaataaacttaccttgagtaagcatgctaaattctctcaggacacttaccttgaraataaaacatgtttatcacctgtcttaaacttcccccacttcattccactacactcctactctagagccttgcgttttagggatataggttatatttcataatggttgatttcacctgtttgtgtaatttcttttttaagagccatgctgagagctctgrgaagactcagatgtaattgctttgtaatgaaatgttgaaagctatttagagtccattcagagtaattacatttgtttagtcagcgtggctagaaactacacttattcctataaatatattgtgtaaaaaatcttattgtattttacatagtccaaatattacgactaaaatgaagtccattaaacatatatcatactgaaatgacactgtccttttccttctggagttcagctcaataaaactcaagactcttcaagcagtgacattcagaaccccacctttattgtcaacataacatgacaatatgtgtgctatccagagagccaagagatatatctctttcttattaaattattatcttttcacatccagctgacactttagagccatcaacagtatcaagataggataggatagcagaaacactaactggatattggtggagtaaattttagtcttgactgctagtaacaagttctgataaaattggcaacttatttaatgtctttatatctcactttcctctctcgaaatagtaatgacttgctctttcattctctaaactacaaagtttttagataattaatttacatcaactcatttgccaaccaaaggcactggaccagataatgctactgatcaatttcagttttaaaattctgtgatcatttgtggattacatcggtccacaaatttggaatgaacatcatgaaatccttatctagctggaattgaagcaattatgagaaaatattttcaaactaaatgaacaattcatacagataaaaatcaaaagtctttaaatcctttttttaagttctattctgacattcctcattatcccttgatatgaccttggctgtcagagggattgtcagtctcaaaagcacayttgttctcatagcagttccaaaaatgattcaaacatattcagatatattaatagcttgatattgatatttcaaaaattgtattttttaaatacaatctatctgagtagtttcatttgtggaatttctctgaaatgtttccggatggagtttgttttctcttgtaatatgtttaaaaatcatgagagaaacacattgccacatttcatcatgttggaagagactttattaatataaaacattgttattgttattgcttcatccatacacacacacatatgccatgtgaatatgtatatgcatgtgggagttatgtgtatgtatatgcttaatccatgagcaccaatgtatgcagtgggggtgtacatgtgtgtggatgtattatgcttactccatgcacatatatgtcatgtgtatatgtgtgtgtttgtatacaggatcttagtctaatgacaagcatagtcaaccgaaatatggcagttacaagatacccttcttagtatggcagtagggtggagaaaaatactttttggttctttttccttcaataactcatagatctttgctgctattcagttgcttgagtacgtcaataaatagatgcaaagcttcaataacaacaatagatgaatgaaggctaaagagaactagaaacactggccaacatgaaagcactaataaaaaaaattaccaaaacttattcccaatttaacctacagctattttccagccatagaaagaaaagtgcatataccatacactgaactgtttacctttattccacaatagactkgaaaaaaaagtttaaaaattgtattttgttgttttaagttttacatataaactcattaaagttttcaagccagtagggcttttcagttcactaatagttgcagacatgaaatatcctgaaggggtaagtatcaagtttttgtccttaatattgacattttcaatgatgatgtgaattttacttgctgtgttattgagcagtctggtatcattttcatgactaagtgaagattcttgaaataaagacataggattttaaattctgattttaaaaagctacacatatttatgaaatctatataacttttttcataattacacaatatacattaagtaaaaaatgctgacatttaaattgttctcataaaaacacaaatctattaaagagasactatggaaaatccttaagtgtcataataggctgcacactcaatcagctatgtatgtgtcatattaaaaagaaataaagtaatatgataacaaattaatagtataatgaaatgaaactgagagagagcttcctttcaatgttgacaatgctttacagtatttttactggattatccagtttacagccttgtattatgccacaaatgcagaaaaaaactgataataacttatagggtatttaaaggtagggaatttagagaagawaaggatatttacactaaaacaaaattgtgaacaaatatgcaacaaaaattcacaatgaataaatagtgtattttggaggttcaataacaaataaaaaaatctttacactcaagagtggatccacatgtgcaggaaagatttaatcacagtaataaaaaaccctgaagcaccaaggcattgaaaaaagaaggaaattctgtaacacgtgacaacatggatgaaccttgtgggcattatgctaagtgaaataagccagtcacagaaagacaagtactgcataattccacttatataaggtatctaaaacagtcaaattggtagaatcaaagagtggaatggtggtttttagggactgaaggaaatgagaaaagacgatttaataatcaaggggcattaagctttagtcaagacgaataagttctagagatctgccatacaacattgtgtttacagccaataataatattgtgtacttaaaaatttgtcagaaaggtagatatcatgttaattgttcttaccacaataaaataaaataataaaacattttttggaaattgaacaagatcttgaggtatcatatggaacacctgccaatttagtacaaatttctatgtaaattacttcagtaattgagtgcattagttaacattcagatatcttagatattgtttaataacaarttacttagactataaagacctaaaacacactttaattatttaacagtttatgaagtcaggaagttgagtatgaaataactggatcctgcagttcaggatttctcacagatgtcaatcaaggtgtcagctgaggtggcagtcatttcaaggctcaactggagggtggacctgctgccaagctcacatggttattggcaagattcagctcctcacaagctgttggattgaagacctcaatttcccaccagctgctgcctgggtctgccctgtgttccttgccatgtgggtcattcaggatggcagctcacaacacagtaattggcttcattagagctaaggctctgagagaggaagagaaaaagagacagattgattcagagtcttttattatataaatatcagaagcaatacctcttcacttataccatatactcttcagaagaagccagtcactaggtctagcacacgctcaaaaagagggaacataaacaataaagggaatatcaggagacagcgataactagttggaagacattatagaagctgcctatcacatctaactagaaataagaaatacagaggatcctgtgtgatataactcacacttactattgcattaatttmaaaatatttgcgtattaactaaaacctaatatttttcttcaaggttaatgtcaattacatccttcaaagccataaatattgaattcatatattacctttctttctctcatctaatccgttgcctctagttgaaaatgtatttagaactgactaatttgacgtcttaccacttctactatcaatcaacttagtgcaagttaccattgtatcattttagcagctttattgatattggtattaacatatcataaggttcacccacgtaaagtgtaaacttcaatggttttcagtgtattcacagatctgtgcaaactaatcataattttagaacattttcatcaactcattttaaaaaagtacccttagcaatcactttccatttctccccactccctcaacctaagcaaataactaatttactttttgtcttcacagatttgcttatactggacgtgggatataagtagaatcatacattacatggtctttttgacttgattttttcacttaacataatgtttttaaggttcaaacacattgtaacatatatcagtacttcattcctttttattgacaaataatgtctcattgtatggctctatcatattttctttacctattatatatccattccttatcagttcatagacatttgggttgttttggggttgtttccactttctggctagtttttataatgctgctatgagcattcaggtgcaagtttttgtgtggagatatgtttttatttctctttagtatctacccagaagtggaattactgggtcactaactttatgtttaacattttgatgaatagccatgctgtttccaaagtgtgagcaccattttatattctaccagcaattcatgagtgttccaattgctctcaccaacccttgttattatctacctttattatagtcattctagtgggcgtgaagtggttcttttctttcaagatgattttgactattctgggtcttttgaatttccatatgaattttaggatcatcttatcaatttctgcacaataaacaactgggattttgacagtgatagcagtcaatctgcaactcaatttgggaaatacagctcttaccaatattaagtcttctgatacrtgaacatgggttgtcttttcatttatttgggtmggctataatttctttaaacaatattttataattttcagagtctaaattttgaacttctttgatcaaatacaatcctaagtattttaatctttttgatgctattataaacaaaaatcttttaaaattccaattttatattgttaattttttgtatagaagtacaattgatatttgtatatggctcttgtaacatccaaacctccaaatttgctgagctcatttattatttttagagtttttcagtggattccttaggattgtctatgtataagattatgtcatgtgcaaatagaaatacttttacttcttcatcctcaatctggctatattttattttattttattttagtctaattgtcctgactgtaactttcagtacaatgttgaatagaaatggcaagaacaaatatccttgttttatgcctggtcttaaggggaaagtatgcagtctttcgccattaggcatgatgttagctgtagatttttcatagatacctattatcaagttgaagaagtctctgtttctgtatgtatctgcatgtatttttatcatagaaggatgttggatttgttacatactttttcctcctttattctcttgatatggtatattactctaattgatttttagatgttaagttaaccttgtattcctatgataaatcccactttgttattgcatataatcagttttgtatattattgagtttgattgctagtgcctttttgggtattttttaaactctattaatagagatactggtctgcacatttctttttctttagacatcattgtttggctttgatgtcagggtgatactagcctcatgtaattaattgagaaatattctttgctcttctttttttatgtataaagggaagagaagtcacaaattacaagcattaattattttttgtatgtttggtagaagtcacctgttccttgcttttatttgtgtgaagtttttaatttactaagtcattcaatttacttgttataagtctatttatattttctatctccatttgartcaatttcagtagtttgtgtgtgtctagacatttactaattttatctaagttatcaaatatttggcatagaatgttcatagtattacctcatggcagttattatttgtataaggtcaatagtgttgtctccagtttcattattgattttaccagtttgtgccttttcccccacttggtctatctaaagtttttccaatttagttgatcatgtcaaataaccaaattttaattttattgtttttctctattgcttttctcttctctatttcattaatttctgttctaatctttattatttctttccttctaattgctttatatttaatacgctttttttcaatgttttacggagaaataataggttattgacttgaaagcttttttatttttaataaaggcattttacagctatgaatttccctctaagcactaattttgctgcttcctctaagtattagtaagttgggtcttcatttttattcatctcaaaatatttcctaatctcccttgtgatttattcctagtggctgcttaagagtttcaatatacattttaacttctcagaatctttttcaatttcacagtggcttttccagtgaagtatagaaacattatatttacataactctattcctccctccttccttctttattattgcacattacatccatatatgtgacaaattcagcaatacattgttatagtttatactttatataattttatgtttttaaaacttgaaataagaaggcagagaaagtatatatttataggtttctacacaaactttcttctatgacatttttctactcttcatttgttcttgtaaatttaaatactatttggtgttacttccttacttcaatatggcttttctcccacctgtcttttttctgctgttattaaaaatatactgcatttacacytgttatagtcatagcaatgaaattatatgcatattrttttctatcattgctttttaaatctgatgagaagagaaaagaaatatatataccgtcttccataaatacgtaattacctttaccaacattctttatttctttctttcttttattttttttttctgcaacctctgcctcctgggttcaagcaattttcctgcctcagcctcctgagtagctgggattacaggcacctgccaccacacccagctaatttttgtatttttaatagagacggggtttcaccatgttggccaggctggtctcaaactcctgacctcatgatctgcccgcgttggcctcccaaagtgctggtaatacaggcatgagccaccacacccagcctttatttctttatgttgattcaaattactctctgtggttatttgctttcagtctgaagaactacatttgtaatttcttgtaagagaggtttggcaatgtattctctcagttttgatatatctgtgaatgtatttatttcaccgctatttttgaaagatagctttgctagatatacaattactgatttactattttcttttttctttccacttccttctggatcccacagtttctattgagaagtgaatagttaattttgtgtttcacttctatgtgatgagttcttttgcgactttcaagatttgctgattgcctttgttttcaaaatttttatgatgatatatctgcatatggatttctttgtttattttagttctagttcactgagcttcttatatgtgtaaattaataattttcaccaaatttgcaaagtttttaggaaataattttttgaataccctttgtgtttctttttctcccttcactcttttgataatcccatctgacatatattggtacatttaatagtgtcccacatttctttgaggctctggtcattcatttttcctacttttttcctctttattctttagttgcataatctcrtaatcgattttcaagtgtgctaaatttttcttctgttagctcaaatttcttgttgaaccctgatatggtttggctgtgtccctacccaaatcttgtcttgaattgtagctcccataatccccacgtgttttgggagggtcctggtgggaggtaattgaatcatggggacaartttttcttatgctgttctccagacagtgaataagtctcatatgccctattgcctgccaccatgtaagatgtgcctttgctcctccttcaccttccatcatgatcataaggctttctcagccatgtgaaactgtgagtctattaaacctctttttctttacaaattaccccatcttggatttttttcatagcagtatgaaaatgagctaatacagtaaattgataccagtagagtggagtactgctagaagtatacccaaaattgtggatgtgactttggaactggataacaggcagaggttggaacagcttggaaggctcagaagaagagatgaaattgttggaaattttgaaacttcctagagacttgttgaatggctttgaccaaaatactgaaagtgatctggaaaatgaagtccagtctgaagtggtctcagatggaaatgaggaacatgttacaaactgtaatagaggtgatttttgctatattttaggaagagactggggacattttgcccctgccctagagatctgtggaacattgaacttgagagagatgatttagggtctctggtggaagaaatttctaagcaccaaagtgttcaagaggtgactttggtgcttttaaaatcattcagttttattcattcacaaagatatggtttggaattggaacttatatttaaaagggaagcagagcataaaagtttagaaaatttacagcatgactatgcagtagaaaagaaaaacccattttctgaacagaaattcaagctgggtgcagaaatttgcataagtaacaaggaaccaaatgctaatcaccaagacaatggggaaaacgtctccagtacctgtcatggcagctcctcccatcacaagtcatgaggcataggagggaaaaatggattcctggactggaaccagggccttgctgctttgtgcagtctggggacttaatgccctttgtcacagccattgctaaaaggggccaatatactgctcaagccgttgcttcagaggacgaaagcccgaagcctttgcagcctacatgtggtgtttgatggagatgattggtctcagatggagatgtggaacatgttacaaactgtaataaaggtgactcttgctacgttttagaaagagactgggggtctcagatggagatgaggaacatgttacaaactgtaataaaggtgactcttgctatgttttacaaagagactggtggcattttgcccctgccctagagatctgtggaactttgaacttaagagagatgatttagggtctctggtcaggaattaagttttgggaacctccaccaagatttcagagcatgtatggaaatgcctggatgtccacgctgaggtgtgctgcaggggcggagccctcatggagaatctgctagggcagtgaggaagggaaatgtgaggtgggagcccccacacagaatccccactggggcactgattagtggagctgtgagaagagggtcaccatcctctagaccccagaatggtagatccaccaatggcttgcaccgtgcacctggaaaagccacagacactcaagccagccagtgaaagcagccaggaagggggctctaccctgcaaagccacagggacagagctgcccaagaccatgggaacccactttttgcatcagtatgatctggatgtgagacatggcatcaaaggagatcattttggagctaaaatttgattgcccttctggattttggactttcatgggcccatagtccctttgttttggccaatttctcccatttggaacaggtgtgtttacccagtatgtgtatccccattgtatctaagaagtaaataatttgcttttgattttaccgtcatagatggaaggggcttgccttgtcttagatgagactttggactgtggacttttaagttaatgctgaaagtaataaaaactttgggggactgttgagaaggcatgtttagttttgaaatgtgaggacatgaaatttgggagaggccaggaatgatttggtttggctgtgtcaccaccaaaatctcattttcaataatgcccacctgttatgagaagaacccagtgggaggtaattgaataattgaatcatggggttgggtctttcccatactattcttktgatagtgaataatctcatgagatctgatgatttaataaaggggagatcccctacacaatctctcttgcctgctaccatgtaagatgtgactttgcttctcctttgccttctgccatagttgtgagacctccccagccatgtggaactgtgagtctattaaaactctttttctttataaattactcagtcttgggtatttcttcatagaagtataaaaatggacaaatacaagacctgtagtaatttttatttcaataattgcacttttcatctctagaatttttatttgactctttattaatatttctatctctattgatattctcattggatgagatattgtcatcatacctttgtctatgtcttcaggcctagtttgctttagttctttgaacaaatttgaaatctttgtcttctatgtctggcaccttggccctttagaggcaatttcaattgctcgctttattttcctgtggatgaattacaccatcctgtttctttgtatatcttgtatttttttaatggacattttagataattttggcagcactcttcacactgatcccttccctccatgttaaggatgtatttttgttgccatttagttattttttaaatggaatggctggataatttaagtgactctttcacttgaagtgtgcagcctcaatgttactcctcatagggaacatagtcactcttggacaatagtggttttagcatggccttctttgactgtctttcctgatgtttttgttaagctgtctgcctctcgaatagagcttagtcagaagtgagcctatactaattatcagctgtatacttgattgcttttgacaaaaggcactcagattatgaggcttttactgacccaaagagtgttcctcttagctacctgtttatctggttctctctagatagaaagtttctatttagtcaatgattcacttgttttctatcttaattatgataacaacagcctcctccttacttgcttactgttaaaatctctactgtttgagagtgagcttaggctgaaagttcttcacactgtgtctcaaataaagtgtttccttggggagaacattgcagatctctcttcttgagacctgcctctctccctgagcaaaacctctgtgccactgctcagagataaaggtaactacaattgtctacttctctcaaagtaacacccagattcataggcggggtcctgggttggggtagtagcccctattactctccgatttcctttcctggaatggaatcaacactccacaattgagatgaggcaagggaaaattaaaattacagtattcttggccttcygcacttagrgtacagcttcttttctatgagtggggctgcatagtggaggaaaactccaggtctcaaatttgctgttaactagaatagaacttctgcatacagagatgcggagaggagaaatgccgtggactgccatttccaaggagaaatcataagcctagacttgacactacagagagatgtagccctatgttcttggctacacttacccaaggtaagaattctgttactctaaactggggcaggaagagaaaggagcaggtcatggctcacatgccatcgactctcactgttcttaccatttgtagtagattttcttgaataaatggttttgcatgggttatatccccttggttcactttccagatatttttaatgtttttaaaataattttcacctgttatgggtgtctcacttggagatggtccacagagctcctcataccaccattgcacaactctgcatcctactattctttcttgactaatttatggcagcagcatctttattgcttttaatttccactcttggmcttttgagtccattctcagcaaagcagctacagtgatcctcttaacatgtaatttagattctgtcacattttgtctcaaagccctctaagctaacttaagatagcccacaagcccctagcaactggccccttgtttcacatgctgtaagctcccctctggcttttttaatgattggtacttggatgttttcagtgtgcctccgttcctgtagttgctacttactcattgatgactacagtcaatccgcactgttgccattcttgtgtcatggtctttctcctggtttggtgactctcaccttgaccccaaggttcccctgagcttcctacaaattgatgctgagctgcctccatcaaggctgtacagttcttgaatttggaagtgtttcccttcctaccatttttcatacatgtagtatgaaaataatatatgtattagtctgttctcccactgctagaaatacttgagactggggaatttataaagaaaagaggttcaattggcttatggttctgcaggctttataagaagcatagcagcttctgcttctggagaggtcccaggaagcttctaaccttggtagaaggcaaagctggtagtgagatgtcttcacatggtgggagcagtagcaaggatgtgggaggggctacacaygttcgaacaaccagatttgcagagaattcactcactattgcaaggacagtgccaagaaggttagtgttaagccattcatgagaattgtgatctcattatccaatcacctcctaccaggctycatctccaacgctggagattacaattcaacatgcaatttggtgagaacacagatccaaatgatatcaccatatatacacttttaagaacaaattataaaagccaggaaaaaagaatgttttagtaacattatcttgtgtcaattcaaaatttaacttttctgtatcaaaaagttgtttggagagagtatagcttttatctgtttttcacaaaataagtaagttacttatcttctagtcttatcttccatttcctcttttccttgcttccaaaggatgagatcatttttattttatctcatttctctaatatacctcaatccgtttaattcattttgctaatactatgtgccaaagttgccatcctgcttttacatttaagcctcatgatagatatgcatctaggattactaataatttctccttcaatgctagaatttctagactgggcattcaaattaaatttaatttaaattaaatccatcgtgattttagaattttttaaaagaatctwttatatctggaattttttgaaacagtatttttaagtcataaaacaggataggcaaaaaaattaagtttaaaaaaaccaaataataacataaaatattactagcatttccctggaagacagagcagtgaaaatttgctaaatgtttagaaaatggagtatgtgaatgatcttgaatatagttaattctctttattggaaatttgtgatcagtaaaatagtcttagggtggaagaaaataaaatcacagtgggaaaaattacagagcatcagctagtaagcttgaagctcatttatatgagtggctaaataattttgttactgcatatagaacacttatttatggatggcattttatagcagtttaaaagtattcttttatatccatgtagttaatagaaatatctgttcatcattatgtctgttaattagttttgctgttgatrttaagtatgcatacatttcttatattattcagtatagaatattatattacaatgaatgagttagccatttctcacttgaaaagttcagcatttgagttatttattgttttattcatttcagtgaacaacttcctaaaacacataacttactgcttttaagttaataaatgcatgccaggcatcacatcgcattcacatagactaagtttttatcattcacaaagactaagttttcattgttaatatgaatgatttcactgcactgtgctcctgatgtgttcttggaatctgctgatattataaggactatttgctcctaaactatgttcctagagtttttgagctcttgtgtctactgtttctacttcctcagtctcctggtccaagtttgtaagattgataactttctcttgcagccattgtcatgttatttgattctagtagccagattctcatttcagtaaaaacaaagtgatcaaactagatgaccatcaaagctcctgatacttctaaaattatataaatctaagttgttctcagtttcgaaatcaaatggagaaaggttcttaggcttatttctaaagtgatattgaaaggtctcaattttacaaatgagaaaaccgagccctagaatttgtttatgtgacttgtgcatagtcacacaaagaactcacaagctgccatgtggttccagttgtaccaccacgcagcactgcaaagtaagagctgatggtctctgggagaaatggacaaggccttcccacaaaaaaaaaaaaagaaaaaaaaaaagaaaaaaaatgagccaacttgtgtgcccggttttcttaaagccttttttggtcacagcacaggtaattaaagtaacatatgaatgaatgacatttgaatagatgagtaattgttgaaaaacttactcacctttaggtattgagatcttattgcataaagcttagattagcatggaaaattgaggtgtgtaaatggcataatgattcacatattgaataacaagaaaacatattttctatttctctttctttaggtacccattggcaatagataaggtttttacccattttacaagtaggatattgttttaaaaatttcttaactggcttattctagcagtctccaaggttctcgtcaattcctattttcaccaaacttacaacataaaggatagcatgaactttttgcttgcaaattagaattggtatttcattagctattaatattcatacttctcagcaatggatttagagaaaaatggcttttcttgtcatgtgttatatcatggtaagtccttgacttgctggtctggtattggcaggtagatgaaagaattttccttagacagaaaatctctacaatacatatttatctatttgattttcctagcagatggcaatagcagaccctcccacccaccaaatagcttttttcactgcagcatctttttcttgtcaagcagctgttttgtttctgaacacatttaacctcaaagacataaatgccccctacaaaatacacttcagtatcaagcagcaataattgaaaaatgagctatttatatcactcaaaattcattaatattaatctatcaagatttacatctgtcttttctggataccttgttattattatttttggtaagtgtaaagccttaaaaatcattctttctgctttacttgatcattctgtagtcttatgcttttaaatgattttctgagattaactataagaactccaattcttttcaaatacctatacatgaaaattataacataggtttccccccaggggataggctgataactagttaatgtacttggggatacttaatttacttgctttaaagcaaattagtattttctacaactattatttcacttattcagaacaatggtctgtgcacaaaatacaaaagaagtcatatttttcagaagaaaacaaaattttagctacttttatacataaaggctcctccctgtgtgatatgagttcacattacatgagtccttacctagttgctcagtgtagaagtcaaacccttgtatttggctttggaccaatcttggatcaaattctgtctttgacgattattatatggatgaccttggcaaattacttaaaattcctgtgctataattttcaaatatgtaaaataaatatgccagtagttcctaccccaaaggtttttatgaggattggatattgtgtgtacatgtttatgtatacataattcttagcagagtaattggcacataagtgtttcaaaagtatttgtcatcattatcattatggttatcatcagttttaccatatttcttcaagaagcatgctatcattacttttgaaataagaggttgatgatgcatgaaatagccaaataactttttcaaggttatgtaatattcaagttggaaacagaaacaagacattctaatttgctttgcaattctccatctatccataaccccatactgaaagtggtcacaagtatttaataatgaaaaaactaatattttaacaaacattccaagaaaaaagaacatggatgataaaaattgtattttaaaaagtgaaaaaattaattaaagtgttcattcatgtgcatgtgaacacgtgaatctttgaaattattgttttccaattatgtccaaaaatttacactttcagtgtgaaaactacatccctcctttcatttgtcagtcctttattttttgcttgtttcttcctttcaaccttattccctccttctccccttcttttctttcctgacttcctttcttcctttcctcaacagacgatgaatatgcattatctgctgagcaacttacttgacaccagggatgcaaaaatgatcgagacgctgagattttacttacttagttgataggagaggggagaatgcatgaagaataataaagtgacattttaggtttttgagagaaatgtacagaacacggtgcagccacaaaagagacacttgtttgttataagggtaagaaaaaaaaatgaacaactgagttgataacatttgtgaaaaataagtaggtgggaatgaggcagaaagcaggaggagaacccctaaacagagggagcagtagcagaaagagcacaagactatgcccaattactgtactcttccagtaaaatccacataggtttagcaacaacctgtctatggattgggaagtactgcctgtgggatttagcctgcagtctgttagtgtgtggttggtatgttaacagtaagttttacatttttacagagttgtaactaccaaataaagaaaggaaatatgtgacagaggcagtatgttgctggcaacattttaccaaaccttaacttccacatggttctgaagatagtataaaaattggaatcataatgatgaacagtagttcatgaattcttagctaatgcacatttttcatcagttactataggtgacctactatacccttagaaatatgaaatttatggacaataaaattttatttccaatattcctgccttaatgaacctcggaaaagtggataaaatgttgaagaaagaaataataaatcgatttggctccagaggaagctttgtgttgggaattaggagaagatggaatcaagtagctcatgtggtccagaatatggaggaactttttatcctaggtgttagagcttcaggtaccctaaatccaactgtataaatgacctttgcttagagctctacatttgaaataacaattttccagtttctcatctcacctccccgtgttcctaattaatatatcataatttattgctctcctataatcttctaaatcagtattcttacatgtactttgtacataggaagtagactgcttagtaacagggaatttacatccttatttttactttctcgtttcaggctacagatgtcttaaatcctgggacrtcacttctaaatgtatactcaatgccaatgtttactttcttgcttactcaataaagccaaagtttgcttgtggagccaaactgtccagttaaaagaataaatttctcagcttttattttaggtagtgggcattgaacattgttctggccaatcagatgaaagcacaacttatagtatggggcttccaggaaagcttcataaaaggaggctagatattgctggggctctgcccttctgcccttagcttttatttctttctctaacctgctgtatggtcccattggctggaactaaagtatccatcataaaactatggagcaaatgccaagagaatctgaggcctcacttttggcaatcttaaactgctgaaccaatactagcaaccactactctacaggttccccattacacgagagaaaaaaataaaaataaaattcctatgtttttcagtttactgtttttggggttgttccttttttggtacaaaggctggacccattccctatccgacatcatgctctaatgctttcccttagagtttttctcttaaattattttgagatttgcttatattcaagttgttcccattgtctagaatttgcagaccctcaaaggaatatttatatagaataatatcctaaaatttaatattttaatactttctaaaaaaattgatagagttattaatcaattattagataacagttttgtgactggattcttgaagtggtcaataatagcataattagctctcacaaaatttagtttcactgtttcagtgatcacccttgtttctaattattaaatgactgtgaaataattaaaagccaaagttttcaatgatttttaaagcattattacttccctcttttgttttattattattatttaactgctctactaaatatgactatttaaattggataatccctccaaactattagttaaaacaactctttctctgcctcttttcttttctcttttgcatttttgagtttgaaaaattattttagtatgacggtgtcctttatactttatctatagtagctgaacatcttcagcattccatgattttttaaagtagttgacactttagttctctgcagtcttttctgcagtaacttgagcaatattcaaatataagaaattgtttccaaatatgtttacactggagagaattaaagctggttaataacacaggataattggggtgtttactgtaaacttgtttggggatgagaactgtattgatgaccttatttccaaatatgatatcacttcaacaggataacaaaatgaaaatataataattcatatgattttagtttgaaatgtgtgaacatgtctacagaaaaatataattatttaataatctatatggccagttactcaagtaaatgaaatcattcatttaattctttgagtatataggtaccatttattaataggaamctacttttggtctgatgaaatttaacctgctttgcctggtagtaaaggttccacaaaattgcaaacaatcattattttaagtaagagaaggcacaggatgtcataaaaggacaaaatgtaataacacgttgtatttggggggtgggggagggaagtgacattcagagggatggctcatgcatataccaaatgtttaaaacatttttccataaatgtgttaagctgacattaagttgggaaaatgcctcgtaagggaaatctcagcttgaatcaaaaataatatttaaaaaaatccattgctaagagaaagtagtagtttatgctaatctactctttctgcaaagtgatgtctttgaattaatgattctaacccatcagctgctatatataattgtagaaggatccaaaaagtttggaaatatgttcataatcataaaatgaagcacacggtagacagcttcgaaaaggacatttagccctcttccacttgtcttcttcacatacacaggcatccccggctatcccattgaaatcaatgcttcactccatgaaaatatgcaatcagatcgaagattttttaaagcctaatattttatttgtgtgctgcacataaatatttgaggtactaagaatgaagagaaatatgccaagatatttacatgtagtcgttacttaagacaaaattatagaaaatcataatgtgaaaattgtatgatttgaattaagcaaaattattttaagtaccttctttttccacatttctgcctacagtactatagaaatgatgtaataatgggctggataataccattcttatttccacctgacttaacacgttgaagaattttgaatgttatcatktagtccaggttaaaggcactagtagaaacttaatacttaatacctgtaacttttctcttgcttctaaattaaatataaaaacatctctctatgtaacacagtcctgcaattaagggagtagtgctaaaatgcagttctgcatttctcaggatatcatgctaccacatctttgttgtccctcactcttcttgggcgcttgctttcctccttattcaacctcttgcaagagccaatcatagtaagcattcattcccttgtatatgctctgaatttctttacacttttctttttatcatacttccctatagagcctcaaccctggttaaatccaaattgacaccaagtttatgcctatactactgaaactaaatttgtcttggaccagtgtttaattgttctcactttaatacctggccatagaccccaaggggaccttctatgctgcccagacattacaagtctttatttcattcataatcctactcttctataccttttcctctctcttcaaactaccgcacaaattatctcatccctactctcagctgataatcttgtttcttatttcaatgaaaaaaaatcgaccaacaaaaaaaaaacctttcacatacttctgttattacaacttccacttcaatacaatggtaacaaaataaaaataaaatagtagccacgattttaattttaagcatgtgaaaatatctacagaaaaaaaagtaatcatcataacaatgtttttatgtaaaaacctaaaagatctgtacccattccttctcttcagtgttgccgcattgcacagcctctggaaaagcatggtaaatgtgaacggtgccccctggagttgttcagtgaaaaattttcaaagctatttgcagcaactctgcctcttgacatcatctcttgctaatctccccctttgttaactctgctgcaaaaacaatagaattcttgctattcttcagaaatgaccaggcttcatctgtgctgtctcctctgcctggaataatctttctcaaatagtctgtatagctcaatccgtcacaactttttaccttaactcaaactactaccttctccattaaaccatggctgagtgatctatttaattttgcaacccgtaccccttgattccactctatatttctgctttatttttctccatatttctaatmaccttctaatatattacacaatttacttacttcttttgtatgaccttggactcactctgctaaaatgtaagctccctgaaggcaggcatttttttttctgttttcttcactgctgtatcctcaccatgaataaaatgaattaataagccatgtgttggacatgttgattgtcaataaagtaagacttcagaaccaaaatttagcaaagcacgtgccaaatcaacagaaatggcacattttatacaatgtgaatgaaaacttgctggtttttccattagtcccctttaagcagcaaagtagaccttcagcagggtcaagaatattaaaaggatrtgtctcaattgcccaaaatagctctacttaggatcggaaagttcaagactgtagaggtaatgccatttctgttctatttcttttgtcaaaagaaaaatccatttgtaacacagagccctccagagatttgtcaccatttgctaggcttcagtccaaaaagtgtcaagactcacccagccaatttccagggtcacatagtcattacttttatcacttatgaaaacagaagaagacaatttcagtcccctaaacacagtggaaaatcaatgattctaggatcattttcaaagttgacaatatgaatccaagtccttactaaaaggagaaatagataatgagatctattctctgtagcgccagtgtcactccctagaagttgtgcatttaggagaagaaaccagcactttaagttcaacaaggtactgcttaatgcattatctctttacaacaagtgcattactttatgcagtcattattttatygttttctcttcacactaatttattaaacacctatgatgtgtttctttaatatgtttatttcctttaaaattatttatcaaataccaacaatgtaccaagcactctgctaaggactggggatatattatctcaaatatattgtgggctggttttacaagccatagttcctggagtgcaaacatagggtcataaaaatagagaaaataccatttgctggttcttacccctctttatattgacaccttcatccacttttcaagtttytgcccagcgatttgtgtaaaatcctggcaatgactcctgtatgtttatgagccaaatcctctgcacctccatttgtctttttttttttttttttttttttttgagacggagtttcattctagttgtccaggctagagagcaatggcatgatctcggctcaccacaacccggcctctcaggttcaagtgattctcctgcttcagcctaccaagtagctgggattacaggcatgtgccaccacagccagctaattttgtatttttagtagagacagggtttctccatgtcggttaggctggtctcgaactcccgacctcacatgatccgcctgcctcggcctcccaaagtgcagggattacaggcatgggccaccacaggctgtcctcttttattctctggctctctgtggtgtggcgcgtctcctgaaaagtagctgtcagtgcctgaccaaaaatgcagcaccggggtggtgtttgtgctcacctatcgtttcttctacccccgcatgtgaagctttcggatatgtttgcccatttttttaaagatgtggttatcttcacaaaggagcactgcaatgcatgctggcaccaaggtgctgtgataatcaaaatcagtccattggagcagtgttctttcaagaaaatctgtccccttttgtgaggttacctacattgtatggtttcaccatagtgttaatctgtgttcctaggatctaagacagatttcatagtaactatttgcaacacatcagatgccagaagattagaggtgataatgacaattgcagaggatttattaagaagactatttacaaaggaataagtagggtatagagtattatcctaggactaaacacagtgcagatggtgagctgtgaaatcccaaagtttgaaggggaagaggcgaaaaaagatcatcagagttgagatggagagagttatatgtgatgtggggttggggacactttgacagttgttttaacctttgattgaaggagtctgacaactttagatggcattgcataagaagagctaatagaataaatatccacttcactctttcttctctctgatctcctaccaggattctccatttgccagactcaactggaagcaagaaagcaagagaaccccttgaaacagttcacacactctggcccctaaattatagagcagggtggaaagaggtggcagtggtaatggacaggccacttttattccagattttagctctgctccacctctgtgggacctaggaaagtatttggctgttggtctaaatctcctctctgcttcaatccttagtcattatacttgactcaagcttgtggtccttgtgcttgcatttcccaaagttgatgtttttccaaaatgatctatgtaccttttctcaacaaattaacacttaaatagagtttatgacttcatagccactatttcaagcagaggaattcttaactcatctattccccccaactatttagtcccctaatattattaaactaattttataaatgagaaatttgaggcacagaaaaataagtctctctcaaggtcatacaactaatacttggcaaagccaaaattcaaatccagccaaccagtctccagattccaagctctagtatactgtttggaataacaaatatttttattatgtacttaaaatattatatataattatgtgaaaacggaaataatctctctacacgaagagattaagttctattggcagagatactcaaatgtaataaagaaagttttaatgtagagatattcatgtaagactataaggccccaaacgtacctaaccaatctcagtctagggtgggagaaaagaatcagagagtgtacccaagaggaaatcattactgatatttggagggcaaagtttggtagtttgtactttaacctgaacacagcaaggaaccattggatgagttaatgctggtgaattacataattaagttattacttttaaaataacattctgatggtaaaagtgcagatatgaattatagtgtaaatatactatttaaaaattatttgtatatgtcaatgtatatttaggtatatgaatgaatacctatttgtcctgtttttaagatttaagcttattattaaacattcaaactttttatgtgaattttatgggaaatacatgggatctaataatgttatctttttaagcttatccttatcatatacatatataatataatttaaattatattatataatatataaattaatatatgtatatatcatataatataatttaaattatattatataatatatgtaaatattatatatcagtatatataaattctactcatctaaaaataaaacaaactgatataaacaaattgattcaagaattcaagatactaatttttttcataataaccattgatcaggagtactttattcctttcagtattttatgagattatgaccttgtttggaatatttttgattctgaagtttacacttattaactgttatttaaaatccattagaaaaatcattcttggaagcatcaatactaagttccatttgattattttgggtgtgggaaacatttaccaacataaagtcagtgggtcaaaaattgcttgtgcagccacatcactagaaaaatcactgtaacacaagcagtaattatccatattccattcttatcaaaagcttcctagacacaatttattatattgaattgcatttacccaattactaataatagcctgaggaagattaaaattgtagtcccctagatataaatttcttattttaatttcaatctctactaaggaaatgttagtaggatgaagatttcagcctctatagatgttcgtgtcaaggatatcattcttttctgctaggaaaatgcctaaaagttaaaattaataatatattttttaaaaaattaaataatcttaggttaaaattcaccaaaaattaagacacttctatctgatttccacaattgtctccaggtttcaaacttcatgaaggtagaagccctatcttatacccagggcatccccagtacttagcaaagtgcttaacgtaagtcatgaactgaaaaacaattatttcaagtgtagtttaacttaattgttttgatgtgcatttggtatttttcatttaaatgactgtagtctcctatttattttctatacagtattcactggctactcagtgcatgacatttaacagtcacatacattacatgatagtatccagctagaaaaatacatatttactatgttaatcagctttattggataagtattgagcagtgttttaccaaatttttcctctgttttcttagaacttaaaccactagacgtctcaacagaagttcttaaatctttttatacttattagaaatgggcaaaaatcagctctagcagtcaggtttccaagctagaaacataagccactttaagttattttaaacaagaagactttatttaatgatttcagtgcttccaaaatctttggaaggactcatggagcagattgtacgctgtactcctgcagggactctcagaaccatatagaactggctccctgggggagctgccatttctgaggctgccacaggatctccgttaaaaacaaaaagcctctgctgctgccctgcaaatgggcaccaaacactgctagaaaaaaacttgcttatttgcaagaacttacagccagcaacaggagccaggagctgccaaaatttaggatttgccttcctactgccttctgaaattggtcttgagtactcctaaaaggctgaaactcattttcataaaaaaaatgatagctgcagaggagtttgagaaatgtagactttgttttataacctctccaagaacaaaaaaaaagtgaacaggagatccagttcagaaacatgcatattaaaatcaaaccccttttgtaagtcaagtgtcttcatactttggggaggggaggggaggggtcacagtagaagcaacttagtgaaaaagtaagagcaaagatgatgaatctagacaacttgggtagaagtatagctcagacacttgtgaatgaatataagcaagttacatgccttctctgagcctctgtttccacattttagagcagcatccagtcctcctcacagaatgattatgagaawcatattacacgtaaatgtaaaaatacttcataaatattgatgcagacatgaggcaggaaaatactaggtagaagagggaggttcccaacaggggccacaccctcaagcctgggactgcggcccaaagtgagaacatgcattcttgttttcccacttgaatgttgctttttggcctgccccacaccccatcctgtacccataaaaaccccaggctccaccactggcagaggggcagcagagcaggagagcaactgagcagcagagcagagcagcagaggagagaagagaaaaagcagctggatgccagagggtagcagcttgacttcagagggccagcttgacagcaggactttggagaagtgttcgaccatggacaaactcaataaacccgccccacattcaccacccttcaattccttcatasgacctgactcttcctcagcactggacaagaacttgggtaccaagagggcgggtgcaaaaggctgtcacctgaccttccaccgagctgttaaacaagccatccatggacggcaaagctaaaagagcacagtgcaactactcctgccggtgcccagaagcactcatgctggcccctgcacctgctcactcacctacatgctccccgtcctgttagggattgaaagctgtgggctgagtaaattagcaaacccaagggaaccatcccatttcaactaagcaattaaaagaagatatgatcagtaggaattatcaagggaaaattaaatgacattatttcagttgctgttagagctttagtgctaaatacattttattttattctaatttttgaaaaatggtgatctttttcatatagtctgtaaattactgcaatatcttatttcgcaactaactgggatttaatggactggaaacattagatcaagtcaaacccctctgaatatttgtggtatcatgtcttattgtagtatagactccatagatcctgtaagagacattattctaataaataattaaagccatatttgaatttatttgttttctgtcatttacgtgtctatatttatagagtctcaagtgcttcctatatttacattggaaggcttttcaaattttgtaatttttgtgatcttctggaaatatgatgcttggttgattttctagttggccaagtctctgcgaagtaggttttaagccctggacaatagaaaatagaagcttctcggtctgtaagcgccatgataatagcaaaagagttgctagggaattacttcccactttgtgttgtcatttagattgaaaaagcataaactcataattatatagtgtgatatactattttaattgagctccagttgccagtgtgataagatgaccttatgaacagtataacactgggcccccagaaatcaataaatatagtaacttttttttactgcccttccttcctactcaccgaatcaattgctttttacctttttttttttgaaagttctacaattcattttactacctgtcaaaagtgaaatgtctctttttttttcctgaggagatatagttgtttgatatttcaatactttttgctgattttatttttcattgctttgtatctaggacactcacatacttcatctaaccttctaggccccaaatttagagtcaaatttatacagttatagagaatgaggactaacaaagtgattagttaagactattaggatttgtacactgttgattttgtcacttttcacattgtgggacaagccttataaaacctcagtatgaatcacttgagagagtaaaaaggaggataacaggttgattcccttttcctgtacatcaggagcacctctctaggcacattcatacaaattctatttaccagacagaggagtctggacacgcttgtctctagatttttctcatgaagtaatgagaaaaatctgtctcacacccaatgcatccacaagcttgcaatgtcttggatgctggaggattgcttatcctcaaaacactttgtgaccactcattggsgagcatggaagaaacctgagagaactaaggctgtcccagtacatgttccctagtgatatcagggtaacaactgttgcctgtcctctctggtagtttccaagtacttttattactggacttttccagctttgccttgtgttggaaacacaagtgctaggaagaagtatttttcttctgcacagatcaagaaatgaaattctccccagtgtctagcaaaagactctagctcattttacagcattgatttcataattcagtcttctacagagtcatttactgtaacagatgttaggaaacacccatagtcttggagaaagagaggtgactttggctatacaatgagggtcattacatgaaaggcagaatgatggagacttgtgaaaaatttagggttcatcttctgaactgagtgtagcgtatgactaaggcattgtagatatgtgatccattcactacttgcttattagacgagactgaattcttttcctatgctgtgtaccatataatggaaaatataaatggcaattgtcaagtcaacacttttgtgttctgtttattgattcaatcagctttcatgtgtgactgtgcattgtcatttataacctcaattgatgagattcaatcctacaaggagtcttttaaagcagataagcatttaaagggagggatataaagaaacagaaattagaaaactgcagatctattttatgtacctagcaatataatcccattctttgacaattttttatattcttgtttaaatttatacttgttttcttttagagttgactgtttacccaagaatctcatagtgaagtgtaagatttataaaaacaaattgagttgttaaggttcaaaaccaaggagaaaatcttaacctttacctttcctttaccctgggtatctaaaacatcactggatcttgtatggtattaatcccctgcctttgaatctgaccataaataatttaatttagttacctatgttcacctaattggtagcatagaaatagtttcctaatgcacagcctttattcactttcttccccttacagtttatcttaacatgctgtcactaggttcttcttcttaaaactcagagcagatcttggccctccaggctcagagagcttccttatctaccttgttgaaatcgaattaattcaaaatctttcagtttaaatgtaaaagctcatcacttcattattcatagttacctttctgattttcttcaatacccgccccccgccacacacacacacgtacacacgcattctatgccctttcatccttcatatttgagcgcttcctcaaatgacacctttccccgccccccacatttatccaaggaagggctaatttcacttcttatcttcccccaaaactttacatattcaaaattttaaattaatctcacccacacaccacatgcccaaagtaatgactatatctgttatgccatcagagttctataagattatgagctgctcgaagataaaacctctaccttgctggatttttaattctcatatttagcatagagttcaatgtattctaaatagatgttggtggaaatgattttcactgaattaattggccttgtcccatcatgatgttgttctggctttgttttaggaacatggaataccaatcaacatgggctatgctgtggccccacatcactcaggggtctacccggttcacattcagctgtatgcagcttggaagaaggtctggggtattcaagtcaccagcactgaagaatatccacatctgaaacctgcccggtacagaaagggcttcattcacaatagcatcatggtgagcacagagagccatgtatattgaaggatgttaatatttacatgtggaatgaagacagagggccatttcctctaaggatgtaacctcgaacctcttttacatgattatcagaaatacctaacatatctcaatggtgactkgttatgcattaacccatcttttggtgataggcttgctcctaagctgtggagtggctttggcaaatctaaaacaagctgaaactaacaggaatgagttatgtatagattatccactttagtttcagtattgaaattttgcctgtggattccatacttttcctaggaaatttctcattatctatttggttgggtggttttactgagagttttacaggcagagtaaggctgcatggattaagaaaacacctctcaagttgttattctgtcaacagacagaatgttacaaatagcatctgagagttaaatttattcactcagtttattttggctttcaggcactcaaaagtatctaagaatactgctctctctttttgtcttttccttgcatattccaaaaagggaggtatatgttttttcttttcagatatagtaattgaaaaataataggatgtaggaatcctaataaatgagaataaaaccaattggatttcagaaggcaatttgcaatcattcattgggaaagaaaacattatattactcattttgagataaaatagcctattttaaaacaagtatacctacttctagtgacttagatgatgtttttataattagttgccaagatcagagcattggtttacaaactgttcttactcatttgaatatttacaccttcctaattcattattcatattgctgttaaaatccatctatcatctatttatctatctatgatttatttttctatctaatcgccatctgtgagtaaagcaaatgcacacacatatatctaaccagagctgatacacaatatttattagtcatgaagctctattttattgcaaattggtaccagaaggcctgaagaagcctcagatttaagagaagctattgataatgcaaatagtggcattgatggccatagaaatccagaaggtataaatagaattactcacataatttcaaatcatagtgaaaatacccaggtttccctttacctttcctttaccttctgtatctaaaacatcattggatcttgtatggcattaattccttgccttgaatgaccattcaacatattatgaaatgaaagcattctttttaaccaatattatattcatttatttaccttaagtttaatattaacccttatgataattaagcaaataattttgaaaaaaaaaactgtaggcaattagatgcatttgtccattaaattaccagtagtttgtcattcaaaatatgattttggaataaaattacttatttgctttctttattaaacattcagacttacaaaagaagtaaccacaaaatataccagaagtaatcactaaataatttgactagtatatcataaaatgtaaattcagattgtagtgaaaacaaagctaatgtggaaggggttatgaaaaccaattgtggtaaatcccagaacctgcatacctttacaatgcaggactcgatttcagaagtgaagagagtaatggcctaatggcatgaaagacggaaccttggagaatttccatctttgggtgaacttaaccctaagaaggctttgtgttttccctaatcatttaacataacacaggtggtgggttagatttataaaaccaactgaaaattatttaacctatattttttatgcctttgatatggaaactcccttaatatttacagaattgcaccaacatcaacttgtgattataataagatttggccttagcaaccaagaaaatccaataggaaattacaatttgcagattctaaagttatgagacacaggtgaagttcttaattaaatcacgtccatgtgctgtttttccccttttttactcaggtcctccctcgacagacttgtgggttgttcactcacactattttctacaaagaatatccaggaggaccccaagaactggataaaagtatcagaggaggtgaactttttctcacaatccttctaaacccagtatgtattctatgtatgcaccttacaataagattagcatttttaaatgtgttttattttcctgtcttttaaactaaatcatatttattttctttatttacagcacatcttactggtcatgcatttaaatctatattaaaatacttttcttgataaaatttgactttgggactgatttttcagtagatttcattacaaagtcatggtttttactttgtaatgtgggtagtgaaaagtttatttctagcagtaaagaagtagcaatgttttccattgttatttttttcaagttaggtctttctctcagctttatgaaggtataattgacaaataaaatttttttatttttacagtacaacatgatgctttgttacatgtaaacattgtgaaataattaaatcaatctaattaacatactatcatctctcattcttattatttttgtaacaagaacatttaaaatatttattctcttagcaatttttaggtatacaatatgttactattaactattaacttattcatcccatctaactggaactttgttcctttccacgaactttcccccagccactggcatcctactctctggatctatgagttcaactttttatttttattttttttatttttattttatttttttttttttgagaggcagtctcgctctgttgcccaggctggagtgcagtggcgcgatctccgctagctgcaagctccgcctcccgggttcacgccattctcctgcctcagactcccaagtagctgggactacaggcgcctgccaccaccaygcccggctaattttttgtatttttagaagagacagggtttaaccgtattagccaggatggtctcgatctcctgacctcgtgatctgcctgcctcggcctcccaagagttcaacttttttagatctcacatataagtgagatcatgaagtatttgtctttctggkcctgacttattcacttagcatatgtcctcctggttcatctatgttgtcacaaatgacaagatttccttcttttttaaggawgaataatattttattttatgtgtagatacatacatatgccacattttatttattaattcatgtgtcaattgacacatagattgattccatgtttaggctactgtgaataatgctgcaatgaacatgagaatgcaggtatgtcttgaacacactaatttcatttcgtttggctatatacccagtaaagggattgttggatcatatggtagttttgaaggaatctctatagtgttttccataatatgaagtaatttatatttctagcaacagtgttcaaatgttcccctttctccacatcctcgccaactttgttatctttcatctttttgattaatagtcattttaacaggtgtgaggtgatatttcattatggttttaatttgtatttccctgatgatgaatgatgttaggattttttcgtatacctgttgggcatttgtatgtcttcctttgagaaatatattttcaaatcttctgcccatttttaagggaggtcattccttttcttactattaagttgtttgagttcctgatacgtattttggatattaagcatttgtagatatatggttttaaatattttctctcattccataggttgtctttttcactctgttatttatgtccgttgctgtgcaaaagctttttgacttaatgcaatcccatttgtctattttgcttctgttgtctgggcttttgggtttttacacacaaaaaaaaaaaaaaaaaaaaaaggaaaagaaaaaatcaattcccagtccaatgtcaaaaagttttttccctatacttccttctagtagttttccagtttcaggtatttgatttaaacctttagtccattttgagttgatttttaaatatggtgtgagataaaggtctaattttgttcttctgtatggggatattcagttttcccaacacctgtttgttgaagagactgttctttcctcattctgtattcttgcaacctctggcaaaaatcagttgactgtaagtgcatagatttatttctggaccgtttgctttgtttcagtggtctttatgtcactctttatgtcagtaccttgctgtttttattaccacagctttgtagtatagtttgatgatagataacatgatgtctccagctttcttcttgtttctcaagattgctttgactattctgggtcttttgtgaatccatagaaattttagaattgttttttatatttctgtgaaaaagtcattaatattttgatagaaagttcattgaattggtagatcattgtgagtaatatggatattttaacactattaattcgctcaatccatgaagttgggatgattgtctgttagtgtcttcaatttcttacatcaatattttatagtttttggtatataggtatttaacttccttggttacatttattcctaagtatttttttgatgctgttgtaaatgggatcttttttatttctttttcagataacttgtcagtgtacagaaacactactatttttgtacattgatttcatatacttcaactttactgaatttattagtttaacagttttttcaaggaatatttagagttttctatataaaagagcatgttatctgcaaacagaaacaatttaacttttttcttttccaatttggatgtcttttttttctttctcttgcccagtttctctggctagaacttttaatattatattgaatagaagcagttagggtgaacatccttctcttgcttctaatcttagaagaaaagctttcaactttgcaccactaaagatgatattagctgtgagtttgtaatatatggcactaattgtgttgtgatgaatattttatacctaatttgttgagctttttatcatgaatggatgttgaattttgttacatgctttttctgcttctattgagatgatcatatgatttttgtcatttattcatcttattaatatggtttatcacacttatggatttgcatatgttgaaccatttttacatcctaggaataaatcccacatgattgtggtgtattaatgttttgatttggtattgaatttggcttgttaggatttcattgagaacttttgtctctatgtttgtcagaaatattaccctgtaattttcttttcctatagggcccttaactggctttgatatcagggtaatgctaacctcataaaatgagtttggaagtgtactctcctcttaaattttttgcaagagtttgagaaggatttgatgttaattctctaatttttttttttataaaatacatcagtgacaccattaagtcccgagcttttccttgctaagagacctttaattacaattcattctctttactcgttattggtctgttcagatttcctatttcttcatgactcaatcttggtaaattgtatctttctgggaatttatctgtttcttctaggttaacctgttaggtttatcattgttcatagtagtctgtttttatccctttttgcatttctgtggtattagttgtctatctcctctttctcattttatttgagccttctctccttttcccttagtctagctatatgcatgctaattttatttatctttttaaaaatccaactcttagtttcattgatattttctatttttctaatctctattttatttatttctgctgcattccttatttttttcttctttctgctgactttggactaatttttttcttctttgactagttccttgagatataaaattaagctttttatctgatatctttttttttcttaatgtaagcatttagtgccataaatttccctcttagagctatttcacaacttcttcacaaaactagctggtaaattctagcactactacaaagaatttagactgcacctctaaataatttgtttctcttatggtagtcaagaaaaccacatatttttaagaagcgtgtgtttaatataataattaaatattatataatatctcatttggcttctatttttaattatagtaatgacatattaatatgtgaatctccagccaaaaattaaaaatcataattttatcagaggagcctattaggcccataagttaagtttgcttctggctggagatctcagwaggcacacttacttcagtttctaaaagtgaccacaatataaagctgaattgaaactagatagttttgtattatctttgtgtgcttggatgacctgaagcttattttttaaatatttgctaatttttttttgggaatcaaagatagagaacttgacccttttgtgtgtgtgtcttttcatctttaatagttgtaattttattttctgttataaatagatgtacaatggtatagcagtgtgggaatcccaacattatataatattgtgattatttcagctttctaatttcttcttctgtaatgattccatttctgaggtcttaggaaagcatgtcctcatcatgtcccagtgtatacagaaaatatgaaatagtgagccttatgctatgcccactttgtttcatggaagaaaggcttatacttaagaaaaagatacactgtcaacaaagctatagctaagttggctgtggtaaagctctaggtgtgtttaaaataaattacattagataattcacatacactattttcaattcctaaaaaaataaataaaaactcacattgtatgaaaatagaaacttctaaatttgactggaagataagaaagtgagggcaaaaatgctttgtcagattaaactgtcttcccctacaactgcatggctattaaaaacaaaacaaaacaaaacaaaaggtctgttgggtttaatggcaccacacttggaacaggmgcatggatgctctgtgatctttggcaagaaacttcatttctcagaacttgcttgtacttctgaataacaaactagttgaattaatcctcaatgtacctcaaaggtattccaaccaaagctatatctgagatatttcaatttttgtgcatatttcaaaatcaacaccttttgtatatattttttaaaaacatcaaggatattctaaaataatttttaaaaattgagatgtaaatgttaatgaaagcaagtggaaacctctctcttcattccttcccttactgagaatttaatctcgacagaggtaagagtcamttcatcatacccttttcattctggggctacattcctgacacatatctgccctagtcatctctttagggtaagtcaataattttcagaacactgascattgcctcccctggacctcttgcccaggtgtgattgttactggtgcttattacttgaatgtttgtctatttgtcaataaagacatggattatgcatctgtttctaaatattttgaacccaatacccctcatagagcataatttggagatttaaacttaaaataaatctcaggattttaaataacataraagactatttggcttctaatatttccatgtttaccacttgtgaactaatcaaactatagtaagtcttataaatctcactttaaaaagtttatcattgctacacacatttatttcaattttaggcagaataggatagtgaaagaggggagtttcaggaggcttcatctatccagtcacaaactatacttgctttgtcattgtaaattgatggtgagctcaaaatatgatacataggtaaatgatagagaccaggacagacacagcaggagtagatggtcaagagggtcgatagtatggataagatagcacatcctaatatgggaatatgaagtatagatcaagcaagcactagtccataaagatgactgtttaaggaacaatgttgctcaaaacaaggactatgcatagcctcaagcaatctgagtagatattgctcagatttcaagggaaacagactacaggtagcatctggtagagcccaggccaaatggagcttacttcccggcttgcataggcggaagttatcagatgtcttagacggggttctccagggaaacagacccagcaggatttagatacatagatagatagatagatagatagatagatagatagatagatagatagatggatggatggatggatggatggatggatggatggatggatggacggacggacggacggacggacggacggacggacagacagacagacagacagatagatagggatatagagagaggcagagagattataaagaagtggctcatgcaattacgagggctgtcaagacccaagatctgatatgcaatcaagaagctggggagacccaggaaaactgatggtatagttccagtccaaatgccagcagcctcaagacccaatgaaagccaagattacagttagagttcaaaggcagagaagaaaaaacagtgtcccaaagtgaaggcagtcaagcagaaggaaattccttttacttagcttttttgttttattcgggccttcaacagcttgattaaagtctacccgcattacagagggcaatctgctttacccaatacaggggttgtgcactggactgattaaaacgttattctcatcccaaaacaccctcatggacacacccaaaataaggtctgaccaaatatcttgccatttcctggtctagtcaagttgacacataagattaaccatcataccagatgaggaacttaatgtggcaggcagacttggagtaagtgaaagaaaatggggaacacagaaagaaggaagaattgaatgaaagaaaagataattcacacttggattttttctgtgtaagtgtcttctcataaatagagaggtgatgggctatgattaatatttacctcactaatgttgagaaagtaaatattggggctacttgatgatgagttactattttaagtttaaggttccaacaagcctggcaaggagggagcctgcaggaatggaatgaggaaagaagtaaccagaaaaagaaaacaataagccagcttctctgttccattcttttctttcaatcatcatttaattctttgtcagagtaaagaatattttcatatctttcacccaaaccatgccaaggaaagaagttagttaatatgaagattaaaattattgatatgaaataatatgctgactctgaagaatgtttctatttaacagagctgacttttaaagggaagatccatgaatacattttgctaggtatcaaagtcccgggggaaatgtgtttttagtgcgaagtgttcaacatccatgaaatcatccagagactaccattttctctacctactttcccagctgactcttagtgtataaaagtgatgtttgtaggaacttataagtagaagaggtgatcagtagtgttaggataaattctaaaacataaaagccaatctatgctggatttccttttccattaatcatctatactttaatattatagaaatgctgtagacaatgtatgacatctctcttggatggtaattttctctgtggttttgaaaatgattgatagttttctgtacttagtattgttattttagtatgttcatcagtggatgaataaggacatgctagcatgacacaaagctgacagtgaaagtaaatacaccagattatgatattaatatctagtttttgttagcatattagaattaaaaaagcaaatctaacagggtgaaatttaaaaggaaataatgaaaagcccctaatcattttgaaataaaataataatataatctcaccattatataaggataaatattatataaggataaattaaatctgtcagaaaattgtgtgggctacaatcatgacatattaagttccctgttgttgaagctgtccaaacagaaattttgtagaaatgcgaaatctattactgagcttctaatagttcatcttgtactaagaatacgtgatttctatgttcttatacaattaaatcgtggctacatctctctcattgtaaaacacacacacacacacacacacacacacaaatcaagttaattttaaatactacaagcattataaatttggatctaatctataattataagatcggaggaaatggagaaataatagtttgtcaacatatttgacaattaaaggatgagataaaatgggaagatatctaatggtagatatattgagggaagcagagaaagaaaaaaaccttcccattacttgtatactgaaatataatttccagattttgcaggaccattttgaattttgattagtagttactgaattcatatgtatgtaagcatcctatgagattaataaaagctggaaaaagtatataaaggaatgtcctggaattttcccctctagagtactttaaaatagaatcaacaactctatagttctttcttattgccttgggaattcatctgcctaaaggaaggaaactggattaaataaccttgaaaagtttcacattttgtttttctggtttataataacatctgcagctttgctctgcagtcaaaaaggcaaatgccacaacaaagccagtattgtttctttatttcttcagcactcagtttgaggattcacattattttgtgttggccctctctacaatacaactgtatctattctgtgttcaaaagtctctgatattttttctttctgcattttcaacagttttttttttaattttgactctcactggcattcagagatatatcctgttttcatagtttgacacatttcaaaatatgtcattattttataatttaccataaaacagaagatatgagttggaataaagttttacatcttgattcacatatgaactcctgttgctattatgtgttatattttttgattcagccaactgcaaggaatggggtttcttgatttccctggataccaacttactttgcccaaatgagcctaacaattgaaaattaaatgatatgagggccatttcaatgggatttcaaaagcatacttcgacatctgtctatttaacattcagataactccctcttatttttcttagattcttatcatgccttcatcacatattgatatttttctgcactgttccacacttgtcaaatactaacatgtatttccctggtgccacatccttcctgtattttcaaataatctttgttcagacaggaagaaatataatttaatcatgtatgaggtgaaacagcttacaccaggtagtccaccatcattcaagttgagacactaccctataaaatatgcagcaactgaaaatagtcaaaacagtctggagtcttatcagatggtttccacaataagtataaaagcttgaaattaatatgtcctacaggatttaattttttctactcattttaatttcatgctacacaaagagcaacattaaaaatagaattttctgttttcttgacaaatatgtttcaataggctctgattgtagaatgctctaaaatagcagttcaggagccagaaaagttattacactttccaaagttcagagcagtgcctagactcactaaacctcacctattctattggccacttgcaaattcaggtgaacaaaaaatatgtgcctgaaagagtggtgtacttgaaattgacagtagagtataatggaactgcaatgataaacttctccgtgtgctgtctgctgaactttcatatacctagtctggttaatgagctttccttctccgtgtatatcaatctctgagttcatggaatctaatagcaggtgcagtacattatggattagtgctggctcttcagacaggttagagaaaaggcagctgtgaggcacaggataacatccacatgaaataacctgaaacaaacttcgagaaattctgtttaatgctgaaataatatagagctgcatagatgaggtaatttagagaaaactattttatgtgcagagcaacaaaataaaatgcaagcaatatcccaagtctgtagcagattataaagaagtgattactgatatcaaggtctccaagtattctttgatgattttggctttgatttcctataaacattgtggtttatagaaatagaaaccacatagaaacacagtggtttaaagaaaattatgacaatgagataatattccatggagaacaaagcaattatatattccatcaaaatattcatcttcataaaataatatattaatatttctaacttggagacctaggagattttctacatgtgttccaggaggatttatatttttctttatcttttttattgatacataatagatgtacatatttgggtggtgcatatgataatttaatgcattctgtataatttggaaagattaagtcaatgtaattgggatatccattaccataaatacttgtcttttctttgtgctagcaacattggaattattctctttgagctattttgaaatacataacagattatgtaaactgtagccaccctacaaatttttcaagcactaggtcttatttcttccatcgaactgtatgtttgtacccattaatcaacgtctcttcatcccctagcccctctccggaactcaggggtatttatttttatagaaattaacttgtaacttttctactagagtgaaatctacttctctagacagggactttgaagcaattaatgttattgggagctctggggcttagagctgaggagaacagccaccaactgtgagaggaatggacccctgtggagtatatagrttgtggaaaattctatttccactcactgaaagacctacagtcacctttttttttttcctttatcttctttttttttttctatccttaaagatttgcaggactaacctttacaaaaggacatgaatcaccacttctgtaagggattcacactcacagcagagattttgtaaaatctggagtcagctaagatccatggacttacaacgtatgatattattctttctgttaacactgaaaatcaggatcagagttagcataaggatgtagagaatgtgagtaaattttgtgctttttccctagatttttagtagtagttttgtttcaattttccacaataggatttatttaaaaatgagtagttcagaatatcaagtgtgctgtaaaaaatgaccaaaatatgtttgcctcctgaacttgaactctgtcttctcatgaaataagagagagatttatattattgtgtagacatatatctttctaatacaatatttgctaccggttctgatggaatacaatttgcactgctgtgtatttccagaacatgaaaaaatccgtaagattgcattttttttcaattttgtttccatcgaaaaataaatgaaagctgcaatattttattagaggagtcttttccatctagtataactggctactttagttttcccaaagtttggaatgaaaggtagtaaaatagctctttagcataaataaactttcaacagcaaaagcacaacctcctgtttatgtggatgttagtcagcagataaaaccttttttctctatatattttggggcatgcaatatgtaagtactaggtgcataatgctcttcacatttagggacagtttgcaaacattatcagtgaattcataataagaaaaaaagaaaagaaaacactccctgtatcagtgtttatatgactaatgagttggtgagaaagtagaagttggttagtctacaaaattaaatttggaaatgtgtgcttttttggtttgttctttctggtttgtttgtgaggtttcactctactgaagggttcaaaatgctagattttattatctattttacaaattttataacacctaaatatttcaatatgtcttgtttcttttccttaatatttatttttttaagtacagtgaatgacaaagactcttttggatcattttaccttatttcactttgtttattcctattttatgtccctctggttattcctcagagttagatacagtgaaaataaaaatataaactcttttctaaaacatgttgatattttcctatttttatatttgaggaaagcaaatacttctggcttagcatttccctaagtggctaatatgcagatatgatatggagtatgtatgtaaatgctaaataatggtgacctggagttccatttgacatgtcagggcttattctgtattagaaggctttggtatgtatagcttcttatgcctacagtacttttctattaatatctctactactctcactttaacctatttgtctatcagatttcatctctgctttctctttctcatcccctgagcctgatcatgggtttgggtcagatgtcacagctgtttacacaaatagagtcatatgcataatacagctcatggtggtacctgtttagtgactatcttcttcacctctactatatgtatccctaggcatagagcatgggctcaataggttgaataaattaacaaatgaaaattatgccataaccgcatgtgtctaccacatgcccttttgttaccactacggaatggatctgggtcacatggtaccgaagtgtgtttgcagtggtaaatctacacaggtctcctgaaacctcaattcttgtctcctcagaagaaagaatttgaccaaggggcataaggcagagtgtgggactgaggcaagcttcagagcaggagggaacgtttgttaaaaagctttagagcaggaacaaaaggaagtaaattacacttggaagagggccaagcaggcagtgttagagatcagtgcacagtttgacctttgacttgggatcttatacattgacatgcttctgcggttgtgttacttctcgcccgatttttccactgggggaggctgtccacatgcacagtggccggccgacatttggaaggtgagcatgcatggtgtgtttactgaagctatatgcatgctcacttgaggtgttcttgccttaccagtcaagtgtttctagaggaagatcatataccaattaaaccctgccatcttgcctcttactgtgcatgcttgagcctgctcgcttcactcctgagatcttatcaggaagctgctgatcaccagtttcaagggttttgatatgtcaggagactgcctttccctggcmctgctgcaaccgattattattttagagagacagttaacaaccgcctgaccatcacccgatggtggccggacattcctggtgactggaaggcggtggggggtggtggggtctcctgccctgcctgggtctgactaactaccgactgtaacactttcacatgaattgttaatgttgtgtcagaaaaaaaagggaaatgagagaacaggggagaggagtcaagaaaagaggaggagagaaaaggaagaaaatgataaaaagggacagcaggggagtgagtcaaggggagcagggaaaaggggaaatgaagggggaaaaagaaaataggaagtttattctcacttttttcatgaaatcaaacaggcagctggaatggtagtgcatcatctaataacccaaactcagaaaatcttgtcttattttattttttctagtttactaaatagcgaagaataagtcatctaakttccttgtgcttctgaatatgtctataaaacgggagaaataaatgttggttctcttactgttttacacaaacagtataagatgtgataaaaagcaagtgattttattttttggacaaaaaatataawtaatttggttgcaattgttatttaaaatgtcatttttatcatcaaatgatatttgaggtgtattagaagcccatgagtgctgggtttatttacagcttgaattttgcttggttgtttcttgctgcttgaacacataaatcatgtgataaagacatcctctattacaaaggcttttagttcattacatgttttgcttctgaaactattcttgtggtatcagtttattatgctttctgagctatttttaagtgataacacttccatcattattttttattccagtgaaacraatggagtcatcgaacgcaatacttgcttggttgctctaaacaattttttttctttgattttgttctctactaaaatacctcagatgtttttggcaaacgtttttgtttcagttgctagtgttgatggttttaaggtgttttaatttttgtattaatagacacatttttggaaacactaagttctttgtttatcttcaacactgactgtggcagaagtttagctygaataaggaatacatagaattatggcaacctctgtgtttggtaaacatatattaatgatatgaaaacttaaagcccttactagttgttacatttttacagataatttagagggctgagatgaatttaatataaataagaaattcaaccccacaaatcaaatagaaacctttagattgggtttcatcacctatcactagtggataggatactcttcatgtctgcagttattgatcctacagatctgtctccattgaacttcacacctaacagaacagtcagtgttcaattacctctctgtgagaacattaactaaaaccagagaaacagccaagagatttagaagtaaagaaaaggtcatgttcttgtaaacagaaagttcatgatgactgctagcctcctctagcactgtatggaaattaccaccttaaacaatgtaaaagataagattccaagcatgaagtgtttccttgatttatagttgccacttctaacacaatttaagatattcaataatgccattcaaagtataaagtgtaagtaacagaatcttactcctttttgaagctgttattatatccacttaaactctctttcacacacaggtacacattcaaatcaaaagtgaataaaagatgtgacttgaaaattgccatcctcctgcaatttatttttagaagtccattctgcaattcacttaacttgctcaagaaatcaaatctatatagacagagcttcctacatggcctgagatgttatgtttatatacacagaatttgggaattatgagttattgagaaaaataaaaaagaaattaaatatatcacactgccccaaatttgatgcagcttttacccaatcttctgctgaatgcatcttaaaaatacatatatgtcaatatatatttatacataattatttataatgactgttgaatatttactgttttaaattttgaaaaagaagcccatcagtgatgatagtaacttgtggtgtgcagagtcattggctaaattattatggttttataaatgactttctagagggtaggcaacttcccaataataccaagagatattcctttcaccagtgtgtacctatagtaggttctattatatatctgttgaatgaataaattcatcagtaagtactgtcaactctccttccaaattatatcccaattattttctctccatctctgcagcaaccctgcaagacaaggcatctgttttctctctcccagaaaaattgctatctctctggccacatagaatccattatccctagagcagttaaaatattattgttaaacgtaaaatagagcatgccacagccattcttaatgtcctccaatgctttctcatttaatcttaaaattaacttcaaactctggaccatgacctggccctctgccgccctctctgcatttaccaagttccactctgaccttcacttactcacttactacactataaccacaccatccttctttccatataggttttcatacatgccaggattgtttgtccctcagggcttttgtgctaccattaatttcttgaaataagttgcttccaggaatttggaaacctgatttcttctgcctttcatgcctcaggtcaaaagttatctcctcagagaagggttgtccacctttttccagtcactctctatcactaacttgtcttattttttcatagcatttaccactctctaaagttatttatgtgtttttcatctgtctcccttccctactttcattccccaccttcatatcaccaacaatcaactccacattagctcagtaagcccagccacatttttattgctgtgggaaattcagggaagagaccgatggcatagaaattgatttgaattttaaccactgtatgttgttggataaatatcttcatgagcattggaagtaatctttagctaagattttaaatatttaatatgcaaatgagatcaattctgtattgatcattgtttgttttggcatacacagataactttacaatttttatggaaacagcatatacctgaagtatttgttaacaaaagaccacgacatctgtggaggaaaaatggagagttttattttctaaaaaaaataccaaaacaagaaacaaaaaacaatctgcagattggggaggcacagcctttggtaaaagtgaaattgtgctttccaaggaacaaagtgagagtctggcttaaatagagaaagtgctcccctatgttctcaatcaggtccatttatgcaaatgaagacttcaaacttgttcatttctgattggtcaaaatagttgatctctgaccggggagtttccaagcccaagccagaagtctctgtcagatgtttctttcaaatggtcaggggaggggtgggacaggtttccagctgcagtttatcttggcaatgacaacaggaacttgttcggtttgattctatttttattttttattttattttttttttatttatttttatttttttattatagtttaagttttagggtacatgtgcacattgtgcaggttagttacatatgtatacatgtgccatgctggtgcactgcacccactaactggtcatctagcattaggtatatctcccaatgctatccctcccccctccccccaccccacaacagtccccagagtgtgatattcctcttcctgtggtttgattctagaaagggaagtcctgacacacttttacaacatctttctgagaacacagtacatgattgctccttcacccagcatcgcagcccaattctgttttaactttgagcttcccagttagccatgaggagcccattttgtcagccaggggcatattttaacatttttaataaagttggcacaagtttgacttaaagaaaaattttattttaccttttcaaaatggttatagtaagatctgtctaacattaggaaaagataccttgtaatcattttctaagaaacatatatctaaaactggactatgagagcaaaatctgcaaaattcctgtgatatccaagccatcttcagtatccactcaagtattgacatgattatttttaatgtaataaatctctttttgttctgattatttataaatgacatttattgtgtttaccttatttaatcttccaaatgctttctatgcattaactcacttgagcctcccatcaaccatgtaaagttgagactagtattgtttttattttttggatgaggaaactattcagagaagttaactaattaattcagtatcagagagcttgtgagtagcagagctaccgtgtgaacttcattatgtgtgtgtttggtagtggaaatgcacccctgcactccctttctgtgtttttatgcttttatttttaacagcactaagcatctctctatttttttctaagttatatattttatttttttagagacagggtctcactatgttgcctagcctggacttgaactcttgggttcaagcaatcctccagccctcccacctcagcctctgtaggtgcatgaaagtcgagttccaaagtccctattgtttgatcagtacattatgctgtctctctaaggccaactactatcaaaatactaatataacttggagatatatgtctttttgagggataggaattttagcagcaataactagactccatcagcttccaaggttgaacacatttctgtaattgcagaggtatacagttggccttctgtatatgagtaccacattcatagattcaaacaatctcagatcaaaaatgttcagtaaaacaaaagcatatgtgctgaatatgtacacacttttgttcttgccattattcttggaacaatacgaatataacaactatttacgtagaactttcattttattaggtattataagtaatctagagatgatttaaatatatgggaggatatgcataggttatatgcaaataccaaatgattttatgtgagggacttgagcatccattaagtttggtatttgcaaggagtcctggaaacaactccccacagataccaagggacaactatatatacctttcagaattccatgttcacctcacagcaataggttatttgattcattcattaaatatttattaaagatttatagtgttccagagaaataaaaaaaattaagggtacggttctcatggtctgagggagaaaaaaaaatacaacagaaaatttacgtaagatttgctgaagccaggcactgtggcatgcacttggaaaggctgaggtgggagggtgggagagttgcttaagcccaagagttcaaatccaggctgggcaacatggtaagaccctgtctctaaaaagaataaaaaatataacttagaaaaaaatagaaagatgcttagagctgtcagaaaaaaaaaaagcataaaaacacagaaagtgagtgcatttccactgccacacacacacacatacacacaaacacacacacacacacacacacacacacacacacacacacacacacagagcctaccaggacaatgtgacatctgaactagacagagtacttaaaatttttactttaattgaagaagaatattatttcatgctgagaggaagctagtgagctactaagctggaagcatatatggaaaagactatagaaagaatgtataataaaaggagatagagataagggtgacaggagagaaagaggctagaagagaatgtggtgctactttcggcaggtttttatggatcacatgtgggggcacttacataagggaatggcatgatactcaggtttagaacaaaagttaatgttcatatttcttaatattcaagctattccattgaaatggtgaccttccttgagaaaggatagtttttctttcaccagaccatgagagtggcttcagccccttgctagaactttcaaaaaactgtcatcttaaagaacataaggataaatatcgatagtccattactcacaaatgaaatggtggtatgagaccaacaggttgtgccatttcttcttcctaggctgtgtttgcaaaataaaagatctcaggacttctgaaaattcttcttttcaaactgattttaaaactgtgtaacaaatgagaatattacgattttaagtggttggggtttgcattttttccttctttctttttacccttctttttttctctcctaccctcttccttcccttccctctccccctctccttctcctccttcttcttttctgtttaataagcaacttcagctcattgcttctataatcattatactattagactataataaaatatgtagtaatattacactgtccactgacttttaatggcatttataataaaagtgatagatttcaattaacaaccaatgaggtggattttaaaatgaacttgtatttagaaaagcacacaggatttacattagtttacttagtgtctttaatgaagtgttttctgtgttaaagaaaaatcaggaaggtaactattgttaagactttgtcactgcccaataaaaacaacttttcagtataattttattcatgaaaattactgtaactctttgcacattttgactgttaacaagattattattaaaaaggaatgaatttatcatatagcatatttatcttaacttctaatttgacttattaacctttttgcatcctacctggtgtaagtggggggataatagtgaactgtgaagaaataaaatcaaagtcaagtacagctggttcattgaccccttacggcattggacaatctttccaggcttccttttgattatttgacagcttggtggttttgttcttagcctacagaccagagaggccacagaacaaactggctatttgtgatagctggagaatccctgagaacagggtgaggttggtaagaacatttgaattcaggaatcttcttaycaactctgaaggactttgcttttagttgttcatacatagcacctctgctaagcaatctgctgtatttaattttttcttcttgttttaattcattaaaaatagtgccagtttaatattttaagggaaaataaagatcagatattgagtaatacaggaagaatcataggaacagatattaaaagatgccccacctccacctaccactgtcttgagtccaagttacctattccctgcctggcgatagcacgagtaaaaataagttaatgaaacattaaagggaaacaagcagctgctcttgccttttaaaaaaacagtgattaaaagcatggactggaaattcaggtacttcgcatctccatttccttctacctcagcttwaacataagcaaaaacaaaacttgaatttaggttaatgccatgactttttgaaatttcagggaactcttgaaaaagcagaactgattctgaaaaaaacaatatcattaccttrctaaacaataaaatgttccccatagtctacacacagtccctagcttgtagttaatatatttatataaaatgtgtttactatttctcctcctatgggtaatgaaaagcaaaatcttctttctaatgcagtggtatctaacattgctttttaattttatattttaatttttgtgggtacacagtaggtatatatatttatgggatgtatgagatattttgattcagggatgcaatgcataaaaatcacatcatgtaaaatagggtatctgtcctctcatttatccctgtgttacaagcaatccaactatactcttttagctattttaaaatgtataattaaattattattgaccctgttgtgctatcacacagtaggtcttatttatttttctatttttttgtacccattaattatccccacctccccccaatgccctgatacccttcccagcttctggtaaccttccttctactctctatctccatgaattcaattgtttagatttttaggccccacaagtaagtgagaactgagacgtttgtttttctgtgcctagcttatttcactcagcataatgacctccagtttcatccatgttgttgcaaatgacaggatcttattccatttttatggttgaatagtactttgttgtttgaaaggagattttctgtatccattcatctgttactgttcacagtagccaaaatttggaagcagccaacactttttaacatatcaataaaaataattttgaacaagtatcctcaaaatgttcataaatatttatttatatataaattaaatgcattcctactataccaatgcattactatgccatatgcattatactgaagggcaaaatgaatagaaataaaagtgtttttttttttttttttttcttggagataggtttattaacccacaggggttcttgcataccattctggggaccagcactgtagtagattgaaaagttgattaaaaggtagaaaaatattcttaaatatgcacaagaaattaaacaagttattaaaatctctcctttaaaaactgaagaaattgattatatcaatgatctcattctataaaacaaagttcattttttctctaggccagtgtttttcaaaataggcagataatctctattaggatcacccaaatcaaaatgttgaagtctaggtatttccgcatatcgtaagtcaacattttaagacattttattttatataccaaagtttgagaagcaccactataggcaaaaataactattgttgaaaattttagaaagttatttttttcatgtcccaagttttcttccaaatgtagatagcttacaatcaaaaaccttatcaaaatttgcaatcactctaaattagccctttaatcccagaagcataaagaggaattaacatcacaatgtcaatatttaacatacagtccttattttaaaagaatatttgtggtattcttatttttgaaaaaaaatataattttatttttttttctgtggcctgtaactccattgtcaaaaattggatatgggttgagttgtaagagctcaataatttatcaatgctcattgaaaaacaaactcataatattacagagaaagtcagaatcagtttcaggatctcttgatataacattgagaatttaaaattgagtaaagatggatatattgcatccaccattattttacagcctgattcataaaaatatatcacttttaaatggtctggatacataaacattttcacctatccatcctaatttggctatatatataaaaagtaaaaacaagtgatttttatgtgacaatgagttactttgttgttgtgacgctaatgacccaaacagtgaagcagacatgataattcttgcccccaaaatggattcagatacactattttgtctacaatttaactaaatacaaaatgattttataagagaattgtgaccacttctgaatgaatgtcttatagctatttttgagataaggtgggatggcaaggttcttgctaaacttctgagttttctttgaaggtttaattctaccgtcttcctccttgcttttcatgctttatgcttgttcaggcacctgcattcgggtttaactgccaacatgacaagctgtactacaagtacgtcagaaagcatcatttcaaattcatcctgactcagtgtctatcaaatatgtgtaattggggagaatggttttgacatttacgaagtctccattcctccaggtatttgaacacccacttgaggatttgagtagaaaagaagagagccgtgttcttaggccattcaaatcttcaaggatgcttcccttcacagccaccatgcccatagtagatgcttttaaacttaattgtgtgtaagtgtcagagactttataagaagtggctttgttgatcacctcacttgtcacattgatagtgccatgtctatgaggatcttgaaagaaatcctgaaaaaacttagcatctagagtatttcttctgagcaattggtctcttagagtcttatgaaacaggaattttcacaactaatttcccttttacattttggatgttagaaagctttgcaccaaatttatgttccattggtagcaggttattaccaacatattgtattagactacatctgtctgcacctaatgcctataaacttccccctctcagctgctttcagttgatgttgtatattcttctggccagtaattaaccctttctcaaactaggtaaatgatagcattagatggttgaaatagtgaaaagaaacaggggctataaaaacaattcttaatataatctataacaattctatacttattgtaggagatcatgaaagtttgttctaaaattgtcacttagcaatttagaagagactattttgaggttttaaaggaaaaaatacccaatacccgcgatattttcatgattttcttcctccatttttctacggaagagtaacaagtacttaagaaaaatgaaatatttggtcattcctctttctctgcaatagtgttcagttgttctacagtttttactgagcatggattttcttccaagtaggccctaggtacagagacataagaaaaaatatccatgctttcatgagattatattataagggggagtgacaaaaaataaagaaatagagttatttttgtcaataaatgggagttacatatattagcatggcaggcctctgtgatgaggtaatgtttgrcagacagctaagtaatgaggcattcattaatgtggccatataaaagaagagtgctcctgttacaaagagtagcaattggcataagctctggggtagaattgtttggcatgtttaagaaacctccagaggtctggttggctgaggcacactgagcaaaagaagtggttggaaataaaatcagcaaagaatcaagactaagtcacgcaatgcgaactaggccatggaaagaactgttttactgtttatattttttaatgtgttcttataaagcctttttattcacataagtgagatgtgagccactggaaggtttttgactagggatctgattcaatcagattacgttttaaaacaatctgattagtgaatggagaagaatcagtagtcagcaagtgtagaacaaagataccaattaggaggctattgcaaagcagaaattaatgcttcagctaggcagtaataatggagataatgagaaacaattgactatgggatatgttttaatttctgatggattagatgtgaagtgtaaaagaaaaaggagtcaatgatgtatcaaatattttagcctgaagagcaggtgagtgaaagcatgtttactaagatgtggaatactgggagatgatcagtttggagaagggcctagtaagggtacatggattgatatgctgattttgaaataaattttaggcatctaacacrttagtcatttggctagatgagtctgtagttcaagtgctacataacaatgagatgtattggcatctagatggcatataaaattacaggactgaatgatatatctgcagagaaaaagaacacatttcaaaaacataaatttatcttgcatatgtagaaatattattcagacactgctatttcttgttagtaatttcaaggaaaaaagttctcattttctctaggacaaagaatgagctactactgttatacacacagacacacatacacacaggcacacagacacctgttctctagaatgactstcataagattgaaatattatgatgttttaaggctcttttttctccttaatagagatgtacatttcctgaaatggtaattctgagaaattgaggagatgaatgaatgagatgagctttacttttttgctcacctactgcagtttatgcctcattgaatacctttaattttccccctattccttcatcaagctcttgagtggatcttgagagaatgtgctctgacatatttaaaacatcctgagacagaatccaacctgtgatcatatctcttcagtgtccacaagtctcatagtatcttttttccagctcatctttcttgctcccttggcgttttggatgataaagaactagctcataaatgtttaacagacaagataagctaataaatacagctctaaataccatccccttacaatagccaaataattatctgttcagaaataattccttatgccaacccagaagagctctgtagaagtcaaaattaaaaataaaatttacatttcaaatgagatattagcaattcttctggcatttaaataacatatcttgctactcatatcaatagacttttaatgtcatactaatccataaaattgtctttattaaccaataagtgtttgcccaaggaaaccgatgatatcttaatttataaatccctgaatggccattgaattaatctatattaataatttagctttcttttttttttttttttttttgagacggagtctcgctctgtcgcccagcaggccggactgcagactgcagtggcgcaatctcggctcactgcaagctccgcttcccgggttcacgccattctcctgcctcagcctcccgagtagctgggactacaggcgcccgccaccgcgcccggctaattttttgtatttttagtagagacggggtttcaccttgttagccaggatggtctcgatctcctgacctcatgatccacccgcctcggcctcccaaagtgctgggattacaggcgtgagccaccgcgcccggccaataatttagctttctaagaagtctcagtagttgagattttaagacctgtaaccttgataccaagtcatcatacatgtaattaattaccaaacaacccacacatcctcaatatgctttatctatcatcatcgtcatcgtcatgagaaaacattaactttttaattatcttggtcattatttactctactttatattgaaaaattttccagaataggaggagataatttttgataaatgaattttaaaaataataataaatgtagagatgtatttcaatttatagaattttgatgaaatcaccatactgttttaattaagatgtggataggaggcattatatcaaggtagtagaaaaagatttgttctacttcatgtgttttacttgaaacatatttttcgtaaaatttctgtatgtctttataactgataatattggcacacatttcatgttagttaattaaacaaattctaaatatatatattccaatttacggtttattttccttactataattatgaaagtagaaaatgttaaatcaaaattcttttagaatatttaaagtatggacttaataaggcttagttaacattaattcatcagtttaagaaaaaagctttgaaagtctcccgtgtgtacgtgtatatatgtgtgctaacacgtttcttgattttactcaattttttagtctcctttctgagacaagcgaggaaaatttaaccttttataaccaaaaaattgtttaaaactcaaatataattcataattcaaaccacccaagtgccctgcagctgctaatcagtaaaatgacttttcatatcatatcatatcacataaaaatggaagggccaagcattttatatctaacaaactctacataattaaaaagtaagtcaacattgtttttactgttccagaggagaagagagaaactcaccagaattaaattcgactgatatgatttaaaatgtttaaaagtatatattattctggtaacaaagataataaatgcatgcttattgaggacaatgtgaaaataaagaaaaataaaagtagataataaaattcacataactcctgccacaagtaacattttattttaaagtactagaaagtactttaaatatatgtaccaccagataattcatttatatcttagctttttaacttagtatgatagcattgggattttcccctgatgtcagaatttatttatattgccctatacatgattatattatagataaaaatgtgtctttggtaatattcacttgatcattcctctgttgttgaatatttcttaccaatattgctcactttgttcaccttttaacactgccaccagggatatattttgttaagccaaaaatcttttcaagttactgctctcaaaatattaaatgattttcctttaagagaaagtctaaacttctcagtatagctccacgtttcttcacaatctgactctagttagtctcacaccaacaggaagactttaacgtccaataatattgatgttggcttcttcccaataaagcctttttttctcatgcctataagttaggaccctctctttggccctcttttttctttctcctcttccacactcatttcaagtacaacctcctctttgaaaactttttgaccacccccaccccaagttgaggtagttacctctcccctaagcttccatgttagcttgtataaacttgtaactgatcccctatcataacatatggaaaacacctgttagcttatctgtctcctgtttagatagcaagcagcttggggtttaagtgtgcatattagattgatttttgcttcaacaatgtggcttattgcttataaatacatttgttaaatacaatttaaaatcataacatttattaagaactttcctatgtgctagaagttgctgtaacttttttgcatgtattaaggtaattaaatcttcacaaccttatgagagaggtattattatttaccgtatttttaaatagacggataaactgaaatgtagtgaggttaagcaatgtgttgacagctagacatttagtaaatgtcagagccatattgtgagggcaggccctcaagagcagaagcttgtgcccttattctgggccagatgtattttctccatctacagtgaatccaaggacaagcatgagatgtgactttaaagcaaaataactaattaaaacagtgaggacatatatcactgcctcggctttatttccctgagtttcagaaaatttgattgtcaggggtaaataatttaccaatgtgctatagctagttaggatcatatctgggaaatattagttttcatttccctaattctaatgtactttcccactagattaagctgagttagtacttcttttatgtcaaattaagatacagttttgaagaaaatataatcatgaatctaaaagaacatagagttattgcttttatttattaaaagccaaatgttataaaaatgtgcaaaagagtccaatcttgacaaacaggcttaattgtgaaaaataaatacaccatggtcccttcagaagagctggatctagatacctttaagtccaagttgattggaggcatggcttttgtctacaaaaagatcattataaatatatcttcatatgttttaagagatatatttataatgatatttatgtagacaagatatataagctatatctcttaagatgtacatatttttaaaactgaaagacctaaaaccagagaggtaaaaaagatggttcatggttttatcgttcttcaataaatatagggaaatttgagaagtaaaatattttatatattttgagttggtggtaggcctgcgaaattaactgaactagagagacagaatgggttaaccaaaactttatgtttacagcatggaagtttgaagattacattcttagtgaacagtatgttactagagaatgcttatctatggaataatctcccccgaatatctcctttcataacaaaaaaaaatgccgctagagaagataacatgatagaaaaattagagtgcaaacataaaactagaagggacttttatcatccaactccagatatatgattaaatctgtttcttcctaactcaagcttttctgcacaatttttctttctaaatatgactaagtctatctttcttttcaatctttctcccttgtttttttaatatrgaattcctaaatgaggcaaaatatcagtctactgagaataatacttttcagcttcgtattttatagttaattatgttatgactcatagaaaaattgatcccaaggttcatcatttttctttttctaatttctcctgttctgaagctgccgttccaccacttcctcgttaatgtaaaccaatagtggtccttgtttgaaagcacttcatcagaattagcctcaagtgagtcagctgatggaagaaatagtaataaatgaacatgtgtcaaagagagggctgttgagcaaaaaaaattcagttaccttccagcacagactacagaacaatttattaaagtgtcagaaacaaacctttaaggtaaaaaacagctgatacaaaattctctgattacctaaaatgaatctttaatgaartaaatgaaaaagaacagtattccaactgtgctgtttatcattcaaaattaattggataatggttaatttgaaaatataataatctctactgaactgactgaatagtgaataaaatgaattttaaggtttatttacacatagtaagacttcaaaatagatgttaattaattatcatttgcaagtagtttttaaaatgttgctattgaaatcagcttgacaaaaacaaagtcatgaaaagcaaataacttatatttttatatttcaaattcactagtttttataactaaatttttttaaaaacagaactctgtttttactctatatcaaataaaaccctttatctacacttaaaattgtgtggattaaaaaatcagattgtcctctctgtgtgtagcttataaattgttaagaaatccccattaacatatcacagagaggttcaatttgtgtgaagctaaatattatttgtgtaattctatccaagatggataagccacttamgctttatttccaccaattagcaatgaactggtccagggaatacwtaatttagggattttatagggcagtatattaactaggttgaggctacccacataccacacactgatttsttgcagaaaaaaaaaaaaaaggaakaatttttatgctgcaactaaatttttgacagggtagatgaagaaagaggattcaaacaaatcattacaggctgtcttttgtttgtttgtttgctcatctgtctttcatttttcagcctggtttgatgctgtaggcaaaataacttcaatactatgtaaaaatttttaactcaataatccattaccaaagaaggaaaatattccctttgaggtcttttccagtctttaattgtggattgtatggataggcaagaataacaatgtcacaaaactgtttaattatgggaagaatttctatagcacaagtgtggcctacagtaattagagaagagaatatagatatgacatgcctatcaatctacttggatttgtgtatatttaatattattgctattaacaattgatacctcttattccctgtaaaaaaaactctacaaattacacaacattctttctgtcaaatattttagaaatattgatataatcattctaaaaaaatccatataacattcagctatttctagtatctatgcaacaaaaacaattggataaacattgtcaaaaataagtttcaggcataaaaacacacatttttattcttctttctattctatgacttttaagcaatctggtatcataagcaaataaagagaacatgtattattggtgctaaaattattttgttagtttaggttattaatgagaataatatcaattacattactaataataacgtataattctagagtaaaagaacaagaatatcgtgtaaaattttctctttctgtaccttgcttatcattctgatgtttcaaatttcttcacatttttgataattattctgttagttgtgaaaggaaaaatgaatgagaaatttatgatgtatgtggtagttaaaaaatgtatattgcttgagtgggaaatagtgattatttcatggtcaaaaatactgccactaagagataattaatatggaaaaggatagcactttatgaattgagagatcactttcatacttcttacccttttttctaataactgcattaatgaaagggcaaacttttttacatgtaagtcaatattattgtgaaaggcatgtgacatcagggctaacatttttaaaagcttgaatataataggtatataatgacaacctcaaagaaatcccaaactaagccttgcagaattttattcattcaattggcttctacttttgatatctataactgaagtaaaaattcctatgcatgtcaaaaatctagagattaccagatattggaggtttaaaaataagaagccagagttcagatcacaagtgattcactattaaaaatagtgcctatgttgctttttctttatttctcctttatttttctttattgtaaatcaatccagagacttacagtttctggtctagcatttaaggaccttggcagtcgcaactccattctaacaattacaaagctgaacaaactaaacaatcaacaacttttgttagagctctaggagaagtgaagtcacagggcatacctctgccctcaaaattggagctagaaatgcaaatacaaataattacaacttactggaacagaaacctcccaagcagaaatctccgtgggaatcagtgctcaggtaggaaaaactgaactgtacttgacaaattgctacaggctcagtagacaagtctgaaattcagaaactccagggaaacccagtcataaggccccccacacttctgtaacttttacctccagaagcttgaccaggtttttacagtgaatactggagaaaaataattctctctgctatcttcagtgggagaggaaaagtaattattttgaaatatggcagagaatctgtttttcttaacaagttctgtcctcgagagaaaatatttaactagcctaacctgaagggggcttattggaacttatttacagtagttccttttatccagtaatcatatctggctgccaagaaaaaattacgaagcatacaaggcatactaaaaggcagaaaacacagtttcaaaatcaatcatcagaacaaggttcagagatggcagggatgtggaaatttcagaacaatagttttagacaactgtaacatgctaaggaatctaccagttaaactaggcagcaagcaagaacatataggcaatgtaaatagatgtaatgttgtagaatataagagatggaaattctaagaaaaatcaaaaagaaatgctgaagaccaaaaacactgtaacaaaaatgaagaattctcttgatgggctcatgagtagcttggatgcagmtaaggggaaaatctctgagcttgaaaatatctcagtaaaatcttcaaaactaaaaagccaagaaaaaaagagactgaaaagaaaaatccagaatatccaagaactacggaataaataccaaaagtgtaatcatggttaatgaaaatatcaaaaagagagaaagagagaaacgaagagaataagtatttgaagcaattatgacagataatttccgcaaattaatgtcaaacaccaaaccagagatccaggaacctcagagaatatcaaggaggataaatctcccccaaaattacacctacgcacatcatattcaaactacaaaaaacaaaatttaaaaaattctgaaataagttatagggggaaacagaggagcaaagataagaattacatytgatttctcttcagaaaacatgcaagcaaggagagaacaaagtgaaatatctaaaatgttcagacaaaaagcaccaacctataattctgtactgtgagaaatatcctttaactatgaagaagaaataaagactttgttagaaaagcaaaaatggagggaatttgttgccagtgacttgccttactagacatgtgcgaaaaaatttttttaaacagaaggaaaataatgcaggtcataaacttgattctacataaagaaatgaacataatttgagaaaaaaataagtgtgtaaaattaaaatgtatttttcaattcttagttaatctaacacataacagttggtccaaaataatgatagcaacaaagtatttagtcatatatgtaatcatatttgtatgtttcatatatgtgtcacatatgtatgcttacatataagtctagtaaatgactgaaataacacaaacattggaaggagaaattaggatttcttttcttaaaagatatttgcactacgcatgaagcagtataatgctatttgcaaatggacttggattaattgtaaatgtatattggaaactctattacagtcactaaaaaaatgaagaagaagaaaaaaggaagaagaaaagaagagaaggagtggaagggggaggaaaaatgctataagagagaaaatacaatgatatgcaatgcttaactaaaaccagaaaaggcaaaaaaaaaattgaaagacaaaaatagaaacaaagaaaataggtaacacaaagcattactaatatggcacatattattttggctatatcagtgatcacattaaatttcaatagtctaagtacatcaagtagaagatagagattgtcagagtggataaaaaaacaagccccaactatatgtcgtctacaagaaattcacttcaaatataaagacgcatatagattaaaaataaataaacggagaaagataaatcattctaacactagtcaaaagaatgtggcagtagatatattaacttcagacagagcaggcttcagaacaaagaaagttattcagggattacaaggggcattaaataataaaatagtgattaattttttaagaagacataacaatttttagtatgtatgtgcaaatactgaaggcaaaaacgatagaacttcaaagagaaatagattaatccagtattgtaattgaaaatttaacacccaactatcagaaatggacagattcatcagggagaaaagcagtaaagacatagttgagctcaactacaccatcagtcaaatggatataatggacatctataggactacgtcatcaaacaacagcataatacaccgtcttctcaaggttgcatggaacagtaaccaagataggtcacattctggggcataaaacacaccgtacagaatttaaggaaaaaaaaaaatcatatagtgtctgatctcagactatagtggaattaaactagaaatcaataatagaaagatagctagaaaaccccaaaatgtttggagattaacaacacacttctcaataacacatgggtcaaagaagaaatttcaagaaaaattttaaaagattttgaagtaaaagaaaatgagaacacagcttgtcaaaatttgtgagatgcagcaaaagcagtgcttataagaaaatctatatcactgaatgcatgtacagtcatgtataacaatgacggggatacattgtgagaaatgcatctttaggtaattttgtgtgaatgttatagaatgtatcttcacaaacttatatggtctagcctactaaacacctaagctatatagttcagtctattgctcctatgctacaaacctacacagcatattgctgagctgaatactgtaggcaattgtaacacartggttggtatttgtgtatctaagcatatctaaacatagaaaaggtacagtaaaaatatggtattataatcacagggaccatccttgtatacatagtccattgttgactaaaacactgttatgtagtccattactgttttagaaaaaaatgatctagaatcaatctaagcttctaccttaaaaaactagaaaatttaaagtaatcaaaagaaacaataaaaattagagctgaaatcaatgaaattgtaaaccgaaaatcagtagagaaaatcaagaaaccaaaagctggttctctaaaatgatcaataagagtaatacgcctatagttacgctgagaaaaaaaaagagaggattcaaatggctagtatcagaaattaaagaggggacatcatttcagacaccatggacattgtaaggataataaagaaatactatgaacaactccatgtctacatatttgataacataagtaaaatggggcagttctttgaaagaccaaatctgccaaaactcacacaagaagaagtaaacaatcttattaggattatatctattaaagaaattcagtcaataattaccttccaaaacaaagatcactaggccaagtgggttcactggtgaattctaacaaacatttaaggaaaaaaatcacagcaattctctacaatcccttttagaagatagaagcagagggagtactttctaattcatttaataaggccatcattttcctagtagtaccaaaaccagaaaaagacattccaaaaaacaaaaactacagaccaatatatcttatgaacaaagatgtaaaaattatcagcaaaatattaggaaattaaatccaacaatgtataaaaagaccatgatccagtggaatttatttcaagtatgcaatgctggctcatcattggaaaactgattaatgtgatccatcataccaacaggctaaagaagaaagatcacaccatattagtagacgtaaataaaagaatttggaaaaatccatctcccattcatgattaaaaaaaaaaactttcagtaaactargaatagattgagactttctcaacttaatataaaaaatctaggctgggcgtggtgtctcacgcttgtaatcccagcattttgggaggccgaggtgggtggatcatgaagtcaggagatccagaccatcctggctaacctggtgaaaccctgtctatactaaaaataaaaaaaattagcctggcgtggtggcacaggcctgtagtcccagctactcaggaggctgaggcaggagaatgccttgaacctgggaggcggaggttgcagtgagcccagattgtgccactgcactccagcctgggtgacagaacgaggctccatctaaaaacaaaaacaaaaacaaaaaacgataaaaatctgtagctaacatcatacttaatgttgagaaactggaagctttccaactaaaatcaggaatcaggaagaaggcaaggatgtcccatctcaccacactctttgaacattgtactagaaaacctagctcagccaatacgacaaagaaaggaaacgaaaggtatactgattgggaaggaaaaataaaactgtctttgtttgcaggtgacatgattgtctatgtaaaacatctgagataattgacaaaaaaaaaccctcctggaaataataagtgaatataggtcacaaggtacaaagttaatatacaaaagtcaattgcttccctttataccagcaataaacaaatggaatttgaaaaaaaatactatttacattagcaccctgaaaatgaaatatttaggtataattctaatahgtgcaaaatttacgtgaggaaaactatgcaactctgataaaataagtcaaagaataactaaattaatggagaattattccatgtttgtgtataggaagactcaatattaccaagatgccagttcctcccaacttgattcggcacaatcccaattaaaatccccaaaagtggtttgtgagtaatagcaaactgattttaaagtttatacgaggaggcaaaaagacccacaaaatattgaaggaggaggaataagttgaagcacggacactacccgacttcaagggatagtataaagctacaggtatcaaatacagtgtgctaatgaaacaacagacaaatagatcaatggaagatagtagaaaatccagaaagagacattcataaatatagttagctgatctttgacaaagaagaaaaggcaaaacattgaaaaaaatataatcttttcaataactggtgctggagcaactgcacatcaaataaaaaaataaataaatctagacaccttatatccttcacaaaaattaacccaaaatagatcatagacctacctaaatttaagacctaaaactataaaactcctagaagatagcatggttaaaaacgtagatgaccttgggtatgccaataactttttagctacaccaccaaaggcatgattcatgaaagaaataattgatgagctggactccattaaaattaaaaactactatgcgaaatacagcatcaaaagaatgagaagatgagccacagactgggagtaaatatttgcaaagggcacatcaaatatacgactgttacctattacaaagatttcttaaaactccacaataaagaaacaaccagattttaaaaattggctgaagaccttaccagacacctcaacaaagaagatatacagatggcaaataagaatatgaagaaacgttccacatcatgtcatcagggaaatgcaggttaataccactaaaaacctattacaattacccatatatcaaacactgacaataccaaatgctggtgaggatgtggacccacatgaactctcattcattgctggtgggaatggaaaatggtatagctgattggaaaacagtgtatttgtttcttatgaaactaaacatacagttgccataagacccagcaatcatgctgcttgatatttaccagtgaaagctgaaaatttttgtccacacaaaattgtgcacaccaatgtttacagtagctttattcacaattgccaaatcttggaagaaacaagatattcttcaataggtggatagtgaaatatactgtggtaaataaagmcagtaaaatattattaagtgccaaaaagaaatgagttatcaaaccatgaaaagacatggaagaaacttaaatgtatattattaagtgaaagaagtcaatcttaaatggctgtatgattttcaactatatgacattctggaaaaggttaaaactatagagacagcaaaaagatcaatgcctgccaggggttagagggaagatagggatgaaaaggtggagtaaagaagatttttagggctccagaactattatgtatactataatagtagatgcatgccattatacatctgtctaaatctatataatgtaccacaccatgaatgaaacctaatgtaaactatctgtggactctgggtaataatgatgtgtcaatgtaagctcatcagtcataaaaattgtaccactctcataggggatattgataatgggatagtctatgcaaatgtggggtcagaagatttaagggaaatctctgtacctgccactcaattatgctctgaaccgaaaattgatctaaacaatagtctactaagaaataataataaggaagaaagaaagtttgagttgtacatggttgacttctgggaaacataaagagaaggtgacaaaatcataaatgtttaaaaacatgcaaacagaaaaaaacaagtatagtgatactaaaattaccatgtaaaatagctgctggcttgtgttttcttgcaaagaattttcatgcaatgtgaacatctcatatatagacaaggttgatttctagaataatatgtgttcttctaaaatgcagtattttacccaaagcaaattttttttttttttttttgagacggagtctcactctgtcactagactggagtgcagtggcgcaatcttggctcactgcaacctccgcctcctgagttggagtgattctcctgcctcagcctcccaagtagctgggactacaggcggccgacaccacacccggctaattttttgcattttttagtagagacggggtttcaccatgttagccaggatggtctcaatctcttgacctcgtgatccacccacctcggcctcccaaagtgctgggattacaggcgtgagccaccgtgcccggcccaaaagcaaataatttaacagcaggtgatgataccttcaccctcactcaaaaggccataataataataagtaataataatataaaactacactaatcaatgtgcttttttcagcctctactaaaagaaatacagatgaatgatctcaaagattgagtccaatgtttagagactgatgttcataattgtcaatggctaaatggtatcaaagcctctaattcccagaaaaattcataccataatcccatgaatgtgaatatatggagaattttgatattacttaatattttgtattagaatcacattctttaggctttatttaggttttaaatacaagatactttattcttaaggcaaatctgttaggcaagcttgatcattttgaaaattaggaagcatgttgtttttgtctttggttctatttatgtgatgggttacatttattgatttgcatatattgaaccaggcttgcatcccagggatgaagccaacttgatcgtggtggataagcttttttttttaattatattttaagttttagggtacatgtgcacaatgtgcaggttagttatatatgtgctgctggattcggtttgcctgtattttattgaggattttcacatcaatgttcatcagggatattggcctgaagttttccttttttgtgtgtctcttctcgattttggtatcaggatgatgctggcttctaaaatgagttaaggaggagtccctccttttaaattgtttagaacagtttcagaaggaatggtaccagttcctctttgtagttctggtagaattcagctgtgaatccctctggtcctgggctttcatttggttggtaggctattaattactgccccaatttcagagcttgttattggtctattcagggattcaacttcttcctggtttagtcttggtagggtgtatgcctccaggaatgtattcatttcttctagattttctagtttatttgcatagatgtgtttatagtattctctgatggtagtttgtattcctgtggggtcagtggtgatatcccctttattattttcaattgtgtctatttgattcttctctctcttcttctttcttagtatagccagtggtctattttgttaatttttttcaaaaacccagctcctggattcgttgattttcttggatggtttttcaagtctctatctcctttaattcttctctgatcttagttatttcttgtttctgctagcttttggattagtttgatcttgcttctctagctcttttaactgtgaatttagggtattgatttgagagctttctagctttctgatgtgggcatttagtgctataaatttccctcttaacactgatgcagaaaatgcctttgataaaattcaacaccccttcatgttaaaaactctcmataaactaggtattgatggaacacatctcaaaataataagcactgtttatgacaaacccacagccaatatcatactgaatgggtaaaaggtgaacgcattccctttaaaaaccggtaaaagacaaggatgccctctctcaccactcctatttaacatagtattggaagttcggtccagggcaatcaggcaagaggaagacataaagcctattcaaataggaagagaggaagtcaggttgtctctgtttgcagatgacatgattgtgtatttaggaaacctcatcatctcagcccaaaagtttcttgaactgataagcaacttcagcaaagtctcaggatacaaaatcaatgtgcaaaaaatcacaagcattcctttacagcaacaataggcaaacagagagcaaaatcttgaatgaactcgcattcacaattgctacaaagagaataaaatacctaggmatacagctaacaagagatgtaatgacctcttcaaagagaactacaaaacattgctcaaagaaataagagaggacacaaacaaatggaaacacattccatactcatggatatgaagaatcaatgtcatgaaaatggccaaactgcccaaagtaatttatagattcaatgctattctcagcaaactaccattgacattgttcacataattagaaaaaaactattttaaatttcatatggaatgaaggaagaccccaaatagacaagacaatcttaagcaaaaagaacaaagctggaggcatcatgctacctgacttcagactatactacaaggctacagtaacaaaaacagcatggtactagtattataacatacatatagatcaatggagcagaacagagacctcataaataacactactcatctacaaccatctgatcttcaacaaacctgacaaaaacaagcaatggggaaaggatctcttattcagtaaatggtgctgggaaaactggctagccatacgcagaaaactgaaactggaccccttccttacaccttacacaaaaattaactcaagatgaattaaagacttaaatataaaacccaaaatcataaaaccctagaagaaaacctaggcaataccactcaggacataggcatgggcaaagacttctgactaaaatgccaaaagcaaatgcaacaaaagccaaaattgacaaatgagagctaattaaactaaagagcttctggacagcaaaagaaactatcatcagagtgaataggcaacctaaagaaggggacaaaatgtttgcaatctacccatatgacagaggtctaatatccagaatttacaaggaacttaaacacatttacaagaaaaaaaaaacacatcagaaagtggacaaaggatctgaacagacacttctcaaaagaagacatttatgcagccaacaaacatatgaaaaaaagatcaacatcactgatcatcagagaaatgcaaatcaaaaccacaatgagawaccatygcatgccagtcagaatggcaattattaaaaagtcaggaaacaatagacactggcaaggctttggagaaataggaatgcttttacactgttggtgggaatgtaaattagttcaaccattgtggaagacagtatggcgattcctcaaggatctagaaccagaaataccatttgacccagcaatcccattactggrtatatacccaaaggaatataaatcattctatcataaggacacatgcacatgtatgtttattgmagcactatttgcaatagcaaagacatggaaccaacccaaatgcccatcaatgatatactggataaaggaaatgtgctacatatacaccatggaatactatgcagccataaaaaggaatgagatcatgtcctctgcagggacatggatgaagatggaaaccatcatcctcagcaaactaacacaggaacagaaaaccaaacacaccatgttctcactcacaaacaggagtcaaatattgagaacacgtggacacagagaggggaacaatacacaccagggactgttgaggggtgaagggaaggaacttagagaatgagtcaataggtacagcaaaccaccaaagcacatgtacaccaatgtaacaaattgcatgttctgcaaatgtaccccttttttaagaagaagaaataaataaataaataaactatgactgccctcccaactcccacccccacaaaaaaaaaagaaaattaggaagtagatagagacacatttcagcatttcagcagatacagttccttcttgggcccctcttatctccggtatacccatttctaactcaatgcacacacacacaaataattaatgagttagttgtgagaggcacaatgtatgtgaaatagtttgctkgtattatggtaaaaacttaagtggtagggatgtgaaataagacatctttgatggtcagaagtattggctacttaggtaaaatttgtatgtaaaagaaagataacattttacatttcttaaaaaagaagttgagacaacttgcacaaatagatactacggctaatagaaacaatttttatttacttttctgcatgcacagtatatatcaaagcacaaaatgttaaaaacaattagtgtagaaaaatataagcaagctaaaagcacaaagtaaattatttacaatacatccaagtataaataatgtacatggtatgtattaccaactcttaaattccataaataaatattgagtgattataaatatcagtatgctggggaatttataargataggtaaaactcarttgtactttcaaggagcttccaattcaataggaaaaatattaggttacacctggtaaaattttctattttctacaatttttgtcctacaaaatggcaattttatacggttcatctaataaaacaaaaatcccaaaacagtgtgtatggtgcagccactaagagaagagtgaagtgctacaattattcataagttggtcttgaaggtatagaatttccaaaagtaaaattggaaatgtgatcacacagacaagagcatgtgtaaggtgtaaagaatgttatgtttgaaggatggcaatagaatgyttttgtatcaaagagtcaacacctggaactcaaggttaaggttagaccatgaagggcctcaaatagttttgaagcaacctcagctttaacgagaaagtactgaaagcagtgaacatttctgtcggagaaaggcagagataagcttgactgtgattaatgcagtgtttggtgctgaatgaagttctagaacaaagatggaagttgagaccaatcagaagattcctgcagtatagctaaagagatattaaaaagactctgtattagaatgatggaaatacaaataaagaaggaagaaattacggcaagaaaaatggtagggtagaatcaaaaggactggtaactgacagggcatcgagaacaagggaaagcaatgagtaaaacaaagattctgaactggctgatctggtggaggagttggtttgggaagaaaaccaagaaattgagaagaatgtgaaatgatctaaagatattcagtcagagaggtctacatttcagattgcaaatgtagcactaaaatttttagccttgaaggtagttgtgagtactttaagacaggaatggaagctaagacctttaataatattagaagaggatattgtataaaaaaataaaaggaaaatgttatatgtagaactcagaggacttttcaggtgaagagaagaatcaataaaggagaaacaaagtgtgaactgagagtttattatcacttgtggcagacaaacactgcaaggacaaaggaaaagtcatcattgtcaaatggggttgaagtgtcaagtaggatgaatccctcaaaatttagtaactaggaagtcattagtgactttcaaaagaggagggtgtttcggtgtagaggtcaaacccaaagccaaatacaaaagaactaatgagtcagttcctggggaaaacatgaagcaatttgaagaaatcagtcagggggaggtagcagaaagtttgcataacagctccagggcataagtgaattttagccaattttagcataaagagactatatgattgtaggcaaagtgatagtggagaggcaggagaataaatttgtgcctatcttaagaaaggagcagggaatggttaattaataggaaaaattctctgaggacaaatgagagtaccactcgaacacagaggattaaccttgagtacactgttctattctgaagaagcaggaaaagagagagagaggataaagttagagtttgggcatactgggaaagcacttgcagaaatctctaactattgcttagcactgcttcctatactaagattggaataacaactgttacttctgtggaaggaaagcttatgcagtatagtcaatctccatatatttagtgaaaatattattgataatgacatgagaaaaaaaggtgtttagagatttgtcctagagtatttcctataaaggagtaaggcaattctatatgcaagactttgtgccttaatgaagttttaataacatgcccttgaccacctgttattatttatttaaagttgctctaatattttatttatattcttaatttacttatagtcatcgtgataactataattgcattagatttataaatatccttattctccaaaatacaacctggaaaatggtacaaatgtggagtctacaaaaaaagatgtcaagagactttataaaacagagctttccattgttaactactcaaaattgttaactactaacaatttccattgttaactactaacaatttccatggttaactactcaaaatttgtacacatgcattaaaataatgaaaatacctatccatgggtaaaataaaaatttggagtgatataaagcattggggtttccaaagaatagcttgagaaaggcaccaagattttttcaggcccaactttgtcccttcgtgcgaatatattataccttccaaaacacattttttgtattcattgtgaaccaagtactttcctgctcacagcagagagttatgactgtatcattttccccagtttacagatggagtctctgaggctctgggaaaataaaaaaattccccatagccaacagttagaaaacgatgaagcccgaagttagacacaggtgcatctaatattaagctctgtgctttttctccccccagtcaaggctgtctccctgaaaggcgcagctgctttatttgaagacagcccataatgtttctgaaagaagcttatgattgatgtttgctttgacattttctaaaaatctttgtaaagttccataaggattatcaactttgctgcacctttgctgaatcaaagttttgtgctttgttccaaatatggcttaacctcaaacactttattacctaatgtgaacacaagttttattatctccgccaaagtgttcatgttcagcacagactttatgatcatggtcttctgattactttacttaatatattcttcaaggtcatcttcagtctactctccacttcttcgtttgacatctctttaatatttgataagcaataaccagttatataatttgtatattcatcacctgtctagagtaagtgggatcaaaatccactaaatgtaaaatgcactaaaatgaacaattcacacgtatcttgggaaggcagtctgaaagaatatccctgttttccaaaaacagaattatgaattaagtatttaacttggtagcaaagtaggcagcttttcttttgctcaaacacatgtgcttttgtaaaatataaaaatttggtttggaaatacatatgtgtatattttataccatcaaggaagtagtcatttgagaaagcatgataatatctagtgttgctacatatatgtgtgaggaactgatagctggcagggatgtatggatgagaacctggaggtagaaataacctttaaaaaaataagaagaaataagggaaagtaaagataaaatgcaaatatattagtgttctgattcccaaaacatcaaaaaagtgaaataagaaaaaaaatgagaatgactatgtgattaaaatccactacctattgtaggatcccatggtctcaaccgaagaaatgctgataccrtatttcttatggccagagtcatgggctactcattgaactgatgcaagcagtgacaaagacaacaaaattaaagaggtgggataaaatttgtatcaagtataagaaataacttatggattaacaaggagaaattaaaaaatgatgcagtgtacttaraactatggttaaraacctgagctttggaatctcaaactcctgtgttgtaagcctgatgcgttactctaagttatgcaatttctctgagttttaacttctttaccagttcattcgttaaatgagcattataaggcagtcgcaaagactagcatataagagctactttgggagtgctagcgaattgacatttttaaacttcacttgtccttttcatcagtaascaggtaaataaatgcctttaagcttgagccatgctgaatgagcaggttgaaactaaactgtttatacttctcaggtgtatcatttctccctggaattttatcacttgtagtaaggtttagttacattctaagatgagttcttgaagaaatgcacaaaggcaaggtatcaataaatatatatatatattttaattaaattaaattatttatttatttattttgagatagagtctccttctgccaccaagctggggtgcagtggcaccatctcggctcattgcaacctctgcccctaggttcaagtgattctcctgcctcagcctcctgagtagctgggattgcaggcctgtgccaccacacccagctagttttttgtatttttagtagagtcagggtttcgccaagttggccaggctggtctcagactcctgacctcaagtgatcctcacaccttagcatctcaaaggtatyaatatttaaatgcaaaaattataaggcctattaggacaactaatttgataagaagaatctatctccttttatctatcattaaagacagtgaagaaaaacctgaaattatctagtgacaacaaagtggaaaattggtgagtaaatgtccccttctcctgcttaccagtagtctaaagggtgaaaaagttaagttgcatggggaaagcaaactctattttaataaataaattgaatgtgctccagatgagcagatgtattaactaacatttaaaggattttaaatgccaaattactttaagctagatagtttgggatttcatagaataattattaagtggatccttgtatggatgtctgtttgyttttgtgccagcaagcagacatcaatgcttataagttttaatcacatagcctcttctgtgtagctgcagctgaatgtcagtttatccttgttaatcaaaaactcagcactgaaacttatagatgtatgaccaggcagacatcctcttaaacagttctgacacttaagccctgaactcttcttcagcattataatcttcacttgcttgattcttaatataattcagattcaaaagtcacaggtgtgctaatttctatttatctgatttctttctgtatcacaaaaaaatcatgttttctttctgaagtctatcaatttttacactaaacaaagagtttgctgccactttccaaaatgtctcacattagacccagatattcttaaaggtctttataaataatctaatttctctaatttaaaacctgattttgaattcagattccttaagaataaatctttagcacattgaggaatattggatttcacattagcctcttttgttgctgcattgttgttttcacaatgtgaaagccaaagtgtaattcacaatggattagtggccattatgtacctcgtaaaaagaaactacataggtatatctgctagataattccacatattcactaaatggcataactctgtcttatctttttcacttttctctgctctcctgtgagttcctttgtttgcaagcaattcataaagctaagacttctctactctcacaaaagtattcaaaaattcgttttgttattttccaacaagcagactaggagattaggagaccagaataacccagcatcatgtacttgctggattttttttctctccatcacttcttcattatttattccttattttcttattgaataaagcaacatatagtatctaagaataagagaaacaaattttcccatctatcaaaaactacatggtaatgagcaaaaccacaaactgtaaacagaactttttttaatgtttatagtatttcacaaattagaaaatacttggtggcacacaaacttttttgttatattagctttaaaacgtgattgctatgtcataaatacttatttctcatcatcattaattggcaatttgatatttccacacaaaataatgaataacttgcagatgaacaataaacagctaccggaaagtgttttctgcctccgtctaaagagttcctcaataaattcaaggattacctctatactttgaagtatttgaagtacactcagttccattagattccaagaatgaagaagtaggacagcgacatatctcagcacttcttgactttttctaccacgtaagacagtgatgccctgcagctaaccattcttatatttttcaaatactttctttaaagtttgaaaaactgtctgccaatgacctgaattcacttaacaggcacgttttctttggcaaatatattgttcaccatttaaaaattataaatatattagaaaaatttacttgaagtcttttgaaatatagcataactttctgttggagagtagagagcaaaaggtgacctccctagttcagtattgacaccaccactctctattgtctcaaatatgaatgtggtctttctagaaatgtgtacctgtattttgtatttttttaattcataggctttacctgctcagttataacttgattgcttgtcccttacatgcaactgagtttgtggttcctgctctggttttactagaaactatacagagcccaagataaagatgtataaaatttattgaaatgtgtataaaatttattccagatccagatatgctcacagctagtggaagaaataattaattaattaaaatacagtaagcagtatcagaaatccatgctcaaaatcctatgggaatacagaagagaaagaaaaaaatccattcatatgttgcctgtatgacctttcattgaaaaaatattacaaagaaaacatttaactttttgtcaaataaactgacataaaaatacaagaaatctataaggataccaaattaaggcacagaaacaattttcaggcacacaaattactttgtttcaggaccagaagggtcatgaatatattataaaaagcattgaattctgagacaatttgtcattattaaaattaatgctctgtcaacacaaaatctaggtttcagcaattctttgttactgcagctgtttgttgagttaccatgtccaaatgttctaggagatccagcagcaatgaatggacaatgctttttaatctataatagcagactataatctgtaatggtagactgtcagcatgtgacacatgttcaacactcaaatctcaaagaacttgtgtgacagataaccaaggatggagatgttttagtactgggaaatggacagttgacaggaatgtttttgttcacaatgttattcatgtatttaaaaatatagcctgttggcatgcagatcagattttgacagcttggaaattatagaacattttgctagtataataaaaagtctgagactagcaaaaccccaatttatatcagcatacaagagagtagaaaagaggaaaaaggcagacaggagggaaaatggtgaaatacagaagaaaacaattttagtttctcagatcatcttatgtataaactgcaaaaccactctgagcttactatctcacaatagagtcggcctccaaaccaaattcagtttagctgcctggtttactttaatcaaaaatttaatagctctatttttaaacatcatcttacgtattttgatagtgtcaatcacgatatttcaaaaaatgatttattctaacatgcttcatttagcataagctggagaaccattcatatgctttctatgacttcttcactaaaaggcaataaaggcaaaaaatgcgttttcaaatgagaaattaatatttctgaaaagttaattcaagccaacattataagaaaatattgatgtaacttttcttaaaacaagctttaatgtagacataaacattatgtctgttgaggtgtttagacaaaatatttttaaaggtaccacatcactgtagagacttaaagaactactatcagaacatgtatggttatatgtttgttgagaactctcacatgtgctacattgaaacctacttcctctaaagtaagggaattttgtaagataaccttagccagaatttagaattcactagcagttttcagttgtaagaagattatagatgtttcaagttaaaaactgcaattataaacccaaataaagttttttcttctcctcccaattctgactacctcttcctgcctccccagcagcttggagttgatatgtgagcacacatgcatgtgtgaataagtgtgcaagtgagtgtgtttaagttcaatatgtgagtgtacttatgtgtgtgtgagcatatgtgtgagtgtgcaaagtccagcgtcagctctgggcagcatatgtattcattatcataataatctttctcattataagtgggcttttctaaaattaatataagcattctggcattcttttggtcagtgtgagcatggcatgactttctctatctcttgacttctatttcatatgagtctttattttgtagggagtgtcttgtagaccaggggtccccaactctgtagatgagcagagggcaagctagcattacaacctgaaatatgcctctgtcagatcagcggtggcattagattctcataggaacatgaaccctattgtgaactgcgcatgcaagggatctaggttgcaggctccttacgagaatctaaagcctgctgattatctacggtgaaacagattcatccgaaaccattccctacttccccctactctagccttccatgaaaaaattgtcaaaattgtcttcctggtccttggtgtcaaaaaagttggggaccactgttatagacaacaaatatctgggtcttgtttttgttttcttaatttgtgtatttagacagtttatgattaaagtgattattgatatggttgaattatttataccagttgtaactgttttctactttttgcatttgctctctgctctttcttttttgacatttcaggttttaattgaacattgcatagaattccattttatctcttcttttagcacatcaattatatattcttttaacttttttagtgattgcccagagttgacaatatacattttaaactaacatagacaactttaaaataacagtatactatttcccaggtagtgctgtagtgcaggtcccttataactcagtatccccaatgcttccttgttatttcttatgacatttctgttaatcatttcacttacttgaatgctatactcacccaatgcattacttttattgctgtatacagttatcttttagattaattaaaaataaaaaatttaattttacctttatttattcatttaaacacattttctttatgttgatttaagtttttgaactatatcatttttctctgcctaaaaaacttcatctgacttttcttttttcaaggcaagtccactgacaaagaaattcctgttttttgtttttctgtgagtgtttatttctcattcacttttgaatgataactttgttggatatagaatcccagattggtagtttttaacttttaacattttgaatattttattccactctcttcttgcttgcatggtttcatatgaaaaattccatgtaattcttatccttgtgtgtcaataggtaatgtttctttttcctctggctttctaggtgtgtttttgtttgtttatttgtttgtttctgtatgtttgtttggtacttatcctgcttgatgttccctgagcttcctagatttgtgatatgctttatgtcattaattttagaatatttcagctgtcattactttaaattttcttctgcaccactctcttttttcctattctggcattacagatatattacaacttttgatattgcccctcagttcttgcatgcttatttctcttcctcattattttttttctctttgtactttagtttgggaagtttctctttacctctcttcaagctcactaatttgttgcctggccatgttgaatctatttgtaaataactgactgagtagttaacaccagctcactaagtatgtgtccagtgtggccagaattcaaatgctgcacttctcagggaggcctatgtggttcttcaggaatatagcagtgatgttttctacccatatcctattgcagaagtatattcaactccttttgcccccttaaggcccacatgtcataaagcctcttactctttgagatttcttgctttgaggggaatcttcttgtttgcaaaataactccagtgaagatactttccctagtgtcaccctgacccacatgaaattcatgtgttttgtcatgaaaagctaagtttgatccagaggaaaactaaaaactaaaaaaaaaaaaaaatccttctaaataattagtaggagagggaagagagtaaacatgtgtgagaaaattttgatcctttttttcttcttttaaaacaacacactgcatatccctttcttcactgttgtcacttatcagaatactcccttgacatttgagggagtagagagtatatgagttctgtagtatttaaaaaaaatatatctaaataattgtcaatgcttcctaatgcactttgatagaaactttaaaatgtacacttcaatatgtaaacatattttagtatgatttacatgtagccataaagtgagttgtttaaaatattataaaaatctattttagaagattgaagctgttactaatttagagaaaacacgatgggaaatcatttcaattcctatcttccaatcattacaaacatgtctcttatgccactgcactttcattctatttatttggcaaatactcaaggctagaagaattcagctgtcctctccctccagacctataactggcttctcattggtgtactgctggagaagagcatgcagattagaggctgtataaatttatatgggctcacctggaccctcagagcagccacagcatgcttctatactctcttgttagctcgctgtgtggttcctgatagtcactattttgaggtttctgttcctctcagtcttgtgtttcattcatccctttattgttctctatttaggtgaaattgctccagtatctatccagtcacctaagccagaaacctgagtataccttcgatccttcctttttttccatccctgacgtcaaatcaaacacagatcattagagattcaatatcttaacatattttgaatctatttaatttctctcctttcccattgtcactgttcaagtagtcatcacctctcaatcatacacctacagcaaccttctaaatgactccccacctccagtcttcactcttcttcataagacactcaggatctaagaatttgtaaaatgcatatctgactatgatccctccctactcaaaatccttcaatggttccttatggctcttaggattaaagtccaagccctcaacagtttaaaagatttatatgagctggtctctttcttttcctttcatgaaccacattgtataacttttagtttctagaaggcactgtgttaccaattgcttttcactatgcgttctgtcttaacacgtaatctcagccccgctcctactccaacccattgtctcacgtgaagattctctactcatccttcagaacttagttcccatgtttctctttcaagaagacatctgcaagtcttagatcagtaccctgccccaagcagctgtgtgatattatagaacaacagaatttccatttcacattgtatcataatctgctgttctcttttttatgttcccatttaaccctaagcatctttaggcaaaaactatggataatttatttagtattatatctctagtttctaatagactgccaggcacttattaagcattaataaatgtttctcaattggttgattgcttgaataactaaatgtgacattattttcttcattgaaaactgttraactctatttgaggttgtcagtgaagcttacactgattactaatggacatgttttctcctccccatggctgaactgcccatgattattcctggggttatgaatttgcacttcagtgacttttatgtggcatcattgcaacatggttgaaagggagatttaatctcttaaaaagagtaatggtaaataactcagatkgaaagcagctctggttgtctcccatcatgtaaaattgggagatctttgttgaaaatcagggtattctaaaatgtaattgccatgacatctaaaatcccagttctgacttgcctactaaaagaaaacaaaacacaaatatatgcaacaactgtacggttgtgagcatgtgttgccttttaatgactaagcctttattaatgtacaagaaaaatagagagtaaagcacctgctcactgaaatatagcaggagccttctgttctcagttagaacagctgccctatttactgctgctttgacgaagtcactgcccaacttctctattgaggaaggtcggtgtttacactctagccagtcttgaatcaaaacagttttgatttgttaataatgcactaaccaaatattatgactgaaaaactgggacactggtaaataatcagatgcagaatggaacttcagttgcatttagtctgataatggaaagggaaacacaaataaaaaatgtaatttaacaattcattgtatcctgttaaatgccagctgttttcagggttttaggatagtgttttgtttttccccttgtgttttcagaccttggggaataattggaaggcaattaaattactccatattttctactggcaaagaagtgtatgttatcaaggatttatttgttcattcaataaatattttttgcatacctattatgtgccaggtattttactactcattgaagatacagcagtaaacaacagcaccagagtccctgtattcaaggagattaaaatgtaatgtgagactgagggaatagccaggaaatacccaaacaaatacataatatgtcaggtagtgagtggcctgaagggcaagggaatggggaagagggatgggggtgctctttgatttaggtgtgtagaggaggggaaaaacaagacatcacctcatcatactacccttgagtgatgtctgcttctcaaatctactaattgaacttttgaaaatgaaacaaaggattccatttaacaatctcttcctatattgatttttaactgcagctgtcagaggtgattctgatggataaaacttgcatttattaggattaagttttagtttcctattgcacagcctggggactatagcgaataataatgtattgtatatttcaaagtagctaaaagaagattttaaatgtactcatcacaaagaaaggtaaatatttgaggtaatggatatgctaattagcctgatttgatcattccacaatgatgtatcaaaacttcacgttgtacttcataaatatatacaattattatttatcaattaaaaataaaataaaacctaaaaatarcgtaaagactacaaaagagtttcatttattaggtatcaaagttagtcattttcactctggtatacacgtatccaaaatttactggtttaaccagaaattatattatcataggccttggtatatacagacgatagcagaggaacaaagaaacactggctttgcttacaaaagatatgatctattagatataaataaaataagttaaattatatttgatatattaattattctaaatttattttaactgaatatccatggtgataatatacaatgtttttcattttataaaatgttttggcatacctygactcatttgggcatcacracaaacctataaactaaattattgttttcatttagccttagagatctctgagattcagagaagttaattgatacactaatgaagagccagtgctcaagcgtaggcattctaatttcaaatttcatgtttgtattgctccattgtgtgcaaatcaaaacaatatgaatattatagcaatctgattttttaaatattttcagacttattaaatacaaacttctgggatattttaatcgataccctttttttatttgttaactctttaattactattattttcttcatgaagcctgctccaaattaataaccaaaaacttagttcttcacacatccaaaaaaagatttccttttaacagtcaagggtatrggatgttaaaacatcaactaggattagtgattaattataaatgcttgtggtgatgcacatcttatatgaaacctgaaagtcacatggagcaatagagctcctgtgcttagggaagtagcctgagtggaaagatcaataactgaagtttactgtaagtggagatttaaagacatgagcgaaacaatttttagtagcctaacctttttactactcatctgacctacacatggtgagatgtgtttgattctggagcttttctttgtttctttttctcctttcctttttcctttcatttcttttttctctttcttttctcttcttcctttctttctttatttcttccattttctttccttctttattttttttttcctctcctctttctcttacttctcattttttggctgtaatgcagtggcatgatctcagctcactgcaaactctgcctccagcgttgaagcaattcttctgcctcagcctcctgagtagctgggaatacaggcrggagctagtcaccaggcccggctactttttgtatttgtagtagagatggggtttcacaggtttggccaggctggtctcaaactccttacttcgggtgatctgcccrcccagcctcccaaagtgctgggattacaggcgtgaaccattgcgcccggcctatttctccttctaagtgtagttcttacaggaataaatcttgaaacatctacctaaattaataaaatgtgtctctttgaaattggaagatcagagttactttttatttatagaacacatttcttagtggaaatctattattgtgttccattgtgaaaaayttggcatctatttttagtgctgcaagagaattaaaatctttccaagtgaaacaatcatttctctcttaagtacttattatcttaaagtgtctagagtcagtaatcagctgacatgcatgtgtgtgcatagatatacatattgaaatatcaaattttattttcatttccaaaaaagtaaaaatatgtaagtgatattttagatttaatccattctaggaaaagcttatgaggaaatatcgtaagttgcaatatagggttgttataaataaaattcaccaggtaaataaaataatagaataaaatgaagcagaaaatagacggaagtttgatgaatttgtagccaaagttctgggagaaccatggaataagaaagaatattgattctgaattcctatgcccaggcttgcgcgcgtgcacgcgtgtgtgtgtgtgtgtgtgtgtgttaataacacttaatataggaactactctcttaacaaatcattaagcgtgcaatccgcttgttgactactttgaatgctggatttgctagaattccctatataaactcagacagtcacctgaaacccttgatcctcatttccttttctcataaataagatagtttcttagttcctagtaacacaacaaaagtgcacataaaaccactttgtaaagttatataagtaaattaacattaacattcaacaaataatatgttacaatcaatcattaattaatgattcattggaatgtttcacttttagaaaaacaaaatgatgtatctaaatagtagactccaagctgagaaccatttttagattgagcaaaagattaatatagttatattaggtttggacaaactttccttacttttgatatctaagaacatagatgttgacatttaccaggttattagttgtccaggcctgaagagttgcctaagactgggttgcctacaattattatcaatagttatgtgtgtttaaatcaagaagtgttactggcactcatattagtaatgttaagcctagtctgactcttaatatcccttgtgtggttccagactatttttagaataaaataaagacacaaaattaccttttataagaaaaatgtgagtacaatgccaaagcccatcagatgagccatcagggatgtatttccctatattccatctatcttcacattttatgagaactaaaagcrtaatcaataatttaacaagctaatggacatatttttaaacacaatgaactattctgaaaaggggcacgctatcagagccacaaaggcaaaaatggaaaccgactgctaatatttaatgcctatcttgaaaaatactgtgctgcagcgtgagcacaaagcaagctgccctaaaacagggtggctctcttcttgctctgcaaagacgttgtttcatcctgtgtttgtgattgtgcatttttttcctaggaaccaaatatctgactattctgcacatgatttgacttttaaaggcactgtaaggcacaggactaagtacccaaatattcaatgtgtactttaactaaaaatgtatgctctaaaaatgatttttaatttcaatttaaaaatgctgtataatatattctggctactgatattcatgatcatacagtttacaataccattctatttgtcatacaagtaggaaaagcaaggaaactattctggacttggcagtgaaaacactctgactcaacctggagagtaatgctttattttgtggataaaataaggcctctcacttttattttgttctttccttttttcttctcttcttatattttggatattagcagcttcataagtcaaacacaaaatgttacaaaaaacaattaattgtataatttgcaattaaatactcagggggataagcagttgcctaatttatttaccaccattcyatttgtcactatgacagtgtgtttacccacagttaaggattatccataaagttcaattatatttactcaattccctattatcaagatttatacattttgatacataaaccttcctttttccttgaactttagatacatcattaaacagatttattccatagataatgtcttcccatattttgagtatatgtattgtatctgacaatcaggttaatgaaaaactgcttatgtttctaatgaatagactatgaacgtgcccataagcttgcttgtatatttttacaacagataagaaagtttagacttgttttatgtttggttataatgaagttgagagccttgagagttgagggagaaacataggtagaagtgccaacaacaagataaaggcagcccagagtgcttgatgccagaagcagtggcacccagaccttggtgccctcttggaaggcctgctgcaattggcctactgaaattagcacatactgaacatcttattcttcaattcatccattgaacaagatttcctttcctgtccttttcatatgaaagataaagctctgcttgtttgaatcaatgcatatctctgagctgcaatatttcaaggttcagtgggttgtatatataaaccatttttatccatgtagtactgtcatactttccccagatgatacttttgggagtacactgttgagaaagattatttttagtatgcaataagaaaataataatcaaaataaatatataaaaaaagataaacagtaaaaaatagtagcaacataagtctgtgaaaaattatttgctgctatctcataccacatatcttttgaattctcttatttatacctcaacaacatccatttttaatttgtcttatacacctatactctctgaaataggttttatttgtttgtttaaagaagccatttgcccagaaatgctaaaactaaaatgctgtgtctgcacaataggtgattttagcaagccagatatgcacagttaagctgtgcttgcagaattgtttttcttaaagtgcaaccaattgaccatataccagcactaatttgtttctaaccagtaaggcatgtgcacatgttgccccatacaacagtgattgcaaccaatatggatggcgtgcttgtttttattctcagtaaaggaaaatttaaatgcagcagcatgcctcagcttagaaccacatatctccagactctgctttcttcaaaagacagattttccatttgccctgcattcagttttaagcttttttttccatcaaacaaagcttatcctcctaagaatgttctggaaaaatgacttagaaccagtctgctgcgaaaatcttttaaaagcctatattaatacccttataaaatgataatatacatctgcttatgatataaaaatactctttatgatactctcaaagtaatattcttacttacaattttgtcagactttagactctcacaggtgtcttacaattccttcttttttttcaataatatctgcatgattttattcaaaataaaaaatattgttatgatgaaaagttctggagatgaatagtgatgctggttatacaacaatgtgaatgcacttaatgccacagaactgcatacttagaaatgatgaagatggtacattttatgtgtactttagcacaatacaaatttacaattccttcttaaaataacaacgctaagaaggcaggtggtagatttctaggacattattatctttcttcaggcatttagcctgcagcctggtttttcatactattttcagtcctggaaaaccataattatcctgaagcatgctacttacaccgtcttatttcttaattacagtagtgacatgagataaatgcatacttattgggatcgaatgcatattattttgtggtgattataaagaagttcttatgacaataattgcaattatatggtcatcaactactgataccatgctatgttacagaaactctgtaactaagtcctgccaagagggaactttctatttgagataaaagaattcaagagtgagagattgggacattggacagtgttatgtttatataatgtatctaggtagaaatttaagttaaacccctaaatattagttgatatartgattttacttgagcttcatatggaataatttaaaatttttaaataatttaaatttttaaatgatttaaattttacttgagattccatatgaatctcaattaaaatcattgtcaactaatatttagaggtttaactttaaagagattaagtggtttaacttaaatttaaggggtttaacttaaatttctacctaggtaaatcaaataaataatatttttaaaatatctatagtcttttttgatgtttcaaataaaagatttgaatatactccaaggataaaaaatggactagaaatatgatgagtgatattgtcttcaaagataaatttgcagtctattagtaatattcttctcagatgctataattcattgtcttaaaagctttcatttaaggtttccaaaatatttttttcttttttcattccaatttaaaaagaaaaataaaaactttcagctgccaggataatacttatatagttttctactaccttctataaaaatatgttctttgtcttgcttttttgttgttgttgaaaagggcaaaaggaaaaaaaatgacggatgtcaaactcaatgtatatatatgttttggcgaaggtttcagttatattatatgtcagaattgggaatctgactgcctggttttaaagtcctgctctgccactgactagatgtagaacttgaacaagttacttaactgctctgtgcttcattttttttcatctgtaaaaggggacaataacagtagttatctgtaacagcattgagaggatttaattatttcatatatgtaaagggcttagaatcctgcttagtacatagtaagcaaacactatatgaattttaggtaagattttatctaagttagagacattaaagccacattctcttctctaccttcaaccatgatgaggtgtgactttgatcattttaataggttttcttcagatatttttttcagtattctagtatgacacataatagagactatcttttccacaataaaaagggcattcaaacaacgaactgatatctatcagattggtcagcgtaacattggccagtgacgtatatgcctgtgtttgtttaaatgattccatatgaatctcaagtaaaaccattttatcaactaatgtttagatgtttttaacctatagtggggttttaacttacagtggcttgccagagcagattttctaaattctggtacaagataatgcttctattattttttaagataaaaggcctcctctttagacatttatagttatccagtgacatattagatcatgggaacagaaggtctgcatatagtctttattgcatggctagtatctaaccaggtgtcaataaaattaacattggaatagttctgcaaacctattttatttccaaataaccacaccaagaaacataaacccttaaaaaagtgtcagcgagtttccatacaaatattagccatgagacacttgacttttcttctatattattcttctgttcagcttcagatgttacatttgttctaatattattatttataaccttatattagccttacatttctaataaagttaataaattatttcattataatatttgggttgttataaaacatttacaatacagatcaatacagtaaatagtaaaatgaatttttaagacaattaaatttgaaaatatcatgaaattgagaaacaagtacaaaattatacttgtcacaaagtaatgaactctctttttatgagttgcgtaaacaatctctgcaatttcaatcagaattttgcaatttctcttttatttagtattttttaaatccctgctgcaatgcctaatgaactaaatattagattatgtttgtaataacatttgaatttttgcttgctctttccataccaattaatctaatttcactttttctttgtctrtgatacacaaaagaacaacactgaaatgccatgatatttttagagttaatattggggtatgaaaagttgtaaaaggattaatgagtggggaaaagtttctggctaaatgcaatcagtttctgtgcaaacatttacagtctctactgaaataaaattcgtttaattagaccacaaagaaacacgttttcttgaatctgattctatttcaacctgtacacatatctacaccaggaaagttctggaaaaattgtttaattttagaactggtctaatattggttcttcactagtctgaaagttactagattgaagtttgatggtattggctccacaataagcaaaactgatatgcaaagtaatgctatacttctgaagaacagtgaggaaatgacactctcaatttcaatttcaattttaaaagtgagtttaagtgttattttgagatgaaaattaaatgtgtggctttccacttaaaaagatcattgtacttcytgtgaaattccaaggtgaggtgaggtgctgcctggggcttgtactgctacttttragcttaagcatatgatatttttgtggtcatttttatttatctttcagatcagcattttcatgacccatttatcaaactatggaaatgaccgcctagggttatatacctttgtgaacttggtcaactttgtgcagagctggaccaacctgaaattgcaaactctgcctccagtgcaactggcccaccagtattttgagctcttccctgagcagaaagaccctctatggcaggtaacatttaacattctctcttggggtggaaggaaagaaactagcaatttgtgagtgtataatttgtgttaggcactctgctggacatattaaaactggaatttaacacaaaatcctcttttatacaatacttttatcctcttcctcaacaatttttgcttattttatgaattgtttgcattttttgcttgcttttctgggtttttgtttggttggttgcttggttggtttaacatttttgctttgaagatgttgttttattgttggtgtcttctccaagctaatcattttaacttgcatgcagtgtgagcactaactagcagtaaaatggttagacagtagatatctagggaaataaaaacctagagccactggaatctaagatttataattagactttgatatgtatatgtgcaacattgtgtatataagaaaggaaaagcaattttcaccttgtatccatatagagttaacctctcaagcatatcttcacttttctttaaatctaacagatctttcactaatattagacctactgaaaaagagaattgtcagtgttaggattgctttactaataattcaacttcatgtggggccacttagcctggatgcatcaaatgtaaactatctgcttcttggcagttatctaggcaaatgttgcctcccattttcttgcctctttatgcatcagattacatcgacccacaaaatcaataggctggctgcagagagcagatcagatagtcccctgccaagcagtcggctgagaaagtagcatcaccattaatgagaaattactgtgaaacagactttttgtcatcctctctccctctggtcaagactrtttgtttctctttattccataaatcatattacatgccactctgtctacattgtcagaaatacatccaacacatgttcattgtccatctgttatgtgtaaggtaaggctagatgttctagggcatgcaaagaacaaaataaattttttctcaaagccagtggagagatttctcattattcactaacatacatttcaaaaatgtgttttaaaactgactgctacatgtcatattatattctgatgatttattaagcagctttttaccgtttgtgtttacactgaactacattctatttaccatcccaataagttacttgaccatctaccatttgatatgtaatttagaaagacaggtaaatagatagaagcataagtattatgcgcatatatcaacacacaaaatacaattgtataaagacaaagcaagtgtcccacaaatggtgattattcaaaagatctcacatacttttataaaattgataaattattgatggtaaatcaattcttttgtcacaaatgtttatataaaatatatctataatatttatggcacagtaataataaaaatcagacaaattaacaaagattttagacagcttacatagaaagaatccttcaatggcctccagcgctactcttcctctatctgtagaaaaaaggaaaaacttttttttaatgatgaactaaatttcttgatattatttgaaatttttaagataaagaattgtatttattaatatgtttggatatcagtgacacttttcttaaaaaataaatataatcaaagatatgccagctccaatatgatttgggcaacatgatgattctaagtattgattgaatgtttgttaaatatagaatacagtgctggtggattaggggtataaatggaaattagaaattaaaatatgggattattctgtaagaaattacatcattcttggaagatataagaaatatatatatatatatatataatttgcaagtgctgataattttaattttgcataatatcataggggtaagttcctaggaagttcatcataagagagagaataactcagaaaagataacatagagtttacaaattttcatcattgctgttgtttatataagtttaggaattttcatatacattatcaaaatatagttttctgtaagagtacttaaatgatacatgagtaaatgttttcctactgaaagactccctttgctattatgaaattatattatttatatggttacttttcactgaaattttaaagttgcaaacatttttgttaactaaatatcatatattctcaaatatatttaagaagaaaaacaaggaatagaaaatagagtagttaagttaaagggagaattattcagatacatgagattttgacaaaagttgacttactgcagcaaatctgatgaactttgccaaacacatcatgtccaaaagtcttcaagttgtgaagtaacaataaagtgcataatactagttcacttccctggtggttatctcttcttttcatattcatatctataataacacattttaaaatggtaagcattgtcacccttttctctataaaatatgaacttagttttatttaaaaaaccagcgttacttggtaggttttttatggcccattcatcacaatgctagagagttagaatagataaacatggtgtgtttctgttattgttacaaagtgtcaaaataaaatattaaagtactcttttgtatttacaagtgtgacttcttattcagtatatttcatgtttaaaactaagtcaactattatttttctttagattttcaattcacacattcttgttaccacaaataaaagaaaaagtgaaaaatgataatattcacatctatttaatttcctttggttcctcatgtaaagtttcattagcaccaactaccatgtatgtgaagctgctttgtcacctaattaaaaactgcaatatgaatatctgtcaatgggtaccctgataagtagagcacaaaacgcatttgtgctcatctctcactggaaattgattctttcacaggtgattaacatgggaatgtgtactgaggacacatatgaaatgcaatccccagactgtatccttgtcagtttagtccttagtgtgtaagactcttaaaattgtactcactcgtgtacattaattcatgtcctttattattttggtagaataatcactacacagtgtaaaagaatagggtttcttttctttcttttttttttttttataattctcattatgggaaccaaaaccacaatatggaggaagttagaaggtcagattcttacacatgagctaatcgatgcttttaagctctcaaactgtcagcttagctcagttccagtcttcactcagtcactccagagtctcactatcaacaaacatgccaaacatgatgtggattcctgcttttctgtgtgactaggagaatgctcaaagagctgaagtttctctccccatgccaacgtctccagggttaaagaagtgggaaaataaaccacagagcactaaccttaggtggttaatccctttgctgattccagctgtcaagacatccagccccagtttagaaatgatgaaatttgaatagctgtgacataaacaaatcttaagatctagtggcatacacactgtagattctattagtatgtgtctgttgaaggaatgaaggaatactgacacagagaattaaagattgtaagagcagaataagaaattagggacatctagctcaacctattcattgtagagagaaaatggatgacactcagtgtagtgaaatgccttgttctaagtcacatggcttattaggaacaagtcaggactaaagccctaggttttcttactcctcctcaagggtgatttcaaccacaagatggtggttttacaattaaaaaagcaagtatactattatcatcaactctacatcaaatgaaatttcaggggtaactcctcactttagaaggatctgacagtatgttcagtgtgaatttattcaacctatgcttttgaagtacttacataatcaaaagaaaattcttgccttcatggaacttataagccacaataactgcttgttatgtgaacaaaatagtgttacaaatttgtcttcatatttatttctctttttaccaccctacaacttatttataattatattactgcacttaccacacagaattgcagacacttatgcttgtcatatactgattcctgcaaaccttaaagaatgagactttgtttggttcatatttgcaccctggaacctagcatagtacaatagccactctcttcaaaatatcattaaagaataaccaaaagcagagggctgtgtgtacaaagaacaagaaaagtggcacatctgtttctcagatagtaaatagtgatgtaatggtaagtaacctatagaagcaggtacaagtcagtgcgggaagctttgaatgctgccactgtaatttgaatttgataggcaattaggaacaacaagctataggctctgaagttgagagtgaagtgacttaaaaaaatgttggtcaatgaagagtacaccagaagcctttactcaggacaggtaagaatagggaggtgctgaagataggaaaataatctacctatgagagagggaagcccagaagagcttcatggttgtgaaaagcaagaccttcgaagtaggagtgagtgagactgagaataacgaaagagtgatctgtgactaattacccccattgctggggaaataggagttctgtaatagcacttttcactttaattctttcatcttttagtcttttcagtgaaattaagtcagtatagtttttatcatatcacagatgagagaggacagatttcattattatcttaaatattttttcctaatcaaaatttaaatttatattttgccatgttatctttctcctcctaacttagcgatagtatgttatatacctttcaggaatatctcctccaccaaatatggcaataatttctcatgattttgattctttaatttacactgaagcaacattttgattatatgaggctgtcagtcattctgacatccaaaaatgatgacttaagtcttggattgttttccctgttaatcagttgcaaacatgttcttgtcaagggtcaaattccccacacaaaccacttattgaggttcagtcataaaaaaaattacttgcagatagctcccttgaaaataaaataaagtggcaatactttctaaattaaaatcatcataaaatatatttgagcatttaatccaagtataataatgaaaaaggaaactgaattttttgtttgtgccttacagaaacatttgataagttcaatgtcatatatgagtgcataatactgtattagaacaactrattcataagagtttaaaaatacagttcattttattgagttggctttcttttccctgccaggatattcattaaaacacaaataataacataagggactatgttcaaaagtacacagtcattagtttaaaaatagagctggctgggtgcagtggctcactcctataatcccggcactttgggaggccgaggcaggcagatcacaaagtcagcagtttgagactagcctggccaatatggtgaaatcccgtctctactaaaaatacaaaaattagccaggcatggtggtgtgtgcctgcagtcccggctacttgggaggctgaggcaggagaatcacttgactccaggaggcagaggttgcagtgagccgagattgtgccactgcactccagcctgggtgatggagtgagactccgtctcaaaaaaaaaaagaaaaaaaaatgatagcgctacaaagtaaatatgccaccttctcttggggtcarttttactatgagactacctcatgggaaaataccagtagtattaacttacttaaataaacatgagtataatatggtgaagaatagatagacatttagggtaaattagaaacattttgtgtctaaagcagtactcttgaagctgtcaccccagacagacacagaaccatgggctcctttccatccagtcctacccccagaggttggcattataaacctttgaaattcagggtactttgtagcaaagtttgacaaatcagtctattaagtgctacaggagttctgtagtgagtgcatttattatggatcagtgtactcacacgaggaacactttcccaagaagttgagggactgcatggattttacayggggaacaaggagagttcaagccttcataaakatgtctctcagtttttccataaagatttgttgattggagcactgagaataaacacccttaatctattaaacttcctcatcagtgtacatggattgtattaggcttaaatgacattgagagacaaaacttgaaagtcaccaccctgtacaatacaacttggaaagggcattttamagacatacacagagcaagactcaataagcagaaaaaattaagaaacaacacaggccaattggaaaggaaaaatgtgttttaaaagatgccttttatagcattcttctttaaaccgtcaggggaataccaaaagggaaatgaaaagcaaaccaatggcctctgaaatgtttgtaattagtaaaataatccttctatcatgagcactgggcatttttaaagtttcaactattaaggtctagaaatgtcctagttatctagaataggcacgtgacctggatgaggatcatcaatcttgaattgataattccatggtgtccttgccagtgaaggatgtggagaatagtgagcaaagcaaaattttagtagcaaaaaggcaatgtagactttgaataactagatataataagaacaaaagttattttaatgcatcctataaaaatatggaattataataaggtaaatggtatgatattctttcaatctatgttctttttagcttgattgcgaatttgcaatttttacttatttggagggaaatatccaagggtgcttctgcccttgcaaggaacataatttcatcagattttactgccctttctaagtcttgttcattgcttcaggaaatcttctgcctgctttgtttatgtttacttaaaagtaaatttgcctcatatattccacaaatacaaaccatgtgcatcacctgtacctgtgtgacagctgagttacatgtactttcactagactggcactgtagccataaactgcctaaagcaattttaactgaattcctttttcaaagtttaaatatatctatagtgctagatacttaaaccagtaaatatctgttgcagtttcagttatgcagggaacaataagattggagaatgaaaagggaaataattgctttctaattttctgacttaaaaattaaaacaatagaaacagaacaaagtaagaaagtgcaattaaatgcttagcttttttggagggaagatcctttacscttcataatcattgtcaaaaaacttcacatgcacatgtgcgcatgcacacacgcacataatttaactgcagagagaacgccagatttggattctaaatctgaaactaccttgctgtgtgaccttcagcagggcctaaataaaacaccttgcatctcagctttctcagctatcaagaagggataataatatctgtcttgccaggttgctttgaagcttagaaataatctacatcaatcaagtacctggaatatagaaggtgatcaataaaagttagacattatgtttgctggtattcagattttcatacagtataagaaaagtcagagtaggaaaagtctgaacaaacatgttcagaatataaaatagaaaatacaaacatccgttaataaagttttgattaacaggctaaagggaaaacttgccaggaaaagaggtgaaaacagaaatgggcatctggaaatccctaaaatagcataatataaaaggattgcagttacaaaaaaagacaatctgcctatattgaggaacataccgataggaatacctgaaataatgtaaattaagttgttagtaataaaaatatttggaacagcaagtattgtaacagcttagcatcccaacattctgggaaagtataaataaatattaactagtgtcatcctcttccyccaaaaagcatgcttatccatattctctctgtgytggagacaacgacaactcttttcaagtcttatattaaatctgcttatttctgtgaacattttatttcaccagttttgcaagcagaaattagaatgccaaagacatgtgcactgcaataaagaagataagtggccgagttgaacatacagaaccaagaacgagctcacaaataagactttgacattcaacagtggcaatgaattatcaattagtctactcttctacctttgctaagcataaagatatcttcatttgagcaaatgaagtgaacatctactctgagatttgctctgctgggttatgtgtggggaaattcaataagtataggttgagaactgccttcctattgctttgtatctaaaaatgcagtacagaaatgaagttctttataaatagttatatgataatatgagagaaataatgtttaagttctaaagtgatggtgtactcattaactagcttctgggactgccatgaaagacagcattggggattatgtatggtgtgttgtaggagttttagatgctaaatgtctatacaattaacattatgtttgttttcaaacatatatccaaattagtctatgccgattgctaaatgtttactgtgcctgtcctaagtcattctacaaatatttattcagcatttcttaagtattgggttgtagcaataaagaagacagagacctcaccttcagagaacttacattctagttgacatagaattactattaactataactatacttatatatataaacattacaaacatacacacaaagaaaataattttaggtactgacatgtaattaagaaaatatgacaggaaactcagaaagagacaagagtgggaagaagctttgactatcatcatcagggaaggccacttgcatgggttgacatttgtgttgagatctgaatggtaagcggtgctgaaactattggctttatgagttgcaggaaccaggcagcaagtatacacagaaatgtgttaaattaggattatataatggtcttcaggtaatctagtagggcaatctatatcctcaagttggctaaagatactccaagctatttctctacaaagtaactcacagatgccagaagtctagtgatctgactgtgtgaggcaaaacttatcttgtggacagacagtcacacatggtgctggtacattctaatgatggaccaagaagtctctcaagatgaacacctgtagtaaagcaatccatcagtgagatttactctttctcttgctccaattgcctaactaatcttgcctaactaatctggacaaaaagaaaagaagggcaaatgtggaatcaaataataaatactcttacatacagcatgatttaatgattttaaataacatataatgctgtcaacaaccacatgagataaatattaccaaccactattttataaataaggaactgaggtccagataatttaggaaaattgcttaatgcacaggcagtctccctcatgagttcatgctcttaatgactgggctatgctacccctctaaaataaatagggaaggtttatggtagatattagcttaagctagaaatgtaggcaaaattttggggaaaaatatgagcatcacatggagaaataattcaatgattagggtacaaacatgagaatttctacagtagtgaatacagtataactgaagcattaagttgatgttggcaattattaactcagaatagtgctactcaaagtgtggtccattaatagcctgtttgaattatttcgttgctgatttaccatgagacaagaagctggtgccagagtagaaatcaactatatcactaagcataccagttgctttccttgaaattttgtttttatcttgtaacagaatgttctttttgaaacaagcaatgcattgattcacattcttgcacaagctccttatcttctcatagacaagtactttgaaacacaatgagctagagtataggtgatgttgctgtaattaygccattcaaaaatacattggctaaataaaatgaaratgtatttctcactcatgtaactgtccagaagtaagcaggtagtcttggagctgcagacagttccacgccacatgatcacctaggggctcagactgatacgctcttcaatatatggcttccacttgaggtcaagttacatgctgcaatctagccattttacagctggtggtaagttggaaaggagaaatccagggagtgtggctttatttttgaggatacttcatatcattttgtctcactttccattgaactgaaattaatatgaagaaagctacattgaagaaagagtgtgaaatatactctctagctgggaatctgcataataagctaaataggggatgctccattatcgactgaagaagtgaagaatagatagttcagccttctctgccacagtgaaaaatatggttagttgaactaaaactacaccatatgagtatatgagatggaatactaaataaaaagatggcagaaaatggagataccagttaaaacaaaatttcagttatgtgaattaaataaggaatgttgtttactggcttctaattaattccttttatcacagtttccatagatgaatttgtagaaaaatccaggatctgtaacctaattttttccaaggtaaattctaacataatatggttgtcattatacattactgatccctttagattgtacttcagccttgttccaatgagagcagggatagaaatgtatttgagtcaagagtgccttttaattttatagagtatgaatatgaatagccattgccataggtagtgttccctagaagcagaatgtgagatagagattccattgcaaatgatttaagaaatgctttcaggaaaaacctataagggaaactatgaaactgaaaagaygggaaaagagctgacaaggatgtcatctctggtaaagcctagccttacctgatctgcagggagagaactagtcacaggccaattttctcaccttgaggcaagcaggtcagtcttccgtacccctgcatccactggaggtgggctatcccctgagagtgaggaggggatgcagagtttgatttccggtcaggtggcttctattagccggggagaattctcaatcccctagctgggggcaatagcagctggcaaagttcagaggagtggagggtttgctctagtctgaaaagaggatgcattcagtggagaaaagagcwtccaccacactctactctgtacacgctcagtttcatttgttatgttcactccaaccagacacattttttctcatgattctataaacttcctgcctggggaaatttataagaggagaattattttgagaaactataacacaattgctgcttttggtcccaaaggtgaaatcagtgattattttctcccattttgtctcctattctgtatttcccccacctttgtctagcatttttgctggcctagaagaaatactgggtgggtcagatagtcttaggactggaggaagtagcagcagtgatagtttgtctcactgactctcctcttgtaaatttctttaggagaaaagctgtgtttagataaagatgacttaaggagtacactatggtagtctgttctggcacccccatctagcacttatcaggcagtggttgccatactttgccatttacagttataactgggtaaggaagtaccaacaagcaacttagtgaactatttgaatgccaaagatacttctccctgttctcactatatagtagctgttctaattcttcatgtttatgtgggtcaattacccctaccaggatggtaactcatttccatgtctgccaatctactggcacaaaaagtccraagtgaccaggtaggagttttagctttgtgtttggtgagccccttcccatgtctcctggtggaatcttccctgctatgggagctagaattcctagatccaccaaccttaaagttatgaggaaagaaagcacaaattctccaagcatatcattgggaatactggtaagggggtccattcccacatcaactcctggactcaaatacacaactctttggacaaagggtacagtagaggcacctgttggtgatatagtgtattccttaaataaaaactatttgttggactctgcaccaactaatagtttatgatttaatgcgtacactatatcttcaagctggtacctcaactgtatctttcaagtggcctttccatcactctcaggcgagcaacttgtagaaastggggtatgttaataggaccagtgactttcagggccatatgcctactgccatgcttcctttaccagaaagaagtttcccttatcccaagcaatagtatgtaagataacatgtcaatgagccatatactctgtgagccctttcatagtggtgatagccagggctacgtgggcagagaaggagagttaatgtttggaatacatgtcaaacctgatgtaggtgaatcatgcccttttcattatcacagtgtccaatataatcaatgtttcactaagtggcaggataatgctatttctgagatttgaaagtatttgctgttactgtcaggtcagatattcagcactggcagtaactacagaagacataggggaaagaggtccatgcatggctttcacctgtgctgccatggttactctattcatgagccatttgcattagctctgggttagttgacaacagaggttaggcaacacgtaggaatgttgtaacctggctgaatcatactgctctcttggttgtcagggcctcttctacataaaatgctctctggtgtacattaatgtataatacaaagaccatcacacactttggacactatcataggtccatccacatgcctctttcttagaacttcctatcttaattttcctagcttgttccttcaagttgcctgtcctgtccatcctatgccatttattcatctctgctgattagtttgtcatatccttacctttggctataagtctatccacaaagcaaacaaaaagcagatgactaggtacactgcccacaactctgacaactgaaagagttccattaaccagcgatttttagaaacccctctgaatggaactgtagtgccaccaaagtccattttagtcttctactaacatatgggttagcccatctgcaaaccaagcctgggtttctcctctttgtcagcaggttatagaaacccttcacaaaactaaaaatgagctgatggagaagcatcagtgcaacagtgacaggtgacttagaatcatgggccacttatttgtaagtggcccctggatcagcctgacactgatcccagatataccattcccatcttacagtgaattgttgctggacatacctgaatttatgatttgatgggtctatcactattcagttcatggtgggtagttatggccacttgatcacattagtgactaatgacaaacactctcttccatagcactctcttcttggatacagcagtatacaagtgctatggtttgcgtaatatgattcagatagtatgctttgctacagaaccttaaaagtgtacattgtgattcttttcaagtacttgccagatattccacaaggcatccatttatatcattgatgccatagtatcatgaatcttccagcatataaagcccaagtgtgagggtggcttgtacttcagccttacctactgcctacccctttcttgctctaggccccatcctaaacttgaagctatctgtatcactcaataaatgcacagagaaatatttcctagcactgtgctacctcttagcagtaggagttgcaatgtacaacttacactttgctatgaacgggatgtcccagtgtgctcaagatgtccagacccctgaaagcttaaaaggtggcaggctcctaaaactttgtatgcttgtcttccatcctctgaggtgcatgtgttttattaaggcagccagagtaatttccacttatttgtcaggtccaaatatcatgtcaacaatatagtgagccagtgttaggttctgcagaatgccagggtgatactggtccctttagtctatataataacactgggaagaatcggcctaagcatttcttaatggatcttctattttaattggataaaattatattctgtcatagaataaaatgatattgagaagtctatgattttgcagcacctatatttggcaaaatggttaaaagaatcataattagagaaaactcacttgacaagtgttatatttaaaagtatttgtcaaagaaaaacattcttaatggaaaataattgtgaaaatatttggtctctaatatttagacattttcatattaaaaaaattagagctgaaaatttgcttattggccaggcacagtggctcatgctaatcccagcaccttgggagcccaagtccagagaatcacttgaggccagtagttccagaccagcctgagcaacatggcaaaaccccatctctaccaaagaaataaaagattaactgggcatggttgtgcacatctgtagtctcagataatccggaggctgaggtaggagaatcacttgaatctgagaagagaaggttgcagtgagccgagttggcaccactgcactccagcctgggtgacagagcgagactgtgttgaaaaaaaaaaagaaagaaagaaaggaaaggaaggggcttatctcaactctctctccagttaaaaatacagtggcttacagagaagagtaatttgagtgtcaacactttcacatttattaactatgaaatgcaaatttgagaaggattgaagacaattttatagaaaagcaaaacataataatatatcaaaaacgatcattcttcagaactttggtgacatagtattaaagaaagatgtatctaaagaattgattaataccaccaatggcattcttcacagaaatataaaaaataatcctaaaattaacatggaaccacaatggacccagaatagccaaagtcatcctaggcaaaaagtacaaaataggaagaatcacattacttgacttcaaattatactacagagctataggaaccaaaatgcatggtattggcatgcaaatagacacatagaccaatgaaacagaatagagaatccagaaataaacccatacctctacagtgaactcattttcaccaaagatgtcaagaacatacactggggaaaagatagattcttcagtaaccagtactggaaaaactggatagctgcatgcagaagaatgaaactagacccctatctctckccgtacacaaaataaaattaaaatggattaaagacttaaaactaagacctcaaactataaaactactaaaataaaacattggagaaactccccaagacatttagtctgggcaaagatttcttaagcaataccccacaagtccatgccaaagcaaaaatgggcaaatgggatcacatcaagttaaaaggctgcacagcaaaggaaacaataaagtttagagacaacccaaagattgaagtaaaatatttgcaactacccatctgagaatgaatttttaaccagaatatgtaagggattcaaacaactctataggaaaaaaaaaactaataatctgatttaaaaatgggcaaaggatctgaatagacatttctcaaaagaagatatacaaatgccaaattattatatgaaaatgttctcaacatcattgatcatcagagaaatgcaaatcaaaactacaatgagatgccatctcaccccagttaagacatatcttgtccaaaagacaagtaataacaaatgctagttaagatgtagagaaaagggaacacttggacactgttggtgggaatgtaaattagtacaaccactatggaaaacaatatggagtttccacacaaaacgaaaaatagaactaccatgtgattcagcaatctaacatcatgaatattaaaaatattctaaaaaagaaaggaaattggtcgggctcatgcctgtaatcccagcactttgggaggctgaggtggacagatcatgaggtcaggagatagagaccatcctggctaacatagtgaaaccccgtctttactaaaaatacaaaaaattagccgggtgtggtggcacgtgcctgtggtcccagctactcgggaggctggggcaggagaatcgcttgaatttgggaggcgaaggttgcggtgagccgagattgtgccattgcactccagcctgggcaacaagagcaaaactctgtctcaaaaaaaaagaaaggaaatcagtatattgaagagatacctgcactcccacatttatttcagcactattcacaatagccaagatttggaagcaacttaagtatccatcaacagagaaatgaatgaagggaatgtggtacttatacacaatgaagtactattcagccatgaaaaagaatgagattttgtcattttcaacaccatggatgaaacctgaggatattacgttaagtgaaataagccaggcacaaaaaggcaaacttcacatgttctcatgcatttgtgagaacttaaaattaaaacaattgaactcatggagatagagcatataatgatacaatgatgggtaccaggggctgggaagcaaagtggaggtggtaggaatggggatcgttaatgggtgcaaaaatatagttagatcgaatgaataaaatctagtatttaacagcacaacaaggtgactacagtcaacaataatttattttacatttaaaataacaaaagcataaaattagaacacttgtactacaagaaatgataaatgcttgaagtaatggataccccatttaccctgatgtgattattatgtattgtatgcctgtatcaaaatatctgatgtatttcaaaaatgtatatacccactatgtagccataaaattaaaaattaaaaaattaaaaattaagtgaaaaaggaactgattaaagtacagaaatatgaaccataaatgtttttccttcttgtttcattgttaatattgggataataaatataaaaatagaatgttttaatttccaaggtatatgttttttaaaaatacttttacttgtgacaatcatcttgaatataattattgtgtaggtcaccaatataataaaaccaacatggcagtcaataaatatttcaaaaattttatccttttaattttaaaagcccttttaattctcaaaagtgtaatgattttggtaataaattagagtcagccagatagaatgaaataaaaactggcactggaagtgtaggttagatgggcataatattggaccaatggatacattgggtatgttgagtctgaaatttcctcaccgtatctatacaaaaatgatatatttgcaatataaaaccttaagtctagagctcaggagggaggtagaggctggatactgatctagaagctatcagcttataagatgtggccaaaccatgggaatatttgaatcaaaacatgaaatgaaatgaaaaggaaaagttggccaagtctggaattcaaggatagcattccagcctctagggagaaaaaataggaatgattagggagaacacagtaatatgagtaactatgatgaaaccaggttaagtcaagtcctctgatatatagacataaaacataaaccaagaaatagagtagtatcacagggattagagccttgccaaacactgaaagaygataacaacaggaaggacttgatgctgagtcccagccttgagataaggaaggtgtcaataactttatttaaaaaagatttggaaaccagagaamgagagtgaggtctaactccaagttctaaggtattaggccagaatttgattccatcttttgaacaatttttagagaacagagccagrcagtcattacactgtgaggttacttattcttccttcttgcagaatccatgtgatgataaacgacacaaagacatctggtccagagagaaaacttgtgaccacttaccaaaatttctagtaattggtccacaaaaaacaggtaaaaatagccaattgtgctacttatatcctttttaaaaatattttatgaaatacattggtatatggatttatcagattagatttttctttgtgaaatatttagctatccatgcaagtttattatttgaactgcttgtcatctccatgattcgcatttataccatgaacctcaagaggatcttaaagtttcccactaagtagccttaaacactaaattctttatgaactttaaaactgttcaacatacatgccaaatttggacaactttgaacttatgtgtctcagttgttgtacctcatctttaatttttacttttttggctttatttaattaatttctaaagcaatttataaaaacatgttttggcccgattcaaactattttatctggtatatcagcctttgaattgatttttattcagtcactgccatgattactttcaaatattttacatatgtgattccttttaaaaaattaatcattaggtattagcatgatatggacttactttctgaaacacttgaagttcatcaggtattttttccttggtattctctcatgcactgaaggacaactgtataagaatgcagtaaaagagagtgaaagcatttcaccaatgagatgacactttcaattagaatattttatactttcttcagtatgtgacagttttatacactttgctcatgtcctgattaattaaagttttattgagttgctgtattttgaattcactactttgactagaagcattttcatcagtgagtgcacaaaccataacagaaaacaaacagtctcaataaataagcctggcccagatgaaggtatttgtaatacaagtaagtaggtcattttaaaagttgtgggcaaaatttccagactattaaatattggttgttgaaatcttttctttctctaggaatataaattgtattacaacagtaagttaacacatgtgcagggaggggaaagagcaacacatattttcagatagatcacttttgttgttgtttaaaatgtacattaattttctaccaactcccttacagcattgctaactctggagtgactactaaagaaataaaacactcctgtgttgtaaaattgtgttaaaaatctaatagaaagatgtatcccctatcatttgtcattgaatattattatgttttagttctgtgaaaaaattacagcttagtaactataaatctatttttctttcttgttgtttgcattcataaagacattaagctatacgtttagattttcatatttgacctaccagtatggaaatgataaagcatttagctggttttggctttcctaagacaaacaaacaaataagatgttaaaacaaaggaatcagatggtaataatatttcataggctatgaaaatattcttctaatataaaaacggttgtagtaattcttaaaatccaattgtagaagtctgaagtcatagtttgttcttcttattgcttcagttggcaaaacacccagtgctgtcagagactataaattcactgcaggggggtcacaaatacgtgctgccaatcttcccttaaatgcaaacttgtctttcagtgacttaaatgtggtgcatgcatctcttacaagaagcatgaggtacaaaagtggttcccaaactcctatttgctcagtttttgtgaggtgagaatggaaagacgtgatatttcactttgccattgctgaatcccagaagagattcctgtgggctgaaagtcggtcagggaatgaggaaggggagaagagaaataggcagagatgatggacatagacttagagaccttagacttaagggactcaaagttcaaatcatagtcccttgtgagcctttgaacagatattcatccttcatcattcagagtcaaattctggtattgtcaatgtaaaaagaggattctcatagggttacatttagcacaacaattataagagcataactcattggccttagatctttcagaagatcagtgttcacactgtcaatattaatgtctcatgatttgcctggcttacccccgtacattaaaactaaggaggagttgattgtatataaaatagaatagtttctattagtataggattttttcctcttcttccatgaaatatttatattaaagaagttgatataaaaggaaatgaggtaaaagaaattgatagaaaattaatgtcaaggatagatgaaaaatttaggtgataatttttaaaatgtgcattttgaggtaatgggcccagattttatggctgattacatgaatatcaagccacattttttctgtttctagttgagagtgcttgctctctcctccctatcagatgcctcttgatgtcccttaaggtcctggaggcatgaaggtatgtgtgcagaacataaaggctttggctttctgtaggccaggggagatcggggtacgattatgtgaccaacagggtaattaaacatttctacttattactgagtgaggctataaagtgtctatatttagataatcaacaactaaagaatatttttatctgtgccctgcatgcatctaccttcaataccttaggaatattaaactatcaattttctcatttgtgttttgtgtgtctcaaatctatctttctctccaccccccttaagaaagtgttatcttaaaaagtatttttaaaaaaaacttctagatttcatgtttccttccagtttctactctattgctaattcatttccctagaacattttttgtttttgctcttctcacattttctcgtttttaaactcctgttatatttaggagtaaaccatataagctcttgaggatgcccctcgtccctcataactattacatctgtatttttcagtgtggttgagagatttctcctgtctaaactttaagactctaatttagttcttaaccagttctgtctccttcattcttttaatcaagtttgtatrattcgatttcacatttgttattccttaaatctttttaaattagtaattacatatccctagggcatttattaattttgccatcttatttcgcacacagtgtttcattctaggtgttttaacatgtcttccatcaaggtggttggtccccatggatctgttgttacgttcttccctttagctactcattacctcttggtggccatgtaaagctgggaggatctaaaagggcggcaatctcattaatactcaaagtgcagtagcctttgctcatatgagcttaaggtatatgtgaacaaaatgccaattatctgctggccttgtctacttccagatcccatttgcaatgatagttgttctgccagcccacctatgtagcttgtctgcagctctgctagggctaggaaatctaacaactgctgctcactccaatgtatcacagaacagtttaccttttccagaagaaaagtcttgatttatgagagttatgatgacccagtcagttcatgagttctttctgctatagctagctgccagtctccggcctggctctgagggaaataaggttcagagattacatttgagacctctgcaatgtgcacacaggtggtttctatcagccagtctgctctatctagtgctccaattatcagacttgtcatattttgccagagaagtcattgaagcagccatctttcaagagtcctgccttcttctttcaaccttgctgtgtaacacttatgtttttaaggaaaagtattagaatacacttcctcctagaatctgtcactgatttcccaagtctaaatcacccattttctcatatattggaaaggtgctctggtcttctctcattatggcacctgtcccacaacatcacaattacttgtgtacttgtccaagtccacacagggactttaagttcattgagggcagcaaatgtgttttcttaatcaagagttacttccggaccatacacagagtagcacatcaacctctgttaaatagtttgatttcattcatctgaatttcaatgctaattgaagacccaccaggtaagataccatgcctaatgataaagatggagccagaaggacccttgcccttcatgctttagccactcacctgactcctggaggaaagttgagctgcatgacttccgcagtgccacactagctgcatcatcagtctgctttactttggccatgtgctaatattaaatcaggcattctgatcaatagaatcatgaagactaaaaayagaacacttagattgtggctgcatggaatgcatctagttgattttaaggaaatcactttgatactggaaatagttgattattttaatattactttttgagcaaaaatatgctaaaataatattttgtctcttattgccatataaccttttactttctttttttgtaayaggaacaactgcactttatttatttcttcttatgcatccttcaatcatcagcaatctccctagtccaaagacatttgaggaagttcagttctttaatggcaacaactatcacaaaggaatagactggtaagaaaaataacaaaaaataaattccattattaacacaygctcaatcactgcagagcaattacagatgtatgtgtggcatctgcataattacaggataaattcaccacagtgaattagaaattaatttataatgatgatatgtttaatcagtgttgcctataatgtgatttggacagtgcaataatgataatatttttctgctaaattaatatgattgaataaaaaacattatgggatatatttcatcagaattattcataagggtatttaaaattctctttaagcgtagcattatttaactgtgcctaatttttttctcaacacataatttgtcttcgcaacmatgtttcaggcaacaaataaatcagtagtttattttataattcgtgacatgtatcttcattaaccacataaactrtaagttttgttataatgtaggctgatatttgtcatgcaaataataacaggacattttcaaaaccatatcaattctagtcacacacgtacataaaataaatattaagtaacacatgataaattatgaaaaaaataaaatcacagtatttcccctaaactaaaatagaataaacctgatactggaaatgattttcactctggtgattttttctagctctattccaatttttcaagaaaacatggtcctgaatttaatttctagttcacaggtatataaagcaaatctcacctgaggaaaattcccctcaatgcacacatctgcagcatgtaagtttgtgtgtcatcatcatgcatgaacctgtttgcaatgaaagacactttttttttttttttttttttttttttttttttttttttttgagacggagtctcgctctgtcgcccaggctggagtgcagtggcgggatctcggctcactgcaagctccgcctcccgggttcacgccattctcctgcctcagcctcccaagtagctgggactacaggcgcccgccactacgcccggctaattttttgtattttcagtagagacggggtttcaccgttttagccgggatggtctcgatctcctgacctcgtgatccgcccgcctcggcctcccaaagtgctgggattacaggcgtgagccaccgcgcccggccgaaagacacatttttttaaggtacagctaggatcagggttgggcaggtgcaacaccggcgagcagatcaaggttcccattgttgttggagatgtgtcgactctgcatctgggacattatatcctaccttacttttaaaaggctaaataacctttggaattgcatgcaggttattaaaagcagaacggcaattttctctgatctgtgagcccaaatggaacacaaattgtttagcaggaatatagatgagactcttcaccactccgcttttgggaaacataataacaaatgtcaaagagggaaataagtgtcttatatgaattcttaattgctcttattatttatttctagaacatttgagggtgagagaagtgatgagctgtaaggagggttacacacataattaaagacttgcactgaattaacctcagaacatattgattccataatccacacgcagaggaacgttttgacagcatatggaggagggaacctactgaggcaccacaggatcaactggcaggaaatatccccttaattactctagatagactataaagtgttcacatcgctacgtatactacaaattacgaagaaattaagaaggaagagaaccgccatgccctaaaattgttggtgttttatagctattcagactcacacatttttctgtcttgtgaactttaatctcaccgaataatttctgcattcaaatttgcaaacataaatttactattttttaatatcaactaaacaatatagtgtaatttgctatttgccacaggcaaatagtatttctggaattggagttttatagcacagaacatcagcccaaatgtatagtacttttcctttgacccttattggcctacctatttcacctcactccttcccatgcccaaaatgggtcattagaagaggaatattttgggttgacttcacattcaatgtgtatagaatatctattatttaaactataacagcataataatcagaaatagctataartgaatattaaaatgttccaattatttcacattcagaatatggcaagaaaaattattttcagattaattaattgtctttctctgccttcaggtatatggactttttccctacaccatccaatactacaagtgactttctgtttgaaaagagtgctaattacttccattcggaagaagctccaagacgagccgcatctcttgtccccaaagccaagatcatcaccatcctcattgacccctcagacagggcataytcttggtaccaggtatggtcagtaaaaaaatyggctaaaagcattttgttatagcttaaatggaggcaatgaaaaataaccagaatagaacctaaacatatgaaaagtcaaatgtaagaatatctaaacccmcaacccccaccaaaaaatatgagaaatatgagctgtatatttaactcgtaccaagttgggcaaggactttcaggcataaaataattatttaaaaactcacacatcaccaaagaattaatagatttcctaagctatataaacatgtagaatgttgatttatcaaaaattaacaaatttaaaagtcagtttctagagtgacaatacatggtgaatggcatagagctttattttataaaagtttcgtccaagttaataaataagtaaaatatcgcagtagaaaaatgagcaaagtgaagaaaaggcacagctaaacaatcgcacacacaaaaacaacagtccaacaacttatgtgaaaataatcaacccaattggagaccaggtctcactctattacccaggctggcgtgcagtggcgtgatcatagctcactgcagcctctccctcctgggctgaagttatcctcctgcctcagcctcccaagtagctgagactacaggcacacaccaccacacccgcctatttgttttatattttttgtagagatggggtttcaccatgttgcccaggctggtcttgaactcccgggctcgagcaatccaccaacctcagcctcccaaaattttgggactacaagcatgagccaccaagcccagcccattcttttttttagtatcttgacaacaattatgatgtttttctctgctggcaagaaagtgattacaaaggttctcaagtgttccaatagaaggtacacttaagatattttctgaaaactcatttggcaataattacaaaaaaggatgtaaagatcttttagtgatgtgattccccttctgtaattgatcataagggaaacttcaaaaggatggacaaatgtttaggagcattgcagcactatctacaaaaataataacaagaggaaagtgttcattgacatagatttgtgtcatactaaaatggaatattctgcagcaacatttaactgtggttttaattaataaaatagtaattaaaagttgtttgtctaatgtgtagatattaaataatcatagtgatatgtaattaaacattgtgaatgtactgtgaggaagtatgtaaaggttctctgaaagcattgtgtaagaaaataaattaagacctaaaactgaaggacaagtagatattccctgagtgagaatagaagaaaggtggagtagaggatacagtatatgttaaacgcattggatataaagaatcatggcacatttaaagagctagaagaaattccgcgtggctagtgggaaaatcctaggtagagacctataggagttgcagctgagaggcacactagggctagaaccatctggctgctgccatttgttgagcaactgaaagcctttgaaaaacagtagccagtgtgtgactaccagattttcttttacaatacatcacattatctgctatttgaagaaactggaataggacaaatgactctttggagaaatcacacttgaagctattgcaatagacttagtgaggtatggaaatggtgtagacaaaaatggtaagtagaaactgaatgaagaataagtattcagagatatttagacattaaaatcaacagaatttggtgagaacatagtgtcaaggatgaaacaaatttccaatgtgggccctagatgatggccacacattcccatgaaaaaagaatcgctgcagtatacaggagggttggggtggggtgggaggtggggactaaaaaaagtgtggattatgatcatgatgaatgaaacccttcattatcaaaagaacagtgaagtcagctgacactctgggagaagtctgagctagatatttgtgaatcagaggtatgaagccatggccatgtaaatggtgaaatcacctaaggaaagagtttagagatgaaaagtgcagagcgggatgaggcgccaagaaagacaagaaaatatagccaaaatagaagaaaaaaattcaggagtgcagtggcactgattcgaagggaagggagtgctgccagatggaggsgtgacaacaattccaaaagctgctaaaaaatcaaaccattaggcaaagcgaaagatgtggagggaagtggagcccttagcaagacagtaaaaaagagcaaagccagatggattttggtgaaaaaagaagtaattaggggtgaagaaatagaggcagcacttgcgaaagactccaaaagtgtgattttgaaggggtaaaacaggacactggtttattacatagaagtagaagtagaactgagaaaacatgatctgtagtagtgttgatttgataagtcatttccaaagaaaaagagaggttaaaggcccagaagagaaaataggtaaccaactccgcggagatacaggaaagaatggctataggaaatggcttagatggtgggaccaggggcaaccctgcctgcattctgagttcttaacttttcttgtgttgagattcttctagctgtctggtggttcctgtaagtgtttcaaaaatatattttaaaagcctaaaacgaaatatgtatacaaaagaaactgctatgttaatgtgaaatactttttcaatcagtaacaaactttttaattaaatcatcatatgataatttgatgagtctagtactatatcatatgatatatgatatatgatttgatgagtctagtactacatcatatgataatgatgagtctagtactataataactttgaaatagtagtgaccataagcaacattttgatatatctaagacactggtaatgggatataaaataactgatttttattggtggtaaaatcacaatcacagtacaataaatactgtggctgttgtctacatacattccattcagtaattactgaaaacaaagttttttgttgttgttgcttttttgtttttttttaatggagtctcactctgtcgcccaggttggagtgcaatggcgtgatctcggctcactgcaaccttcacctcccaggttcatgccattctcctgcctcagcctcctgagtagctgggactacaggtgcgtgccaccatgcctggctaaattttttttttttttttttttttttttttttttagtagagactggttttcatcgtgttttccccaatctcctgaactcrtgatccgcctgcctcggcctcccaaagtgctgggattacaggcgtgagccaccgcgccctgccacaaaaagtatttttgtcgtttttcttttttttcttttgctgatccgagttcgtagacacactgtattctatcaacaggcctatgtttgagaatccctgggttgaarcttaagggatagaagaggggatgaatgtagacactggtaaatccaaagacctgagatggaaaaattgaagtgactgtgatggtctctccttcctttgagaagcctggaatgagttaatctgatgaaaagagggtgatagtttgaagacacagcagtttgagaagaggaaaaaaagaggatgtgaaatcattatacagtggcgcaataaagctgacaacaaaaatgtaaattcgcctacagcaatgatggcctaatacaagttggtaatcttgaagttatgatggtaacagtgtatatataccaaaatcccaacgatgtgagtgcattttgtgtatgtacgaatttagtgcatatacaaattaataccaaagtaaagaagactaaaagggaatttttgaagggtggagtaggataacaagtaatttcatttttttgcttctttttcttgatttttcaaaatttatttaataaaaaatgtattactgaaaacaaatactgatgtatagaaaaatgtgacattgcaaactggaggtcgagtagttgggatccaaaaaaaacacttagattggaagcaaaatttataaactaccatcagaatttatctaatacacgagtcagtatttcccacaaggtacaagaattatgtctttctcagtttgtgaacactcattgcaaagcaagataaacttattttttcagtataccaaaagcattaaagcatgaagccttaaagttataaatttaagcaattgaggaaaatgttaaacatttccctagcagaaagcatggtcactatctagagcagatttaagtgaatcttttttttccacatagattaaaccagttcaataaaagagaatctttatgatgtgtgtgcctctctgcgcttgctttttcaaataaattctttgaacatacatacaggtttgaaaggaattattttttctgataatactttttattgctgtattgcagtgagcagggccccacactgctccacatttcaaaataatgtagcctattacttagctagtcctgtctattcagtaaataccataaatccaaagctcagcaggcataattcagaaactcctacaaatgtcacctgccgctgtaatttctaccccacatttttataacggacctcgcagaggagctatagtgctgtttttccataaaatatgtccttttgtgacttcatggtcatatttttatgctaatctacttagttgcaggaatataaagaaaagttggtgctaaactggtaaaagtcaayatagaacagattaagcacagtttcatattatcactgcttaaggtagacattttagcattactgtattaaatatgtatgtagtgtgtttcttattcttcattgaaattatataatttctacacattttactaattaaatgagttatataatctatatactcagcataaggtatacacatgtaaaaatatcaataaatatacaacaacaagagaacttcaaaagtgtatgccacttactaattattctttaaccactcatcaattcctaatcatctttacttttctagttatttttatttctaactcacacataagatccatcactcacacataaggccagccattacacagtcatagcacggaccagtatacttccacatttaccctacactagaatttcttcaaattcacttttagaagtttcacaacacttattcccgcatacctcatctatcttagctcaaacttaccttagatgacgaagtcctcttagttttcatatgtgtttggtggttttgtttttctgattatcacaatctttctccttacattttagcttgaaagcttcaaccgttgaaaagtcctttcatgctgcagtcagaattaatcccttactgatctggctgtcacagcaagtaacttctacctctaatcaaatatgtcaaatatacaactttattccaatctattgtctcccacactagatctgatttctttgaaragagtggttatgtcttatatcttttcatctccaggatctatctcagatctttgttctggaaagaagcttaaataatgcttgttaaattgtattgactgttaaatttatctctcactgagctgggccctttcctgtttgaccaatgatagtttggtgtgactcaggatttgatactgaaaagtagaagtgaagcagtattcgtgaattagcaggtttagatagaaaccctttcaaacagaaaggaccttgggtgatgtaatatgaatatgacatctaaacaagcatgagaaatagacagcagctttctctgtacccatagcacctgatacacagggatattggggaaatgtcagaatctgaaggagtggcagtaatggaacagtggcccaagaaacatgtaagactactcttaaaaagattattcttgcaaaatctaaatttttcattagggttgatttgtctggtctctgacatcatctcagtcttaataatatccatgaagaaaatcctcacatcctacctctgccttgcacctaaccactttagacataaatataactacaagtttatgtgtataccacttgatatatagtgaaggcttgtactttaatttactttaaaataagcagtgtgccaatgggtattaccaatgtatacggttgtcattctatttcatttcattagtttattttcattctaaaattaagtatttgatttgttatnnnnnnnnnnnnnnnnnnnnnnnnnnnnnnnnnnnnnntatacataccccaccaaacacacacatgcatgtgctcacccatacacatatgcatatctacacaggcattaaaaaaaatctaactttacaattgactttcttgttaaagcaccaacgatcacatgaagatccagctgctctgaggttcaatttctatgaagttatttcaacaggacattgggctccatctgacttaaaaactttgcagagaagatgcctagtacctggatggtatgcagtccacatagaaagatggctaacttactttgctacttctcaggtaatgtcctgaaattactttcttctgtttattttattataatgtcctgaaattttatattttattataatgtcctgaaattactttcttctgcttatcatgattgtattgcactgacaagcagaaaatgggaattaacattgccasagacagtgatttataatcagagacaatgataagtaaggaagaaatgtgcattttacatttttaattttattaatactattaacatkataaatatctctaaaacacattcttacaatcttcttttgaacagtagctagtttcaaggtgataagttctcatacaggagacatcatgtgatttatgggcaacaactctcaactaccagtacaatagccagttagacaacaactttacgaaacaccacatgcagatacctgcatgttgtttgttctgtatggcccttataaggaaagaaggtcatgcactaggctgccaaatggggagtgttataatggctacaggaacatgagatagatcaagaaataaggatttgaaaaaaggcatccatatatttttttttgtattgatcttcaaaaaaaaaaaaaagttctgggctacatgtgcagaacatgcaggtttgttacataagtatacatgtgccacggtggttcgctccacccatcaatccgtcacctacattaggtatttctcctaatgctatccctcgccttgccccacacccctgacaggccacagtgtgtgatgttcccctccctgtgcctatatgttctcattgttcaactcccacttatgagtgagaacatgcggaatttggttttctgttcctgtgttagtttgctgacaatgatggtttccagcttcatccatgtccctacaaaggacatgaactcatccttttttatrgctgcatagtattccatggtgtatatgtgccatattttctttatccagtctaaaattgatgggcattgggctggttccaagtctttgctattgtgaatagtgctgcaatgaacatacgtgtacatgtgactttatattagaatgatttataatcttttgggtatatacccagtaatgggattgctgggtcaaatggtagctctggctctagatccttgaagaattgccatactgtcttccacaatggttgagctaatttacactcccaccaacaatgtaaaagcattcctatttctccacattctctccagcgtctgttgtttcctgactttctaatgatcaccattctaactggcatgagatggtatctcattgtggttttgatttgcatttctctaatgaacagtgatgataagatttttccatatgtttgttgatcacataaatgtcttcttttgagaagtgtctgttcatatactttgcctacttcttgatgaggttgtttttttcttataaatttgtttaagttccttgtagattctggatattaaccctctgtcagatggattgcaaaaattttctcccattctttaggtagtctgttcactctgatgatagtttcttttgctgtgcagaagctctttagtttaattagatcccatttgctaattttggcttttgttgccattgctttgtgtgttttagtcataaagtctttgcccatgcctatgtcctgaatggtattgcctaggttttcttctaggattttcatggttttaggtcttagacttaaatctttaatccatcttgagttaacttttgtataaagtgtaaggaaggggtccagtttcagctttctggatatggctagccagttttcccaacaccatttagtaaatagggaatcctttcctcattgcttgtttttgtcaggtttgtcaaagatcagatgtttgtagatgtgtggtgttatttctgaggcctctgttgtgtttcattggtctgtatatctgttttggtgccagtaccatgcttgtttggttactgtagccttgtactatagtttgaagtcaggtagcatgacgcctccagctttgttctttttgcttaggattgtcttggctatacgggctctttttttggttccatatgaaacatcaacatcaacataaagtacccccacacaaaaaccccatccaaaggttatcagcctcaaagatcaaaggtagataaatccacgaagatgaggaaaaaccagtgcaaaaatgatgaaaatttcaaaaaccagaatgcctcttctcctccaaatgattgcaactcctctccagcaaaggcacaaaactgaacacaggatgagattgatgaattgacagcagtaggcttcagaaggtggataataacaaactcctctgagctaaaggaacatgttgtaacccaatgcaaggaagctaagcacttggtaaatgttacaggaactgctaactagaataaccagtttagaaaggaacctaaatggcctgatggagctgaaaaacacagcatgagaactttgtgaaacatacacaagtatcaatagccgaatcgatcaagcagaataaaagctatcagagattgaagatcaacttactgaaataaggtatgaagacaagattagagaacaaagaataaaaaggaatgaacaaagcctccaagaaatatgggactatgtgaaaagaccaaagctacaattgattggtgtacttgaatgtgacagggagaatggaaccaagttggaaaacacaattcaggatattatccaggagaacttcccctacctagcaagacaggccaacattcacattcaagaaatacagagatcaccactaagatactccatgagaagaccaaccctaagacacataatcatcagattctccaaggttgaaacgaagaaaamaatgttaagggcagccagagagaaaggtcaggttacctacaaagggaagtccatcagactaacagcagatctctgcagaamccctacaagccagaagagagtgggggccaatattaaacacccttaaagaaaagaattttcaaacagaaaaaagaatttcatatttagccacactaagcttcataagcgaaagagaaatagaattatttacagagaagcaaatgctgagggattttgtcaccaccaggcctgccttacaagagctcctgacagaagcactaaatatggaaaggaaaaaacctgcaycaaccctgcaaaaacacatcaaaatataaagactgatgacactatgaagaaattgtattaagtaatgtacaaaataaccagctagcatcatgataacagaatcaaattcatacataacaatattaaccttaaatgtaaatgggttaaatgccccaattcaaagacacagattggcaaatcagatacatattcaaggcccactggtatgctgtattcaggagacccatctcacgtgcgaagacgcacataggctcaaaataaaggaatggaggaatattacaaagcaagtggaaagaaaaaaaaatgcagaggttgcaatcctagtctctgataaagcagactttaaactaacaaagatccaaaaagacaaagaagggcattaaataacagtaaagggatcaacgcaacaagaagatctaactatcttaaatatatatgcaccaaatacaggtgcacccagattcatataacaagttcttaaacacctacaaagagacttagactcccacacaataatggtgggaamctttaacaccccactgtcgataytagaacaatgacagaaaattaacaaggatatccaggaattgaactcagctctggactaaatggaactaatagacatctacagaactctccactccaaatcaacagaatatacattcttctccacaccacacagcatgtattctaaaattgaccacgtaatgggaagtamaacactcttcagcaaatgcaaaagaatggaaatcataacaaacagtctctcagaccacagtgcaatcaaattagaactcaggattaagaaactcactcaaaaccgcacaactacacggaaactgagcaacctgctcctggrtgactactgggtaaataacaaaattaaagcagaaataaagaagttctttgaaataaatgaaaataaagagacaacataccagaatcactgggacacaggtaaagcagtcttaagagagaaatttataccactaaatgacaacagaaagctggaaagatctaaaatcaacactctaacatcataattaaaagaactagagaagcaagagcaaacaaattcaaaagctagcagaagacaagaaataactaaaattagaaaattagagcagaactgaaggagatagacatgaaaaacctttcaaaaaatccatgaatccaagagctggttttttgaaaagattaagaaaatatatggaccactagctagctagactaatgaagaagaaaagagagaagaatcgaatagacacaatcaaaagtgataaaggagatattaccattgatcccacagaaatacaaactgtcatcagagaatactataaacacctctatgcaaataaactagaaaatctagaagaaatggataaattactggacacatacaccttcccaagactaaaccaggaagaagtcaaatccctgaatagaccgataacaagttctaaatttgaggcagtaattaatagcctaccaccaaaaacacaggatcagactgcttcacagccgaattctaccagagttacaaagagggactcctccctaactcattttataaggccagcatcatcctgatatcaaaacctggcagagacttaacaaaaaaagcataactttaatattctrtcttccagctcagggcaaattgaagccctagtagctgggccttaccattgacctttttccagtattccttttttttttttttttttttttgagatggagtctcgctccatcacccaggctggagtgcagtggcacgatcttggctcactgcaaccttggcctcctgggttcaagcaatgctcctgtctcagcctcccatgtagctgggactacaggagcctgccaccatgactggctaatttttgtatttttagtagagacagggtttcaccttgtgggtcaggctggtctcgaactcctgacctcaggtgatccacccacctcagcctcacacagtgctgggattacaggtgtgagccactgcgcccggccttttccagtattcctttgacaattatgatattctagggcagtgatccaatgatcagtaaggcatggacaaacatttccctcctccctctgtcttgtttgtttaagattagatgggtgattttcatttggatgaccactatttctgagccctaagctccagggttagctaataggaatttggtaggctggataattatctgatcacacaacaaatggaaaattatgtttctactgaagcactaaatcaagaaagtgtctatgtttacttctgatttacaaaaagcaagttaagggctataacttgataattcacaagaaatgatgcctatggcaaactttattgtttatgtggaaggatgcaagaataataaacattcggatgtattctaagtagggcatatttgcttcctattcacactgatctaatttatgaatgtcacaccaggtaaaggaaggcatcacagtctattcaatttaatttttttcttcataaagtgactatttctgactttacagttgctaattattgatggacagcagctgagatctgacccagctactgtgatggatgaagtccagaagtttctgggagttacacctcgttataattactctgaagcactaacgtgagtctattgtcatgcttgatttcatttccattatttgmcatcataaattatcactggtaggtgtgtatataacatcattaatactagctagaatttatacatcctatgctacctacaagcaatcaaaggaatatcctcatcaatcatgtagtgtttctcttttaaatatgagaaatactttattttrtaaagtatatgttatattattgcaaattcttctttttgtgagttttccctgttatcagtttgattaagtaaattttttatatgcctacctgtgcagaaagtgtcctagaaatttagtttacaaaggtgaaaaagatattgtctcctctttcaagaaatttacaggttagaaatgaaatgcaatatgtaggacagaattgggaaatgagtatattcatgttttattatgtatttattaaattatttataaccaaatataatcatgtatactgttccagctatttattgttgcatgacaaaccatcccaaagcctagtggcttataatgaccattattttattatgctcatggaatctgtgggtcaggaattagacaggatacagaaggatggcttgtcttcgctcatgatgtttagagccacagcctggaagacttgaatatctggctttgactcagatgactgggacctgaaatcatctggagtctcctttactcacgtctctgaatcctggactggcatggctcaaaggctgagatcagtgggttgaagactctccatgaggcctcctggatgacttggctttctcaccttgtggtggctgtgttccaagagggagcaataagtcaagggagcatgtggtccaagacagccaagtccttctctgacctggacctgccagtcacacagtataacttaggctacattctacttgttacaatagtcactaaagccagtccaaatccaaggggagaaaaacaagactgcacctcttggtggggtgggacagcatcaccagtgggaatgaatgtgggatgggagatatgattgctgtcatcttgggaaaataaaaccatatatttttataattaaaaatggggagaaatgtaaaagaagcagaataacaaacaaaaacaagtagccaaaatataccttaaaagggattgtactttattcataaaagcctctcccacaaggtctgatacaaaacctgtgaaattttgacaaaattctaacaagcacaattatgtaatttcccagttcgcagcagattagaaccagcaattagacaattagagaggctaacagaggaacaggaaaagcagtaataagattgggttgttccttatccactaaaacaaccttaatgaagtttttacctacacatggaaataacaacaacacaaggcctattcctgttaattaagtaaacgaagcttcctataatatgtttgtattaatagttactgatgttggctttcttttcctgcctctcagccgtagttgaggtaatgtttctatcctgtttatgaaaaatagttgcttatggttcaataaacctgtaaaattacacttttgaaggagagattacaaacaagtacaaaatatgtcgtttttaatatgtctcacacatcacaaaaattaataactatagtgatgttcagtagaataaaaaaaactcaaaccacaaccaactcatgtactaaaagttgcctaacagttatattgaggcaggctttgcatcttaatttcacaatttcatgcctactaaagtaaaaccacaaagcaatgaattgatataacttagagaggataaatgtcctttgttagacttaaggcatatgaagttgccaatgcaataratgaaaccaggacagcaaaatcatgtagattcaaggttatgacaaccctatctaaaaaaaatgactttcggtattctggagggctctcctttctctgattgtattaagctgtgccttacaacagctgctgtggataacaaggagagaccacagcccatcctgagacctcggcattacctgagagcaaaggagatgctctcagcatgtrtataaatatgttgactttgctgccagggctgtattttaccttaatgcagttaaatattctcatcctgaggcagaaaacaatgtttaggggcactgttatgccaacttcatctcattttatacagcatgctgaattgtttttcctcttgggaaattaatgaaaacaggagaaaggattgtgacaggcaaagagcagattgaaaagtccaggttggaggccgggcgcggtggctcacgcctgtaatcccagcactttgggaggccgaggcgggtggatcatgaggtcaggagatcgagaccatcctggctaacaaggtgaaaccccgtctctactaaaaatacaaaaaattagccgggcgccgtggcgggcgcctgtagtcccaggtactcgggaggctgaggcaggagaatggcgtgaacccgggaagcggagcttgcagtgagccgagattgcgccactgcagtccgcagtccggcctgggcgacagagcgagactccgtctcaaaaaaaaaaagaaaagtccaggttggaaatgactctttcttttatccatttaactagtgatgtatttaattttaatttacaacatgtactaggacaacttggactgcaaggttcaggtctctaataataggttgggcagagaactgtgaagaaaacttccctctccccctaaatgaattcacatatgtacagaagcaaattgcaggtgcaccagtattataggaatgggcccagggcaacaaaatattctgcaactaattaactttatatcccagtcaattatgcttcatccttctaaannnnnnnnnnnnnnnnnnnncttccgtttttcctctcctgttagtcctaaacaaaattcttacatatttgacttttaaaaacaaattaggccacacatcctttcttttataactcagtgcagctatgtgagcaaaacgacattagagttttctgtaagaatataggtacctgaattatctaacagattatctgccttcaacaagagaaataagaggttgtctaatcttccactttatttttacacttctaatttgttttttgaaaagagtaagcattttgaactgtaaaaaatgcaataatttctgaacagaaagctttawttcatgtttatattcacagaagtatacctacattacattcaacccctttaatatataccagtgaatgatttcaaataagtctgttaacatatctttgaaatcacatccataagtaaataaagtatcctaaagttcctttatatattggctgtaatttcagttattggtctttgatcttttatggatgcataggtaagctaaggaacttaagttaaaaatgttcatgtaaaagtaaactaaagatctatttcttttttcagtatagtatagctacttaaaatatataataacatatagcttctttcatctcagttagcctctctcaaatcagctaaataaatatctgtaaaaatgaattaaattaaatcagtgggcatacaaaaatacatttcctttattcaattggtgaggctgtctcackgaaaattctgcatacaatttgtaatcattatrttttatgtactgtaggtttgatccccaaaagggtttttggtgtcaattactggaaggaggaaagacaaaatgccttggaaaaagcaaaggccgaaaatatccacctatggatccagaggtaataattttttaatctttgaattactctagcaaaaatatttgcaaacagctatttcaaaactagtaacaagaaatttgcttcctttttctgctcttcctttkcaattaataattttatatacttagaggatgatagagataattgacacatagaaatgatagatagatagagatcggtagatagatactaaaattaatatacattcctagaaattatttgctgtttgaatgcaattcaaaaataaatatttactaaaaaatgactcatttccaaatgcttaaagcacttaaatagtttactaaacaagtgattttggataaaatattcaagtatcattattatatattcaatacagatattcaaggcctacattacaggtggaagtgggctaagcaatggaaagaatacaaagataaaacagttgtgagctcagatttattacaggataaattagttatatccactgatttgtattagggacataaaaacgtaaaacaatgacaaacgaaaccagaaaacggcaggaaaatatttcaatagaagtgaggatatgagaagaaatgtcttatctggtagaacaggcttggaaaaccagccagcaattggctcagccaggtatcatacatatttctcttatggcaaggtgggcaaagggggatgcaggtgattcatgggttactatggaaatagatatactagaaggtccttaagctacatttttgaactcaataacttcaaaagggtttcagaaatcactttaatccaccaagaaataaatgtaatgttcccactactactataaacatcttatccgaaatgtgaagtgtttacaatctggtttaagggaagaaacataatgaaatacctggtgaacgttccaagatgaaatgtagttgtcttaaatccatttccacagtatacacaaaagttgctaagggagttttatgtggtaaaagaccatttgtgttgaaatattkaggagggcttaagagagatggtggatcttggaccaaatggaaaacaatgaaggaggcattgttacctatgccagcaacaggaaaagtgttcrtctccaattttatcaaagagatggaamtctgccaattgggttataatataggtgatatccagaaagaaagtccaattagaaatgtcctgttttccagaaatctgtgtagatgaaagataaatataaaactaaaaccattcatattttttttagcatttctctaataacggcccatctctgcaacatgattagaaatataagaattgcaaaaaggatcaggcttcagagaccttataatattttggaaaccaaaagctcttagtgactaaaaaaatatatttcagctctgagtaaatgtataaaaattttgcataatattgcaagttattatttgtaatagtgaattttagtttttatgattatgctcacattcaatttttatcttacaggccaattttcaaaaaaaaatgtatgtacatttatctagcttacctccataaatttcattcctcatgcagtccctatctcatttatctctagtattacactcctgtcatcgttttttctttctgtgtagacttcatatatcccacaataaatatgtgccgtaatgacagatacgccatataggatatacttggtcctatttctatttttagctacacctttgccaaatattttcaaaaggtaaaaataactgatatttgaggaaaaatacaagaaatataatatgttgtagacacgtatactgtagtagatatattccttaagaaatatagattacaatatcctgtttgatgaaacaaagagcttctttcaagttcttctttttttctttccagtctagaacgttcctctctaattactaccgagatcataatgtggaactatccaaactgctacacagactgggacagcctctgccatcrtggctgagacaggaactgcagaaagtgagatagcactggagacaagaactaagcctctcaagatacttttagtgttaaaaaaaaaataaatccacctttattctcaagcacttgtgattgtcaacaaagaactgtgtgaataaatttccttcagcctttttcataaaatgaaaactgttatatatgcacgcattgacaattactagcaccaatccctgtgtaagcttttgggagattatgtgggggtttgtggcattatccagtttctagtgtatagatcatagcacagcccagttcctatgttaagcataaggtttcagatactctatgtacgactgataatctggattatatacaagtgagcagttaaaattttaaggaaaaaccaagtaaatgaggttagtcgtaactcaatatttgaattaagggctaacattttccccttgagaatttaaaaacaattttgcttttattatgagagggaattatgtaaccccatactcttatttgtgagtaattactctttattatatcagcccacatattttctttctgcaatgactcctctttactaatttcttgacttgctaaagaagttgtgaagttatagctccccatgttttttgtttgttttcctcctgtaagaggggactacgtgaaagcttccatattcactgatattattttatctggcagcacatgcctttcccagtgaatttgtcattttgattccagcaaaatctgttaaagtttttagggaagaaaaagagtatgaagctgcataataccactattaagtctaaggccatctttaagtcggtcccgaatcttactatactaataatctagatatttccaccttgacaacgatatagtatttatatatttttcactatctgagatagaaataaagctttattgataaaatatggaatgaaaacaccaaggtgtgtttgcatatatagtgaggcagtgtgccttctacatagtatatgttaatctttttaaagcatggatttttcatatatgccagtatgtctactattgtagaagattatgtttttaatgcctattaaaaaaataagtataatccaaatcttacctcttcaaacatcactaattctctaacctaaacccaatttctcagccacgccacccaaatgttaatttctggagaagtggtgttctttctgtcttagagttataggttcttttcttatttagaggttattgtaaggctagttggatttttatctcatttgtcaatgatggcatattaatattttgttaaacttttcagtaatacatgaaggtaaaatttcaacagaacagtaaatcaaactgactttggtaacattacccaacaacctattcttcctccagagtaattttcctattggctgtagaaaatactactttttcttgtaatttgagaaattatgcttgcaataatataatagcaaatcaaagatctgtatttttctgtatgttagtttgttgttgatttttaagcaaacacatcaaatttatgtgtcctaattggggtattcagcatccaactttacatttatacttcattaagattgtttgttttcctgttgtttctcagcaaaaggatattgaccttattcaaaaaatgtaaggcttttcatggacatgagtataaatcacatatacttttgttgtccctttctgttaactatgaggctcaattatccatcttattgttgcgtaagtgagtgtgtgcttcacagcattttattacacacactaaaatcacagtaactgcatgtacagctcgaacctttgatttattcattagtttcctccaatttatattataaatctttctttttaaaaatagtgattaactttttttcaagtgggataaaagtaatatttatagaacagagggaaacttttttacatctcaagtacaatctatgtaactcaaggttttccaacccatcacctggcatttaaaagtgtaactcattttatgccattttcattgttttctaaataatttatacagtatcagttagctgtctacagatatctgggagcaaaattttccccaaactcaactactcttttcaatctggttacttcagtcaatgtgaacatatttctcattaaggttgataatgaagacaacaaaataaattttaattgtataatttatcttcatcttacaataaactactaagaggaactctgggctctgagattataataaatcaggaaaaatttaatatttaagaatatcttgctttttccaatttttacccactggctattttagaattattgactcaagattttaatacatttaattctttaaaatgttaaataaatttgatctcatggtcttaaataatatatgttttagtagtcatgaaatttatttaagctatccataaataaaaaagtgattacaatgaatttacagaaatggaaaattttagttcttaggctaaattcaggctgtttgcttaaactttcttttaatttctaccaatgaatatgaagcatcacaaaccgtaggcaaagcaattaagtagagtagtatattaatctcccaaataaggtgtcaaactaactttcagtggtatctattcaatagtcagtataaatacagagacagtgtcttgacaaaagccacaataataacagcatggtgggccataaagcaaaagaagtttctcaataaatatttctgaaaagggatagatacctcttcgctgtgaaataaccataccttagaatcctatactctctcttcaccactttgaatgacgtactttctttaaaaattctaaagcaagctagtttctctcctttcttttttttttataatccagttgcctaattcacagatataatcattgatgacctcacatttataaaggcaaaaacaatatttgatcattgtctttatcaaaatgtgtatgcttatcaagtaacagtctctaaaaattatattacaaaactcgccccaaaccaaattttgtttgtatttaacaatggcccaaagagaattaaataaacaacaagaaagaatgctagtgagaaaaatttatactctttttatcacatttttttctagaaaaatagcttttagtccaatacgagattttgtagccttcaattttaacaaacctatccatttaccctgtgtagtttttgttattctgtctcactgttttaatataatgtgacacatttaccatgagtactgctttatttttaattacagaaaacacaaaaaatttataggaggaaagatatcttaaaagctcagtttctggtggctagaaaacttaattgtttccttgatggaagtacctcaaaaataatgctggcccattattccaaaaagaaaaaaaatctattagtcttgcaagcagaattttctttcaacaataagaacacagcttagctatggacacacacacacacacacacacacacacacacacacactcattatatgtgtataatgcaaatgtatatgcatatatgtggtgtctgagaaacttcaactagttttttgtctcccaaattatattttctgtgtcagccagtgaggtggctgggaaaagcagggagagagttctgtatttactgaaattgttaaaaaaaaaaaaaaaaactgatgtagtacatgcatagcatatcattggctctcacttcctcagaataaatactactgctggtatggtcactagagtcatgttgtttctcctctgaaatccaaggctttaatcaatagttgattctttatcttttcttttatctttcttcactgtatacatactccctgaattttaaacccttaacaagtataaccacaaggttatgagaactgaattctcatctcagttctccctcttactagctgctagctgtgtggcctcggacagtttgtggaacttttctaagccagttagtaaaaaatagacaatagctactcattgggttttcataggcattaattgaaaatacatttaaataacttagcacaatgctgatgcagttgtgtgggaacatgttaattacaacaatatgtaaaatttgaatcattctctcttcatttatcgaaaagaatatgttttttctactccttttaaaataaaacatataaatcttaaacatataattatatgtggtcaaaatgggaaactgtcttcctcatcactatcaaaaaataaattttgtgcttttccttgytatttttctgataacattgacagcaaagtagtgccgtctcagtccattctactgaagtctctttccttttcctcctatctattcctttgtcagtctattcagcagaatatctcccttgtaccttctctttatattgctctcttaaatttctttgcaacgtaacacatattctatcaaaaatatcagatctagagctgcaacttcctcaaaccaaagtcacaaaatttaatggcagcatatgtatcatatggagacatatatataataaaagcatatataataaagaattagttctataaaattacaagaaactttttcagaattctccacaagtctttatctctaatgtcaccttcttctagaaagattttgccacaaataaaaactatttattatatttaaatgtattttctattacatttattaatatcaaacactgttgtttcctgcatttttttttttttttggagacagtctcactctgtcacccaggctggagtgcggttgtgccatcttggctgactacaacctctgcctcctgggttcaagcgattctcgtgcctcagcctcccgaatagctaggattataggcatctgccaccacccctggctaatttttgtacttttagtagagacagggtttcaccatgttagccaggctggtctcaaactcctgacctcaggtgatccacccacctcagcctcccaaagtgctggggttacaggcatgagccacagctgcccagcctgttttctgcatttttaaaactgcaaatacacaacattttatgcctgaaataagatatttatatgttattaatttccattcaaaaacttttattgtttttctaatgcctaaaatctcatatatcaccaaagcctggcacatagtaggtagccactaaaggttaattaacttttagttaattaattaacactcaagtgtgttcagcagtactaatttacttaacccttttatgtattttaatatgtaccacccaccttttcagtttgctctacattctagctctagaaattttatccatgactttagatgccagaagtaacaactccaaaatctgtatcttcagcaccaaccttcctcaggaattccagacctagtatccaccttacactgttcatcttcaactaaatatccgcctgacatctcaaatgaggacatccaaaatcatcacgcaagtaaagtttctgctcctctatctttttgtctttttaatgactatacccaaccagaccaacattttagtcctttctagaaatctctctcttccatacacccaagttatgctgcatctcttcctgaatccatttcactaaaccagagtctcagagtacaaatataacatgagtcacaaatggaagccatgtatataatttttagttttccagtaaccactttagaagactataaaaatgaaaattattttaatattttattcaacaacaacatatgtaaaatataccaacctgcaattattataaagatgtttactgagatatttatattattgtgttcatagtcttcaaaatccagtttgtattatactcttatggcacataaaaattaggacttgccacatttcaagcatttaatagtcacatgtggctaaaagctactagacagaacagctctgagctctactctccacgtgtacttgttatgaggtcctcttttcaccccattggtgagagagggattcctaccctggggttataaaaaaatggctgaacacacaacactcaacacaagacagatgagatcaactgtacacacagcccagagaggaggacatcccatgccatgcagccccatggggctt

SEQ ID NO: 93855 - DNA, 14939 bp, Homo sapiens
  misc_feature (1)...(14939): n = A,T,C or G
tggaggtcccctgaaggcccacaaggccatcctggggcttcccatggcccctaccctgtccttcccctgggggttctttggtgggtctgggccccaggaatgggtcagaacggcggccacgcatcggggcccagcagagaccccaggagccctgggaccccaaccctgacagaaaccctcacccgcagctctgcccagagagcagatggcgcccggcccccttcccctggccacgcaggtgcaacctgagggcagacactcagccgtgtgcagcgcctccagggagctcacatgtgacctgggcagcgctcagagcacctactcgtgggccaggcaagggcaggtgccacggggacccgggaggaccccaggctgactgggagaagccagaccccacctgcagtcaaaaacaccacccgagccaccccaaggagagcatccgccgccaggctagccagtggcacccctgccccatctcccctgcgtccctctgtggctgggggtggaaggggaagtggcaggcaaggctcgagggtcccaggcgggtgggagggcgaagggagagctggtctgggtgcctgcactgagcccagcgcccaggatgcagtcccagtgtcccctaagacccctcccaccccctttcccatctacaaagctctgcacacatcgcccaggtgagcagatgaagcctattcaagaagaaatcaaaaacctcacaaggccaccgagggtcaggaggagcggggttgggggggggtgggggcggggagctgggcttgcttctgttgccaagttcaagattcacactgggttgcccagacgcagtcaggggcccgggcaaggcacagtgtcagagctcagtcggggagggtccttcaacaccccagtcggggtgttctgggaccctgtctccaaagtccagcccctccccacgggagctccaattagatactcaggtgtggtgtcaaagtgtccgctggcaaggcccctgggctggcaaagtgagacccagaggcaagcccactgctgcccaccacaaccatccagcccagccgggccctgacatacctgggctggccacaggaaagagaccaggcggtgctcagggtccctgaaggctgaccagtgggcaggcaggtggtgggtgcgaccaaggaagccccaagctctgcaaaaggaaagatgggcagagtggagccctggcttccaccctcagctgtacagccagagatgctcccagagaagggcagggaacccccacctggggccaggtccctacagggcagaggggcagtcggggtgggcaggggatacaccaccagactcggagaagaagaccactgaggagtagccccaaccaggaaagctctgaatcaatgactgagtcaccaaattctgctccttcagggctctgagacagccaggcagggacacagactcacactcacagagacacggtgtgcagagaacacatgttcaaagacgtactcacagcacggacatgcagagacacaggccaagacacatgcttgcacccacacagacacgcagcagtgcctcctccctggggtcctggacccctggaccagcctgctgtctgcttcctaccaggcacaagcaccctaccccaccctgccttgggctctgagcagacacccaggctcaggaaggggcctcacgccctccctatggagctgccagcaatgacccgcaaggccctcctccaccatgggtgccaggctggggagtctgtcctcctcctggcactcagggatttctggccagggagaggccccaaacccacctgggyagccaaacgcagtgcccactactccctgccctgctggctcaaccccgcaacacctcgcccctcagaactagctctctggagtgaggtaactgtccttccagtagcccaagggcaggagggaaccatagagcctccaccccaaccctggctgagcgagagccccaaaagagacatccagagctctgcaggttggaaaagccctggggactgagctgcaaggagatctcagacacccacaaggccagacggaggtccaacccaaagaggggcctgcccacatgataaagcagcctgtctgcagcagcctgggtgccatgcccgtggagcagcctctctgagccccagcagcagggcagcagctcagtcctggcccagcccagacctcggggtctccacacagctcagcaggggcagctcaggacagacagcagagccaagcccacacaccctggccccccaggcccacgggctctgaggcagctttgaggaggtagggaggcccgccaacacaaacagcctatgctgtgggcttcctggctgcctcagcccctgcggggccccagtgcccgtcccaagccctcaccctggggggtcccaagcaagctggcactccctcatgcacacagaggagcagggactgggggctacatacagagtctgggtgggaccaggcccctcccacccaaacctgagccctggaggctggagacaccactctgatacccccagcagccccaggggagggacagatagtccagaggtcccccaatctttcctcctgggaccaccgaggctaaccccacactccaggccttccctgtaatcctttcctgcactgttgggtatttatctgctgggagtcgggggtgaaggcaacagacttaggaccctgggtggggggcaccttcccacaccccccaggctccaggagcagccgcacctcaggtgccatcccaccacagccctggccctggcccctgcaacctagacccctatagaacagtctgggggggcacatcaggcctgggcagctgcatggcaggcagtgacattcccaaatatcaccagccccgacatatgagtggtgaggctagggtcagttcagtctcggccccatctacaggccccaccgctcacagcgccggtctcccaggaccgtagagaggacccggccccatctacaggccccaccgctcacaacgccggtctcccaggaccgtagagaggacacggacggcgtgggtacagtgggcagtggccttggctgtgtgcaccgctgaggtgtcgggcacgtgtgctcgtggcgccgtgtgcacccaccccatcccacagcaccctgggggtgagcacacatctgtcccaggcatggacagggccagagagcacaggtgtgggggcgaggctggggacagacaccttcaacaccctctcccagtcaaggtcatgcccagcctcagcggcaggagggatgcagccctccgggcgggcagtttctgatcccacctgagctttacagacagggaaacgtgggctgggatcccagaccagagtgcaagttcagctgaatcccagccagggctcagcccgtactccccctcccagccctcctggtcccgtggctggcctgtttccagggcaacacccagggtgggaggggtcagcagctaaaacttcaatcatgggtttcccctggtcgtttgccctgaagtgatccctcctctagcaggaagcagccgggggagcccaccctctgctccctgtgccctgccctgaccacaggaggctccacaacgcccccttctataaaaccagcgcctcaccctcctggccccatcccagacccccccccccagaagccaggccgagtctgcgccaacactccacacccaggagagaggggcccccacccgcccctgctggcgggcacagtgccctgccccgccaccaggctccctcccacccccgcttgcctgaggagggccaggcccaggctccccagggtcctcaggtagagcccagtcgggactgaggacaggcctgggcccccaggggcctccgcacatatgtggtnnnnnnnnnnnnnnnnnnnnnnnnnnnnnnnnnnnnnnnnnnnnnnnnnnnnnnnnnnnnnnnnnnnnnnnnnnnnnnnnnnnnnnnnnnnnnnnnnnnnnnnnnnnnnnnnnnnnnnnnnnnnnnnnnnnnnnnnnnnnnnnnnnnnnnnnnnnnnnnnnnnnnnnnnnnnnnnnnnnnnnnnnnnnnnnnnnnnnnnnnnnnnnnnnnnnnnnnnnnnnnnnnnnnnnnnnnnnnnnnnnnnnnnnnnnnnnnnnnnnnnnnnnnnnnnnnnnnnnnnnnnnnnnnnnnnnnnnnnnnnnnnnnnnnnnnnnnnnnnnnnnnnnnnnnnnnnnnnnnnnnnnnnnnnnnnnnnnnnnnnnnnnnnnnnnnnnnnnnnnnnnnnnnnnnnnnnnnnnnnnnnnnnnnnnnnnnnnnnnnnnnnnnnnnnnnnnnnnnnnnnnnnnnnnnnnnnnnnnnnnnnnnnnnnnnnnnnnnnnnnnnnnnnnnnnnnnnnnnnnnnnnnnnnnnnnnnnnnnnnnnnnnnnnnnnnnnnnnnnnnnnnnnnnnnnnnnnnnnnnnnnnnnnnnnnnnnnnnnnnnnnnnnnnnnnnnnnnnnnnnnnnnnnnnnnnnnnnnnnnnnnnnnnnnnnnnnnnnnnnnnnnnnnnnnnnnnnnnnnnnnnnnnnnnnnnnnnnnnnnnnnnnnnnnnnnnnnnnnnnnnnnnnnnnnnnnnnnnnnnnnnnnnnnnnnnnnnnnnnnnnnnnnnnnnnnnnnnnnnnnnnnnnnnnnnnnnnnnnnnnnnnnnnnnnnnnnnnnnnnnnnnnnnnnnnnnnnnnnnnnnnnnnnnnnnnnnnnnnnnnnnnnnnnnnnnnnnnnnnnnnnnnnnnnnnnnnnnnnnnnnnnnnnnnnnnnnnnnnnnnnnnnnnnnnnnnnnnnnnnnnnnnnnnnnnnnnnnnnnnnnnnnnnnnnnnnnnnnnnnnnnnnnnnnnctgatgcctggaacccaacacaggtcccaccccagccagtaagccccaggccggcaaaccagcccagagccccccatgggtgccgctttgcggcccacccacccccacagcccacctcgcacctccaaggaaccttctttgcctctcactgccctcgcacctccaaggagccttctttgcctctcactgcacaccgaccccccatttcctcacccccaccccaggggcacagcaagaagggtgctggtgccagcccccccgcactccatccgagagacacgggctcctcgtccctcgtcgtccgtaggccctgagctccagggcaagccagagctgaggccttcagggggtcctgccagtgcagcctccgggagtctgcccagggatcccctgtgccggggtcttccaggttcagctcaaagagcacctcttccacgactccctccccgacctccctcccgggtcccctctccccgtgctcagaggcgcgtctgagcgtcgggagctcgggacggcgagcagccagcagagccgggacccgggagggcgcaccccgaccccattcccgggaaagagcggaaagaacgcggacaggagcccggggcggggagctgccggcgggggctgtaattgcgcagctgaggccagggcggcgcccctaggggctgggccgcgtccagaatgggacccccgaactcagcgccgagagccccggacaccccgcgggcagaggccgaggcggaggaacccactactcggcgcggccaggaggggcggcaggaagacccgccccggcccccgcccgccctctccccgagcccccgcgccggaccccacttgttgctgcgtgtcggctctgggctcgaactcgcgcgccccgctcgcgtccggctccagccgctcccggtcggacacctccggccacgggaccctggccgcacgcccccacaagccccaggcgcagtacctgcgccgccgcctcccgctcgcgccgcccgctcccgccgcgcagctgtcagtcaagcggacacgagaaacgcgaaccgccgccgcagctttacggccctgctcagacgccgtagcgccgggatgcaccaagacggtgggygggggtgtgcggtctgctgctgccgcggccgcgcgggcccgggagccccgggacgcacaggcccaggagccccgggacgcacgggaagccccyatcgcggcggaaactgcggccagcggtgccggggccggtggagggacggccrgarcagcggagaacgagcggagccgattctcccgcaacagtggacgcgcccggggcggggcctgggggggttcttcgcgtgcggcccggccgggccgggcagtctgggacgcgccgccgccatgatcatccctgtacgctgcttcacttgtggcaagatcgtcggcaacaagtgggaggcttacctggggctgctgcaggccgagtacaccgaggggtgaggcgcgggccggggctaggggctgagtccgccgtggggcgcgggccggggctgggggctgagtccgccctggggtgcgcgccggggcgggaggcgcagcgctgcctgaggccagcgccccatgagcagcttcaggcccggcttctccagccccgctctgtgatctgctttcgggagaaccttatcccctgaagtctggggaagagaacggagttgggcttcaaaccagtggtgtcctggggattctaggtggcctggcgggtcgcaggcgtcttgtcacccgcagtaaagcccttggcctccgccctattcccgtctctgcccccaggcccaccccatgtcctgcaaacctcgctgcaggacgggcgggcgcggcggctgacatctgtaatcccagcagtttgggaggccgaggcgagaggcttgcttgagcccaggaggtcgagaccagcctggacaacctggggagaccctgatctccagaaatttattttattttatttttcttttttgagacggagtctcgctccgtcgcccaggttggagtgcagtggcgcgatctcggctcactgcaacccccgcctcctgggctccagcaattctcctgtctcagcctcccgagtagctgggactacaggcgtgtgccagcacgcccggctaatttttgtattttcagtagagatgggatttcgccatgttggccaggctggtctggaactcctgacctcaggtgatccacccgcctcgacctcccaaagtgctgaggttacaggcgtgagccaccgcgcctggctctatctttttaattcgccggacatggcggtgcacacctgtggtcccagctacttgggaggctgagacgagaaaatcgcttgagtctgggaggcaggttggaggttgcagtgagccaagatcacgccactgcactccagcctggaagagagagtgaaactccgtctcacgcacacacacacacagaaaaagaaatgcagggtagacttgctgaccaccctcatcaggctttgtaggggaggcgtctttctcctgtgcttgtcccttggtgctgctgtcaccacggtgcctgagtcttggtgcccccgctggagtctgaccctcgcccactgagtcttcgtcacatgtgaagccctgggcttgtgtgcgccagcctgccatcggcacttggtgcagcttgctggacaaacgaggaaagcgagtgggctgctagactgagtggctggcggcctgtccagaccctttccccggataggaacggcaggggcctcccatgtggcctcccctttcccaagcttctgtgtctctgcacattggagccatcggtgtgggagttttctggaggtcttgagggtgactggagctaggtcccagggaaatgaaagcttctaattggcttgggaagtgggagaggtggctccgtggagaagcagtctctctctgatggaaggaagcagaggtgaggaaagaccccacagcggcagagcagggcttgctctggctggggtgggggtgaaccagctaagggcaggcccctggagagctaccctgccgtggccagtgctggatgaggtggctgcacatcagcaccttggtggtcttggttttctaagctccccgcaattacttcgttttcatttcatttacatttcttacatatgttatacacacacacgtacagccagagtaggtgggagaggaggctcctcacgctccacccagggttctgggcatttccaggttactccagccaggatcattctgctagatctcagcttctgagccgggtgaatctcttcgccttgccggtggcgggggggtgaggccagcaggcagtgagaggcaggttggatgtgggctccaggcctttgcagaccgtagagaactcagttggcctctgctcctcccctcgacacagggaygcgctggatgccctgggcctgaagcgctactgctgccgccggatgctgctggcccacgtggacctgatcgagaagctgctcaattatgcacccctggagaagtgaccamkctgraacccacccacmcgctgtgctgaccatgggccctgagcgtcctrccccgaattcacgaggctgaggcatccgggagctggcgtaatgcctggccgcagtgtgtgtgtatccsataccccactctggaaggaaccatccagtaaaggtctttcagaaccactaaggtcccagccctcactaggatgtcaggagccaggtctaggcccagctttcacactgtggcagcccagtgaagcagactgggccatgaactctcctagccctggggccagcctgttccacaggcacccctgcaggaggcgctgccaggagagccttccatctcgggkctctttgaggttccctccttctgggtgttcttcaggctgagcagagaggctcctgtaccctctctctcggaatctgaagagccagatttaggccgggcaaaggggctcacccctataatcccaggactttgggaggccaaggcaggaggatcacttgagtccagaaattcaagacccgcctgggcatcataatgagaccccatctctacaacaaaatttaataaattagctgggcacagtgttcacacctgtagtcccggccactcagggggctgaggcaggaggatcactggaacctgggaggttgccactgcagtgaactgtgtttgcaccactgcactccagcctgggcaacagagtgagactctgtctcaacacaactatgaaaaagaagagagaaacagatcttctggggcccagtctctgctgtggtcagggctgccagtacctgctggcctctgcccactgctgcctgtccctgagcgtcccacccaagcccagcagggagggcaggccttaagacgctcctagctgggttgggaggtggccctaaggaggccctgctgtccaggcagtgctgccagcaagcaccccaggtcagatgtccctgctgcccagatatctggcgtggtgtcctctggtaggggagaacgggtctgcctgagggtctacagttctgagccttaaggacaggaacctgggcagtggggggcacaatcagtgaccgagccctggctcccatctccagggtacctctgccagacaccaggctctggtacctcctaccctctggcccccagcagggcctataggctcctccatgtaaaccccctcaccctactgcccccagcccacctgcctgacacctcttacctgggcatggcccccagtctgcacccttcccacgtttgctccccaccatggccagaagggttttggaaagcatttttcctctcctccaggggctctgaacacaccatctcaccatttaggaacatgttcagttctttctgctgaggcctgtgctcagctgtccctggcatcagacctcccttccctggagccccatggggggtgtgtcctcctggctctgcccttctttgtcctgacactgggcggggcgggggtgggtctgtctgccctgctggatgcgagggccctgagaacagaccaccatctgttaccagcacagcgagctcgtccatctgctctacaagtgtttattgagcacctgtatgtggcagggatggttgtaggcatctgggtacagcagtgtacaaaaccaggaaggccctgccccgcagaggcacatgaacagggcagtgcayagtgaccacgtggcatttcgggtggtggtgactgcggtggggaagacagcaggggcgctgtcgagggagacgacggctgggttgggaggggcagaggcccaggcccaagggtcaragctcacctggcttccccaactgggatggggccatgtggctgcaaggcaaagccccagttcctgaagggcctggggtgtgaagggtttctccccctgctgggaacgctcggccttgcgccactcagcaaggccccttccaacctgcatctgaccaccaggcagagagtatgtccggggagccccacaaaacaccccccaaacttcgccccgccagcccccctcacctcccctgctgggcattggtgcgcagcaaaaggcacttgaagctgcctctgaggttggggtccccagaggttatggtgatggcacagggtgggtgtcatcagggagcccagcccctggtactcagtggtctcagctcagtagttgggtgcagcagcagcaaggcccaaggcagggtcagtagtgctccagcttgagactcctgtacaggcagcacgtgaagatcatgccaaagacctgtgtgcagagccgggtgggcataagcagacgtcatggggccaccagccaccgccctgccccgtgtccccaacaagatgaccgccacccccatgtgccctcacctgcacacaggcaatgccgatccccacagccccaatgaccctcaggtgctcctggatgaaggtctccaacttggtgatgcagccgccctgcggggcgcggatgggtgttgaaggcgggcccagggggcacctcccactggcccctactgcctccagcctccagggtgtggccaaacccacccctagcacctaggcagccaggccaccaacagctcagccagccactgggctgcccacccacttcctcgtagatattggaggtgtggtctcactgcccacatccggccactggggtgaccccccacctcctggtagatattggaggcgtgtcccactgcccacagccagtcactggggtgccccccmccacctcgtagacactggaggcatgatcccgctgcacacccacctccaccttgtagatgttggaggcatggtctcgctgyccacaaagagccaccaccgtcttgcagcagctgtctgggaccacacggccaccggcctcctgtgagcggatccactcactgtctcgccagtcctgtgagttgttgctgccacagcagtggaactgcatcaagaacaaggctggggttgagacctggggccagaggctcctgcagaggtccagggaggccctggggatgcacgcgccctcccagcaccacccacccacctcctgctgcagctggtccacagcgctggtcacagcctcatggcccggctggtggtagcgcttggtcatggtgtccttcaggttctccttgagctccgtgttcagctggggttggggtgcaggaaacttcagcctcagtctaagaccttccaaggtggggctggcagagccccaggatggccggtggggaggcccggggcccagctcagagccacagggaagggctgaggtcagacctcggcatgaggggaggttgggtggtgccaggaccgtcaccagggtgacaatgaagtgcggcagaggcagagagagcttctggatcccctggacacctgcctgaccccatgtgcccctgcagagacctagaccccatctccagggccgagtggcacattggttagctctgggaccatgggggtgggggttggggctagccacgcgtgtgcatgtgtgtgtgtccgccccgcctgtgcatgtctgtgtctctgaatggcctgcccaggcccctcacctgctggtagtaggcgtaggcgaggataccagcgatgatctccagcagaaagatgatgaggagcaggatgaagtactggggggggcagcacaagggcacccttgttctgaggcctagtgcctagacctagtgcacctcagagcagagtccccaccccggctccccaggctccaggtgggggctgaggggcggccaccctccctgaagctttcttgcggagctggtgtcttccctcagctggtccagcaggaacgtggggacccacaggactaggcaggtgtggaaggaccgtgacccccccccaggtgagcacagcaaggcacaggttcaaagcctgcagcgacaacctccttgggcccatctgcaccacccccaccccgtggccctgcgccctcctgaccaggcgcagcaggttccgacgctccttgaaggtggcgcagcagcccaagaccccagtcaccatgacgacagtgcccgccaccaccaggatgtaggctgtggccaggtaggtgcctgaggccagcaggctgatgtagtcactcttgagggccagcgtccagatgcccactgccatgacagccaggccagccagctacaagcagtacacaaaggtcaccgcatctgcccaggtctgatggtggcccgggaggggtgggggtgggggtgggggcaaggcgacccctcctcacccagaagcagcaattgtaggtaaacagcaggtacttgaggcaaacggtgccacatgttgtcttcttctcgttgaactcacccatcctggggctgaggaggcaggggaggggtcagcggggccacagcaccaggcccctgactgggggacggataggaggggacacagggccaggcgcggtggctcacgcctgtaatcccagcactttggggggccaaggcaggcagatcacaaggtcaggagatcaagaccatcctggctaacacggtgaaaccccatctgtactagaaatacaaaaaattagccgggcgtggtggcgggcgcctgtagtcccagctacttgggaggctgaggcaggagaatggcgtgaacccgggaggcggagcttgcagtgagccgagatggtgccactgcactccagcctgggcgacagagtgagactccatctcaaaataaataaataaataataaaaagagactagcaaattaacccaaagaaagtagaggaaaggagtccaggtgcggtgtctcacgcctataatgccagcactttgggaggccaaggcaggtgcaatcacttgaggtcgggagttcacaaccagcctggccattgtggtgaaaccccatctccatcaaaaatatacaaaaattaactgggcgtgatggtgggcgcctgtggtcccagctacttgggaggctgaggcaggagaatggcatgaacccgggaggcggagcttgcagtgagccaagatggtgccactgcactccaggctgggcgacagtgagactccatctcaataaaaaagaaaaaaaagaggggacacagatacccaagccagcccagaagtcggggcagagccagccactgtcctgggaggcctgtgaatgagcccctgtgggaacaggacgtgtcacttcctagcgactcaggagccctgacagccaggacagacccctggtgcccacagacaggacaggggtcatggaggacctcccgccatcactgctgactcacccctgctggcggccgggggaggaagccctagcgggtacctccggtgagctcatgccagcctgcccgctccccacagcattcccggggccgcacgtcacaggctggcaggagcctatgggcctgcagtaagggcggaggaggccactcagacagcagaggggtaggggctcagacaggccccagctcagccccttcctaagctctccaggcctgtttacggtctgttaaagggcagcccttccttcatcctggccggggtggggagaatggagcgtggaggcaggtggagcctggcagactgggagggtttttcctggacaggcgacccacaccaacccgagggggcagcacagacaggctatgcccctccccagatgccccgtgcccgcccgacctgcagcagtgggcaagctgtgagcatggggaagccagggagggcgtggggtgcagacagctgagcgccctgggccacgtttccagacagcacagccaggtctggactttcgccgccccgcctgctctgccccaccctggccagcactcaccagccgggctggaaacgactcctctgcaggacaggtggacagaagctccccaggactctaggctagaggggcaaggacatgtcaggtcacaggttacaggtctggcccaagggccagagtgggccgggttcattctggaggcagagagaggagtggccaagcccggtattttagtctgggctagggtggggcaaggcacaagacattttgtttttttctttttttctttttttgagatggagtttcgctctgtcacccaggctggagtgcaatggcacgatctcagctcactgcaacctccgcctcctgagttcaagcaattctcctgcctcagcctcctgagtcactgggattacaggcgcccaccaccacgcccagctaatgtttgtatttttagtacagacagagtttcaccatgtggaccaggctggtctcgaactcctgaccttagatgttccacccgccttggcctcccaaggcagatgacatttcgagacagtctgatcctgggagggacctcataccttcccccaggtgccccactcttggccttcgctccagacccatcactggcccttcccccacaaacagcggcagctacagcctgggaaagaggaatcatggaatggagctggagggggacagaccttaccactgagctgagaggggatattcaccctccatgaaggagccggggcctaaatacacgcaggaagggttgcacaggcagaccctgccaccagcggggggatnnnnnnnnnnnnnnnnnnnnnnnnnnnnnnnnnnnnnnnnnnnnnnnnn

SEQ ID NO: 93856 - DNA, 16586 bp, Homo sapiens
  misc_feature (1)...(16586): n = A,T,C or G
nnnnnnnnnnnnnnnnnnnnnnnnnnnnnnnnnnnnnnnnnnnnnnnnnnnnnnnnnnnnnnnnnnnnnnnnnnnnnnnnnnnnnnnnnnnnnnnnnnnnnnnnnnnnnnnnnnnnnnnnnnnnnnnnnnnnnnnnnnnnnnnnnnnnnnnnnnnnnnnnnnnnnnnnnnnnnnnnnnnnnnnnnnnnnnnnnnnnnnnnnnnnnnnnnnnnnnnnnnnnnnnnnnnnnnnnnnnnnnnnnnnnnnnnnnnnnnnnnnnnnnnnnnnnnnnnnnnnnnnnnnnnnnnnnnnnnnnnnnnnnnnnnnnnnnnnnnnnnnnnnnnnnnnnnnnnnnnnnnnnnnnnnnnnnnnnnnnnnnnnnnnnnnnnnnnnnnnnnnnnnnnnnnnnnnnnnnnnnnnnnnnnnnnnnnnnnnnnnnnnnnnnnnnnnnnnnnnnnnnnnnnnnnnnnnnnnnnnnnnnnnnnnnnnnnnnnnnnnnnnnnnnnnnnnnnnnnnnnnnnnnnnnnnnnnnnnnnnnnnnnnnnnnnnnnnnnnnnnnnnnnnnnnnnnnnnnnnnnnnnnnnnnnnnnnnnnnnnnnnnnnnnnnnnnnnnnnnnnnnnnnnnnnnnnnnnnnnnnnnnnnnnnnnnnnnnnnnnnnnnnnnnnnnnnnnnnnnnnnnnnnnnnnnnnnnnnnnnnnnnnnnnnnnnnnnnnnnnnnnnnnnnnnnnnnnnnnnnnnnnnnnnnnnnnnnnnnnnnnnnnnnnnnnnnnnnnnnnnnnnnnnnnnnnnnnnnnnnnnnnnnnnnnnnnnnnnnnnnnnnnnnnnnnnnnnnnnnnnnnnnnnnnnnnnnnnnnnnnnnnnnnnnnnnnnnnnnnnnnnnnnnnnnnnnnnnnnnnnnnnnnnnnnnnnnnnnnnnnnnnnnnnnnnnnnnnnnnnnnnnnnnnnnnnnnnnnnnnnnnnnnnnnnnnnnnnnnnnnnnnnnnnnnnnnnnnnnnnnnnnnnnnnnnnnnnnnnnnnnnnnnnnnnnnnnnnnnnnnnnnnnnnnnnnnnnnnnnnnnnnnnnnnnnnnnnnnnnnnnnnnnnnnnnnnnnnnnnnnnnnnnnnnnnnnnnnnnnnnnnnnnnnnnnnnnnnnnnnnnnnnnnnnnnnnnnnnnnnnnnnnnnnnnnnnnnnnnnnnnnnnnnnnnnnnnnnnnnnnnnnnnnnnnnnnnnnnnnnnnnnnnnnnnnnnnnnnnnnnnnnnnnnnnnnnnnnnnnnnnnnnnnnnnnnnnnnnnnnnnnnnnnnnnnnnnnnnnnnnnnnnnnnnnnnnnnnnnnnnnnnnnnnnnnnnnnnnnnnnnnnnnnnnnnnnnnnnnnnnnnnnnnnnnnnnnnnnnnnnnnnnnnnnnnnnnnnnnnnnnnnnnnnnnnnnnnnnnnnnnnnnnnnnnnnnnnnnnnnnnnnnnnnnnnnnnnnnnnnnnnnnnnnnnnnnnnnnnnnnnnnnnnnnnnnnnnnnnnnnnnnnnnnnnnnnnnnnnnnnnnnnnnnnnnnnnnnnnnnnnnnnnnnnnnnnnnnnnnnnnnnnnnnnnnnnnnnnnnnnnnnnnnnnnnnnnnnnnnnnnnnnnnnnnnnnnnnnnnnnnnnnnnnnnnnnnnnnnnnnnnnnnnnnnnnnnnnnnnnnnnnnnnnnnnnnnnnnnnnnnnnnnnnnnnnnnnnnnnnnnnnnnnnnnnnnnnnnnnnnnnnnnnnnnnnnnnnnnnnnnnnnnnnnnnnnnnnnnnnnnnnnnnnnnnnnnnnnnnnnnnnnnnnnnnnnnnnnnnnnnnnnnnnnnnnnnnnnnnnnnnnnnnnnnnnnnnnnnnnnnnnnnnnnnnnnnnnnnnnnnnnnnnnnnnnnnnnnnnnnnnnnnnnnnnnnnnnnnnnnnnnnnnnnnnnnnnnnnnnnnnnnnnnnnnnnnnnnnnnnnnnnnnnnnnnnnnnnnnnnnnnnnnnnnnnnnnnnnnnnnnnnnnnnnnnnnnnnnnnnnnnnnnnnnnnnnnnnnnnnnnnnnnnnnnnnnnnnnnnnnnnnnnnnnnnnnnnnnnnnnnnnnnnnnnnnnnnnnnnnnnnnnnnnnnnnnnnnnnnnnnnnnnnnnnnnnnnnnnnnnnnnnnnnnnnnnnnnnnnnnnnnnnnnnnnnnnnnnnnnnnnnnnnnnnnnnnnnnnnnnnnnnnnnnnnnnnnnnnnnnnnnnnnnnnnnnnnnnnnnnnnnnnnnnnnnnnnnnnnnnnnnnnnnnnnnnnnnnnnnnnnnnnnnnnnnnnnnnnnnnnnnnnnnnnnnnnnnnnnnnnnnnnnnnnnnnnnnnnnnnnnnnnnnnnnnnnnnnnnnnnnnnnnnnnnnnnnnnnnnnnnnnnnnnnnnnnnnnnnnnnnnnnnnnnnnnnnnnnnnnnnnnnnnnnnnnnnnnnnnnnnnnnnnnnnnnnnnnnnnnnnnnnnnnnnnnnnnnnnnnnnnnnnnnnnnnnnnnnnnnnnnnnnnnnnnnnnnnnnnnnnnnnnnnnnnnnnnnnnnnnnnnnnnnnnnnnnnnnnnnnnnnnnnnnnnnnnnnnnnnnnnnnnnnnnnnnnnnnnnnnnnnnnnnnnnnnnnnnnnnnnnnnnnnnnnnnnnnnnnnnnnnnnnnnnnnnnnnnnnnnnnnnnnnnnnnnnnnnnnnnnnnnnnnnnnnnnnnnnnnnnnnnnnnnnnnnnnnnnnnnnnnnnnnnnnnnnnnnnnnnnnnnnnnnnnnnnnnnnnnnnnnnnnnnnnnnnnnnnnnnnnnnnnnnnnnnnnnnnnnnnnnnnnnnnnnnnnnnnnnnnnnnnnnnnnnnnnnnnnnnnnnnnnnnnnnnnnnnnnnnnnnnnnnnnnnnnnnnnnnnnnnnnnnnnnnnnnnnnnnnnnnnnnnnnnnnnnnnnnnnnnnnnnnnnnnnnnnnnnnnnnnnnnnnnnnnnnnnnnnnnnnnnnnnnnnnnnnnnnnnnnnnnnnnnnnnnnnnnnnnnnnnnnnnnnnnnnnnnnnnnnnnnnnnnnnnnnnnnnnnnnnnnnnnnnnnnnnnnnnnnnnnnnnnnnnnnnnnnnnnnnnnnnnnnnnnnnnnnnnnnnnnnnnnnnnnnnnnnnnnnnnnnnnnnnnnnnnnnnnnnnnnnnnnnnnnnnnnnnnnnnnnnnnnnnnnnnnnnnnnnnnnnnnnnnnnnnnnnnnnnnnnnnnnnnnnnnnnnnnnnnnnnnnnnnnnnnnnnnnnnnnnnnnnnnnnnnnnnnnnnnnnnnnnnnnnnnnnnnnnnnnnnnnnnnnnnnnnnnnnnnnnnnnnnnnnnnnnnnnnnnnnnnnnnnnnnnnnnnnnnnnnnnnnnnnnnnnnnnnnnnnnnnnnnnnnnnnnnnnnnnnnnnnnnnnnnnnnnnnnnnnnnnnnnnnnnnnnnnnnnnnnnnnnnnnnnnnnnnnnnnnnnnnnnnnnnnnnnnnnnnnnnnnnnnnnnnnnnnnnnnnnnnnnnnnnnnnnnnnnnnnnnnnnnnnnnnnnnnnnnnnnnnnnnnnnnnnnnnnnnnnnnnnnnnnnnnnnnnnnnnnnnnnnnnnnnnnnnnnnnnnnnnnnnnnnnnnnnnnnnnnnnnnnnnnnnnnnnnnnnnnnnnnnnnnnnnnnnnnnnnnnnnnnnnnnnnnnnnnnnnnnnnnnnnnnnnnnnnnnnnnnnnnnnnnnnnnnnnnnnnnnnnnnnnnnnnnnnnnnnnnnnnnnnnnnnnnnnnnnnnnnnnnnnnnnnnnnnnnnnnnnnnnnnnnnnnnnnnnnnnnnnnnnnnnnnnnnnnnnnnnnnnnnnnnnnnnnnnnnnnnnnnnnnnnnnnnnnnnnnnnnnnnnnnnnnnnnnnnnnnnnnnnnnnnnnnnnnnnnnnnnnnnnnnnnnnnnnnnntgactgcaccatcctttcagaccaccactacctatccaaccccatcacaccctcagaccacacttcccactcacattccacctttctccacctccttggtgactccaagtactcacaaggtcatcacccctacccatgcacagatgtccacttctgcctccatccactcaacgccaacaggcaccattcctccactaacaacgctcaaggtcacagggtccacccacacagccccaccaatcacagtgaccaccagtgggaccagcccatccgcaagctcatttagcacaggcaaaacctctacatccttacattcacacacttcctccacacactatcctgaagtcaccccaacttctaccaccaccatcacccccaaccacaccagtacaggcaccagaacccctgtggcccacaccacctcggccaccagcagcaggctacccatacccttcaccacacattccccacctacagggagcagtcccatctcttccacaggtcctatgactgcaacatcctttcagaccaccactacctatccaaccccatcacaccctcagaccacacttcccactcaccttccacctttctccacctccttggtgactccaagtactcacacagtcatcatcactacccacacacagatggccacttctgcctccatccactcaacgccaacaggcaccgttcctccaccaacaacgctcaaggccacagggtccacccacacagcgccaacaatgacgccgaccaccagcgggacgagccaagccctgagctcattcaacacagccaaaacctctacatccctacattcacaaacttcctccacacaccttcctgaagtcaccccaacttctaccgccatcacccccaatcccaccagtccaggaaccggcacccctgtggcccacaccacctcagccaccagcagcaggctaaccacacccttcaccacacactcctcacctacagggagcagtcccttctcttccacaggtcctatgactgcaacatccttccagaccaccactacctatccaaccccatcacaccctcagaccacacttcccactcacgttccacctttctccacctctttggtgactccaagtactcacacagtcatcacccctacccatgcacagatggccacttctgcctccatccactcaatgccaacaggcacgattcctccaccgacaacgctcaaggccacagggtccacccacacagcgccaacaatgacgctgaccaccagcgggaccagccaagccctgagctcattaaacacagccaaaacctctacatccctacattcacacacttcctccacacaccatgctgaagccacctcaacttctaccaccaacatcacccccaaccccaccagtacaggaaccccaccaatgacagtgaccaccagtgggaccagccaatcccgaagctcatttagcacggccaaaacctctacatccctacattcacacacttcctccacacaccatcctgaagtcacctcaacttctaccaccagcatcacccccaaccacaccagtacaggcaccagaacccctgtggcccacaccacgtcggccaccagcagcaggctacccacacccttcaccacacactccccacctacagggaccactcccatctcttccacaggtcctgtcactgcaacatccttccagaccaccactacctatccaaccccatcacaccctcacaccacacttcccactcacgttccatctttctccacctccttggtgactccaagtactcacacagtcatcacccctacccacgcacagatgaccacttctgcctccatccactcaatgccaacaggcaccattcctccaccgacaacgctgaaggccacagggtccacccacacagccccaccaatgatgccaaccaccagtgggaccagccaagcctcaagctcattcaacacagccaaaacctctacatccctacattcacacacttcctccacacaccatcctgaagtcaccccaacttctatcaccaacatcaccctcaaccccaccagtataggaacctggacacccgtggcccacaccacctcagccaccagcagcaggctaaccacacccttcaccacacactccccacctacagggaccactcccatctcttccacaggtcctgtcactgcaacatccttccatgccaccactacctatccaacaccatcacaccctcagaccacacttcccactcacgttccatctttctccacctccttggtgactccaagtactcacatagtcatcacccctacccacgcacagatggccacttctgcctccatccactcaatgccaacaggcaccattcctccaccgaccacgatcaaggccacagggtccacccacacagccccaccaatgacaccgaccaccagtgggaccagccaatccccaagctcatttagcacggccaaaacttctacatccctaccttaccacacttcctcaacacaccatcctgaagtcaccccaacttctaccaccaacatcacccccaaacacaccagtacaggcaccagaacccctgtggcccacaccacctcggccagcagcagcaggctacccacacccttcaccacacactccccacctacagggagcagtcccttctcttccacaggtcctatgactgcaacatccttccagaccaccactacctatccaaccccatcacaccctcagaccacacttcccactcacgttccacctttctccacctccttggtgactccaagtactcacacagtcatcatcactacccacacacagatggccacttctgcctccatccactcaacgccaacaggcaccgttcctccaccaacaacgctcaaggccacagggtccacccacacagccccaccaatgacagtgaccaccagtgggaccagccaaacccacagctcattcagcacagctacagcctcttcttccttcatatcctcctcgtcttggctgcctcagaactctagctcaaggccaccgtcatcacctatcaccacacaactcccccacttgagttctgcaaccactcctgtttccacaactaatcagctgtcctcctcattttctcccagtccttctgccccctctactgtttcttcttatgtgccctcctcccactcctctccccagacttcatcgccttctgttggcacatcttcctctttcgtgtccgcccccgtgcactccacaaccctgagctcggggtcacactcctcattgtccactcatcccacgactgcatcagtgtctgcatctcctctttttccttcttctccagctgcctctactaccattagggccactctcccccacactatctcctctcctttcaccctctctgctctactccccatatccactgttaccgtgtctcccaccccatccagccacctagcctccagcaccattgcatttccgtccacgcccaggaccacggccagcacccacaccgcccctgccttctcctctcagtccaccacctcgcggtccacttctctcaccacccgagttcccacatcaggctttgtgtcactcacctcgggggtgacgggtatccccacctctccagtcaccaaccttaccaccaggcaccctggtcccaccttgtcgcctaccacacggttcctgaccagctccctcactgcccatggaagcacccctgcttctgccccggtatcttctctcgggacacctacgcccacctcacccggtaagtggcatctckgtggcccttctcctggcctcacctctgtgctcatgactcccaggcagcccctgcctcagcttacccytcatggtcctgtgatcccaggaccacacgcctgttccctgccttccctacacacctgccaggcgtttccactctcctctcctgggcaccctctatgccaacgctgtcctggccaagcaagtgcctggcctccccgttgggccttgttccccagctaaccttgacctttccctgcactggctcactcatgcccggtcactgctgcactcctggcctcccctcagagtgttacctgccaaaagccttccctggctgcccctttggttgctcagaggatgtcagggctggcccaaccccagggttcaagcagcacagcccttcctccaagtgcagagagagacacaaaagtctggcacatcccctgcctcgccccaaaggacctgttgaaggtggagctggacctggcaaccagggcacctgctccttcgtgctcatgccaattctctgggccacggctcttcccggcccatgcctgtgarcgagtccactgctccccaggccatgggatgcctggggacagagcacacctcaggccttatccatgtccacctcacctcacctcgcgttccagggatgtccctcccttccctcctgggtgttcctctcacagcaaccacccagggactgggtccctcgcatgcatcgacctccaccaggcracaacgccacagttgccttcgtggtctctcacgtgggtggcagctcgttgctgcaagctgagggaatcttggttcgggtccctccctgagaccgggacttgggtgcaaggtgtaaccagggaggtgaccccaagaagcagaggcgagggagcaggaaccagctgggaggggagggcagctggggaaggcagggcctatggaagcacccagagtcctgaccctcccggagaaagccctctgcagcgggcaggtaggctccaggtgacctgtcttctctgcagccaggaaacgaagctgggagcagccaggggagggcacacgggcagcagagtccagcctttaccccaggactccttttccacttttaaacccacgctctccagtggcggtttctaatgccaacgctgccactgcctgcatcggtccaccctgctctgtgctgcctgccacgtacccaggcctctcgctgaggctggctgtctctgggccttccccgcgggcccccaccccgccccttccaggagcccagaccacggggcctgctccacttccctcctccccagctggggcacacggagctcctgcaacaccatatgtcccgctctggggtcactggcacggtgtcctcggcccccctgcaggtcctgggtctggccaaccagagaggcccatgcccacaggtcagtgttgaggcctggggttggtcatcagggaagctggggcccaagggtggctcacacaggcccagggctcagtatctgctgagtccgctgagaaaattctctaccttatggactccagcagagcgactttgaggggaaaaaacaaactaggatgcggctggcctttgcctttgtgtatggctgaggtctgagctctgtggggctccacaaggggagaccacaccttgggcaggagagtccagagacaggtggggaccccggtctctagycagggtttccctccctcctcgctccatgcccaccctgggcgctgctgaccgtccactcggctaccaggggtctgcagtgtgygggagcagcaggaggagatcacgttcaaggggtgcatggcgaacgtgacggtaacccgctgtgarggcgcctgcatttccgctgccaggtgagtccacaggtgggaggcctgccccacgtccaccaaggtgctcacaaccccaccccagagaggttcgggcaccccacccaggcgcctgctgccccatcaggtgagccactctgcgctccatctgcccaacaccgccctggcccctgtgagccgggagctcagcggggaggtccaggcctctgcggagcagctgccctggggagggaggggccttatgcccctgcagcagtcatgaccctgctctgtcttgacttctcggcagcttcaacatcatcacccagcaggtggatgcccgctgcagctgctgccgccccctccactcctatgagcagcagctggagctgccctgccccgatcccagcacgcctggccggcggctcgtactcaccctgcaggtgttcagccactgcgtgtgcagctctgtggcctgtggagactagcagggtcgctgcctgctctcctggggctgaaggactgcagatgacagacaggaaaacacccaccagcccccttcccgcttgtgccagcagctgctttcctggtcaccaggcctggcccccaagtgccctgggccgtggctccctggggcaccggttggagaggggctgccaagcaggggctcagactaccacactcctgcagaccctgagccagcagagagggactgaggcggacagtggtcacggacctcccaggcacacagggcactcccgaccacccctgcccacygtccaacacctcccagcccctgaacttggccccagccctgctgggcccagaaccctgcagatgaagccacagagcaggcgctcgaccagacccatcaggggcgaggagggcacggaaacctgtgccgagatgggggcaagaggcccaggcagccaccagcacagagaagaggagatccccagagtcagggagggcagagggtggcagcgagggcagggcagccgcccccgctcccagccaggcagaaggcccccaccagcaccacacccatccccagcagcctgtccttgggagagggcgtcacccggtcagagactccaaataaaccggttcttgtcaaggcacagaggctggtccctgagcactgcttttgcctctccccagtcccttagtaggcacccgacccacatctgcaccctgtgggcccctgggatctgcagttgggcagggctgcccccagcagggtctgggctggtaagagaagctgcctctggctttgggcccctgccctccctccattaggactgttccgtctctggcgaagcccaccgtcctccgggggccacccccatctgcccgagagccccttctgcaccatctgtggtaggatcaactggaggatccccacggggcctcccgttccccaggaaggagccctgggctgcacctcaacacactgtacagtggggagccctgcggccaggctggaggggttcccgcatgacctgagtcccaaaaagctccaccacacacccagaatcaaaccggcggagcaaagggcaggtcactttctgatgcccgctgcccgtgagcccactgctgaaggacaggtcggggaccttggggtctgtgcctcacgcgacccccggggagctatgagggttacatgggatgctttccccccaaagaaagcgcgtgatccggggtgcagttctagcctttatttttctttgacgaggagtgccacactgagggcccctctgcagcgccgcacagggaagcggtgcctcggggagcagcctttcctctgatggcgggaggggtcaagggatgcaggagatccacggcagcacacgcagcctgcaggcgcagcacacaggcagagcactgcccagcagctggaacatgagaatgagggccacaccacccagctgcagcacaagcccagcacggcgtgtcacggcacctggcaccaccagacccagaatggcctgtgcgagaggcgcacgccactgacgtggctatgctgtgatcaaagcccgacacgccggaagaagagccgcagacattgtggggtgcacacactgcaggggagctgtggagaccctgatgggtccatgagcccctgcagctgccccagggacccgcacagcaggcaactgagggccagggtgaaaaccctcaagcacatgtggccacccaccctccctgcctccacagcatgtcaggaagccagaacctgtgctgggtgtgtttaggacaaacaaggccaccatcctggggacagagcgcaaggccccagccttggctcctaggccggccccactctctcgcctctcaggtgtcagacgtgcagcctgggtgctgagtccagatgacaggtgagacacaagccgcaggtggcacatggcatgcggccaatggccccttcacttcctgaccacacagaggcgtccctcctccacagcccctccagggacgactggacggggccggtggaaggactcaggcctgcaccgtggcctggggacgcccactctgacaggaaagagacgagcacacctctgagtcttgcgccaccggcccacactttaccctggagtcctgggggccctgcggggccggcaggacgctcctcccctggctgcacatccaaggcctcggcgactgcaggagcataacagacgcccttcacaaacaggagctgggaaaggagaacagttacatccggccaggacacgtgcttttgccagaagtcattacaaatacaaatgtttctaaattctagattaaaatcctgcctgggaaaacagtccagctgggactgcagcaaaaccagggtcagctgtgctcctcccaagggcccaggacgacgccaggtgtgcagccaccaggacggccacacaccaaggctcagcccacgccatgcacagtggcactgctgctcccagaggctccgaggcggggtgggcggcagcacgggccatctcagtgacactcccacaaacgccacgttcacgccaacttctaatttccctttaatttgtagatttaaccacagaactgtctcgatttttataaaaattgatcccaagatccaccttctgccgtggctgccacagtccaggctgagcttttcctcctgagccacacacgtgtgttcccgtccagcccaaaggggagaggtgtggggcggcggggcggggaggcgccttgtgctgtggcactggacacggtgctcatctgcaggatggccacgaagacaaacggcacagacgaagacaacacaagacacacgagcctggtcttccatcctcaggactaaaactgcgctgagagcaattcacataatctctgagaaacggcttccttacttgtgcgcagcgtgagccggtacatctgaaacagagagcacagcaggtcaacgggcacgccgaggctcacacagccctcgggtccaggatccgccatgcagaaccctgtgggccatgcccagggaccactctctggaggcacccacaactcggcagaggcctgagcaccacacacactgtcagcatgaaaactgagggctggcatgggagcgcctggcgtctcgtacgtagctggcgggagtgcaaagtggcacggccacctggagaagctgtgggatgttcttgcagcactaaccacacacaggccctgggcgacagcagcactcctgggtgccacccaagtgaaacggagacaggtgtccgtcgccagaacgggacgtggtgagaaggaacaacgcggtgacagagaggaacagctgggagagccaccgcccagggccaggctgctccatggtgggacgatgctccacggtggccagctgtggggaggctgggatgcaaccatgtattgacagggtggtggttaaacaggcacacaacatctgtcacaactgactgaactgcactagggatgatgctccacggtggccagctgcggggaggctgggaggcaaccatgtattgacagggtggtggttaaacaacatctgtcaaaactgactgaactgcactaaagagctacacatctcaccacgtacattgtgccagaataaaaagcaactcaagtgtgttccaccatttcctgagggcctgacctgggcttgcaggttcggctccaagcgcagcaggcatccaatctgggtggttttcgtgtggatgattccagctcccacraaattcgcaggattaggatcaacttcttcaagaagtgcagaaccaaatccaatgatctgtccaaagaaacaggagaatgaggaccctggcgcggggtcgcgggcagcgtgtcccccggggcctcccctccagaccctggcgctgggtcgtgggctgcgtgtcccccggggccgcccctccagaccctggcgctgggtcgcgggctgcgtgtcccccggggccgtccctccagaccctggcgcggggtcatgggctgcgtgttccccggggccgtccctccagaccctggcgcggggtcacgggctgcgtgtcccccggggccgtccctccagacgtgttaccttggctttggtgacttctgtgtccattgggtgctttgctttgaagatgttctgcacttcctgctgtggactgtgagaaacagcaaaggcaagtgttctcagccaggccagagaccaaaacccaccttttcaaatgagccccgtccccacccctgacccctacaggaaacaggtttctyacttgctcaactgcttccaacgttgaaagaaatcctgagaagccatttctgtcggctggaagaatttgttgagagtgatgggcagctgcacagacacgttctggaaggtgcccccatacctgccagcagcagcagcagcagaaagagacagtcagctactcctctgagagccccagggaccgggaaagagcctggagtgagaagcgtcccgatctactgccacccaccagagcgggtcggggggccgagccttcagtccccacggatcgtgtgtggctcagtgtccagtgtcacccacagacaggaggacaggccagggccgcatactcaggcaggacgtccctgtgcctcacttctccccattcatctgtttcccagaactccaagtctgtgcaaatagtgtgatgttttttctttaaaaaggcaaaggcatttgcacaaagaatgaaacaaaaacttgcatgtctatgtccccgaattctacagtatacaatcttaagttctctgtctttttaatgttagaaagtgtgcttttctcaacattcctaaccttgcagacacccagcaggggacgggctgactgtatccacgctatttgtagtcactgaaaagtgagagtaatgaacagtcgcaacaggaaaatcctatgcttttaaaaaataagcaaagtggtacgatctgagctcaactgagcaaaaaacgcgccccccaggccagggggccgaaggaaaccagctgcctgcaccccacagctgtcgtctggtaccaagccgggcaggtggcgcgggggccctggctgtctgccaccccatgaggtgggccccatggtgcccagaaagatcctagcaaggccccatgtgggagctgccacctgccgtcccggagcccagggctccgcctccccttgtttcctgcgctctgcagagccgggggcagcaatagctcaggccgcatccatgcaccgtgagcacccgcacgccccgggtcccctcaggaaggacacggaggcacagtcatggagcccaggcacacagctcaggcgcccacacaccccttggcccggggcgcacaggcggctcttacctgaactgaatgttgaggactggcgcctccgtgaagtcggacacgcactctatgttgaccacctgctgcacctgcgcgcccccctccacggtcgggtccacgggcttggtctgcaggttcaggtgtgcgtgcgttaaggaatccagctgagcaagtcccagtggcagaagcggaaacgggccgggctagagccccagcaggacccgtggaggcgagcacactcaccacactctaggaccaccagctacgggtcgagggcagccacaccacccggccctgcccttccacccagacaatcctcaaaacactgtctgcttctcacgcttccagaatggctcctccattttaaaaagtcacttagattatatactacttgtctgttttcactctgagcctcggctctgggtcttacacacacaatttttgtcaccgttagcagaaactggtgcttagtagggcaggaaaactttaagaatcccaggaatagcaggctcctgaaacagcgagacacagaaaagagcctgccctgctgggaccagggttgttttcatgctggaaaacaagggtttgcctacagcctctcctgaagaaacagtgacagcagcaaagctgggtccaggaggcagcggggtgcaggcctctccttccctctgggtcgtgtgccgccggccactcagctgctgggctcgctgccgcctcgagccaagtggaccccgagggagagacccctaaagaagggcgcagtaggagtcagagcttccactccagattccaaacaaagtctttaatacaggtgctcctgcatgtgtatttttaatgactgttttgaaacagcttgaacagtctgcattaaaacatgttcatgttaaaatgaacagaccagccagtggcaaggaggatgttgcttcactcaggtcgctgaccataaatccccaggtgtcaccatctctggtcaagctggggtcttcacgctaactctatttggcgggcctatccttagaggtagagacgttagcgtctccctgttttagctggggaagttctaggaacgcttctggcattacgaagggaaaatcttcagtctaaaagctctgccagaagcacacacaagctcggctggggtgcgcaccgcgctccagtccccactggcgcctcccacactctgcaagcagcagctctgtgaggcttcggagaggaggggtttaaagatcacgtcacaggagagtaagagcaggtgaaaaggaaagggactcacactggccagatggaaggggaggaggcatgtacacggtatttttaggtgcatgatcaaaagc

SEQ ID NO: 93857 - DNA, 15974 bp, Homo sapiens
gccttctgagaatttccccttcccactacatgcttttgacccatgcaaatgaagcctgtcctagatcaagcaccctccaaggaaggccctggtctggtctttgtcctctccagatggccacatctgtgaccacttccgttcctcacaagactgccctttagtggctcctgtctcctgggtctctgaattgtccttcccatatggagacatcccccctgcagcctcacctctacctgctgccttctcccacctattcctgtcacccaatgtgtatttgtagaaagaggaagtgatggtggttccttctggcagaggctcagagggaaagctcctccctcaggaagaaataagtgatagctctgcagttttcatgtggggctttttagggggtggggtgcagctggaaagagagagactgggaggaagagaaagagggaggagcaggaggccaggctcctcgccaacctgggcaaaaggagcaggccagcagctttgccctatgcagcagaaacagcagcagtgaaacaattcctggaaatttactctttttcctccccgccccactttttttccccaaaaaagtgtagacaagattttgcgatcaacaatcagaaaggaaggaaggtaccagggaggaggtattgggaggcagagataaaggcagacgactttccagggtcaggttaggcaaagggctgtgcttggaccctggcagaaggggtgaggcaggctgtcccagggatcaacccacgtgcctggcttatggggtggaggcaggtgctttgtggacaggttaaggctgagggatttggcagtaattgcactcgcgtccacagtgtgaacttccagaaggccactgagtcaggaagccaagtctagtcgtggaggttgttctgccctcctgccaccagcttccccaagctagagaggaatctggtttgcccagaagtaccagattaggagctttccaggctcctcaaagcctgtgccccactaccctgtccttggctctctctgctcagttcttccctcttcaccggcccttcacgagacactgtggagataacaccagtttttgagtcagacctgtttttgacacttttttccaccacttggtagctgtgtgatcttgggcaggtcacttaacctttctgaatctcagtttcttttcttttgttttttgtttttaaatatttatttgtacagattgatgtggtacatgtgcagttttgttacatgaataggttgcatgttggtcaagccagggcttttagggtatccaccacaagcataacatgcattgtacccattgactaatttctcatcatccactcctctcccattccctcttccttccaagttttcactgtttaccatttcactctccacatccatgtgtacacatcttttagcactcacattatgagtgagaacatgcaatatttgattttctgtgcctcgattgttttacttaaaataatgatctccagttccatccacattgctgcaaaagacataatttcattcctttttatggccaaatagtattccattgtgtatatataccacattttctttatccttttattcgttgatggacacttaggttgattccatgtctttgctattgtgaatagggctgtgataaacatactagtgcaggtgtctttttaatgtactgatttcttcccctttgagtaaatacccagtagtgggattgctgggtcgaatggcagttctacttttagttttttgaaaaatctgcatactgttttccatagaagttgtactagttcacattcccaccagcaatgtctaagagttctctgtgctccacattcttgccaacatctgtttttttttttatctttttaataatagccattctgactggggtacgatgatatcgcgtcatggtttttatttgcattcctctgatgattagtgatgttgagcattttttcatatatctgttggccatttgaaaaatgtcttttgaaaaatgtcttcttttgaaaaatgtctattcatgtcatttgcccacattttagtgggattatttgtggggtttttttttttcttgctcgagttctttgtatattttggatatctcccctgtcagatgaatagtttacaaatattttctccagttctgcgggttgttcattctgttgcttatttcttttgttgtgcagagctttttagtttagttaagtcccagttgtttatttttgtttttgttgcctgtgcttctgagatcttagtcataaattctttgcctagtccaatgtccaggagacttttccttatactagatagtagatttttcctgcaatactagattttcttctaataatttaataatagttttgggtcttatatgtaagtctttaatccatcttgagttgatttttgtgtctggtgagagataggagtttaatgtcagtttcttaatatgtaaagtgaggataatgatgcttcccttacaggttattatatgggatacatgagataatatatacaagcatgctccttttccacttcatggggataaggaaaaaggaatcccatcttgtggaattgacactgagagacctctctagtcctattaccaccagccatttttttcctctctgaattagatcaacatgagcctcctcttttatttggctgtcttgggttgtgttttttacatagaagggtgggaacattcccaaatgtcactatgaattaccacagagaaatgtagtaatagtaacagctgatgtttattgaatacgcaccattggctagacacagttgtaaggggctttatccatatcacctcatttaatcctcataacaacttcatggagtgggtactaccatcgacaaggaaactgaagcacagaaactttaaataacttgccccagtcacacagctagtaggtcaataagcccatattacaaggattcttgagctggattccatgcagctaatggttttaggtgtgaactgtatgaaaagtataagcaagtttttgattgttgtgttatgtggggggcttataaccttccttagattctcgaaggggcccatgatgtccaaaagctttaaaaaaaaatgacccttggagagcttctgctagactggggtcaggataaaaacagcaatgttgggtatccacttgtgtggagctgactcagccctgggaattctaggaaatttcttgcatgaggaaggaggtgtctccttcatgaaggctgagggatttgtaggatgatctcggagggatttgaaaaggggaaagtgaatgtctttgcttcccattccctatctttcactagatgaaggacaactgtttcctctgtgatttcccaagtgtgagaagggagggtgtgacatcagtctaaggaagaggaagcttgaaaagactgataagagactggaagggccccaggtactattaatatccctctgccgcctacagcactagcagcctccccgcatgccgccacccttcccccttcctttggtctcctatctctcccagcttctgtttctccctcactctcccatctcctgatctgcacccctcccccagcctctctgtagatgtggtaagtctcttgttggttccagatttcttccgtttctgttaacttttgttgagcacctaatgtatgctggtcagaaattctccagtgcttcccaagaccccatctttctaagttttcaccattttaataaaggcatatggattcttagactccctgaaattggagatgggaggacttgacaaagtcatcttgattctcctccctcgttataaagatgagaaaaatggaggctttaggaaatctcatattgtcgcatgatgtaagaaatagtgatgaaaatggaaagcgaagccagatgttgcagtgtcagctacctcaacattccttcatctctgctagaagctagcactgccggggctggaaatacaaaaatgactggactcagtctcggagccctcaaggggctccgagtctgtcaaacctctagtatgcagcacactcaaggcaccatccatgttgcttaattaacagtagtccagtctcttaccagccagcagtcttgctgtttccctccttcttggaggatccgtgcagggagatatgggggctccccgatgctggagagagtggccattgggatgagctgaagagccttggctgatcccaggccgatgcccacgtcgtgactgcagggctagagaagaaccaccagggggcgcgcggctctttgctagcctctggtttctgcaggaaacctctccttccccctcccagtccatctccacttcttccttcaattaggggacagaaattgggcaaacatggacagtgggagagaggcccagtgcaaataaaccctggattattctgtcccacacctactcccccagctccctgcccctctacatcctgcccaccagttatgaaatagtttcctcgacctcacaccgagggaccctccatggacagcagaggtccagtctgtacccctttctgtagtctcctgagaaggagatccctcctgtccatcaacaccctgatacaaactgaagtaatacctttacagttactagggttcatatccttccctgcttgggcaaggttttggaccaccatcctcattgtccttgttcaaatgagcaatgtttttagcctctcagtgtctgaggggtccagatcctggatgtgggccctgacaggggagggcagagggcagtggagccagcacccagggcatatcaggaggtgagcaggtgagccctgtgacacctgcataagtcattccattccccttcccagcagccctgggtacttccttcctgtgggttccaaggctccattcccttctttcccctttctttacctgtgaggttggactctccctgtgggtgttccacatctttctgccccagaaaactactgtagcaggaggggacttgctcttgttcacttttttgccttctccttctcatcctagagagcctgatcgtgccctacttttctggggagtgattgattctggatgctgggtgggatgaggaaactcaggctcagagcaggatttccactgaatgtgcctggaaaccatgtgtagcttcccagtaaagtctgttttctgggagaccatggtccaggagtgttggtatacaatgtgtgttaggccgttcttgtgttgctataataaatacctgagactgggtaatttataaagaaaacaggtttaattggctcatggttctgcaggctgtacaagcatgcatctgcttggctcctggtgaggcatcaggaagcttataatcactgcagaagtcaaagggggagctgatttgtcacatggcaagtgggagcaagaaagagagagctggggaggtgccacacttttaaacaaccagatcccatcacaactcattccagtgtctccaggacagcaccaagccatgagggatccactaccatgacccaacacctcccaccagctcctgcctccaatattggggaacgcatttcaacatgcaattttkgtggcacaaatatccaaaccatatcacaagatatgtagagacaagttctgacccttgtttgtagatcagagtggtgtgtttcatggtgtgtgtgtgtgggcccctgtgtggacacctgagtaggcacagcaaggcagagaggcattggtggactagggaagcattgctgagtagtgataactactcactgggcagagcttggggtttgcagttgcatgcatgaacacctgcaaaggcagttgaaagagcagagagatgaagccaggataaaaaatggtgcagaaagacagtgatcagagaggaaagtgaggactttctgccaaaatgcctgagggcttccctgcctacctcagccctctgtgttcttaagtcctcctgtctgaacagaggccagactctcacttcaccccagcccgtctgggtctgtcctctgcaaagccatgtggctctacctggyggtcctccwgggcctrtactaccttctgcactggtactgggagaggcaggtggtgagtcasctgagagacaagtacgtgttcatcatgagctgtgactcacgcttcaggaagctactggccagacaactgaatgcacaggcttgcgggagctgcatgtaggacagagaaggggaccaagcagctgaggggccagacttcagacaggctggagacggtgaccatggacatcaccaagacagagagcattgctgcagctgcccagtgggtgaaggagtgtgtgggggacagagggaccacctcaatccctcctagtgcctgtttgtttctcttctctctgtgtcactaggggagacctagtgtctgctaactgggaacatttccaggacttttattttcgggggcttgagctttctgttttccaaagcagaagtcctagagtggttgtggctgggcccagggttagaggagtccaggctgtggttagagcccagtctctggataacgttgggtcctgacggttggcatgagaccatcggggatggggctgggcaggatccaggcttctgatctcagcattctcttactggttccttcacacttgtccctgttgagggctttaagatgatctccgcttgattcacgaggacactggggcttggagagctgaagggacttcacatcaaacaccgagtgatgaatcctgttccttttggggaaagggagatcattgattgctttgttctgattgtaaatggaaaacatgaagaaattatagaagaggataagattggatagataggaggataagataggatttctcattggagaaatcatagaagaggatgagagtgaaacaacattccccctaatcccagcctccagggttaatttccctctactttacacattctggggtcagcattttcatcatcaagtttcttccccaacataacaatcaaggtctccatattccagcatgtggagaggccataatttgttaaagggattctatattgttgaatgccgaagtttgttacccacttttcctggcataaataacatctcagtagcgattctctaccaaggtttgttgacaggcttagcagtgctattcaagaaaagtacaactattgaatcaaagaatcctcattccttcaagtccaggaaaggtttctgagtaggggaagggccaccattgcaggccttattgtttttccaatattcctagggtcagtctccgtctcctgtaccccccagccctcacccactcacacccctgcccctgctggcctggagtccgtagttctgtagctctgactactccagatctttcatgctattagtttgctcccctatgtcttctgtagagtcttccccaaagcttgctggaccctatggggatagggcagaggtggccttatgagatggtgggaggaaaaggtggtacttcctggggcagagagtgcagtctggacacctgtgtggcatgagacctctttccctcctcccctcctgctctggccattcagtccacagtgagctttgggaytcccaggtacacaaggtgaccttttcttccaggacagatattgccttgacattgatgcaggttgtagcacagcttgtcccctgatgcccagtgcaggcctgctctctaacttcccctagtcttaggatttaagtgtatctctcctaaacaggatgcagaaagtaattactcatgtgtttttcttattctttmctttttctttttctcttctgtcctttccccttggtttctctgtcttagcccattcctgtcttcctatttcctgtctctgtctctctcccctggagagatatttgttggaccctcattctgttttctcaagttctgtccatgcacttcacagcattggctttactgcatgctgggtgccargcactaggagcagagatgggaaggaccacccctcaccccccaataccttgaaatgggtgcaaaccttgaaactctgaagcctccccatccttgtttcctctcctccactcctttcccttattccatgtagcacacttgttgactcaataaatacattgaactagaaaatgaacttgcaccctaactgtgtccacctgcacaaacacaagagtgatgctctcatcttctggccatcccaggactctggggcctggtgaataactctggcatctgcctgccctccagctgcaatgagtrgttgatggaacaggactttgtgacctgttggtcacaaagtgaccaactttgtgatggaactggacatgaacctgttggggatgattgatgtgactctgatcctgctgccctaatgaggaaggccaggggctgcatggtcaacctctccagcatcgcaggccrggtttcactttttggtgcaggctactgcatctccaagtacagcgtggaggccttctccgactccctctggtattggcctgggacagggccctccctcatcctcctgcacctgttcttctgtgggaaccatttgcagtagttttatgtaattgtagccttagaggccccttattgagatccctctctctcatcctgtgtgtgctgttgcccttatggatttagccagccacttcttgggaacagcttctccatgttctggggagggaggggccccagaccaaacagttcctgtaactcacctttgaccctattgagggggtcccataggcagaaaatgtctgaggcagactggaactgacatgtttggctccagagcccagaatgaagccactgtgacatgcagttgcagggagcytaggagacatggggtgagcatcttagtccatacaacagactttttaggcccttggatgagtgcccaataaactcagcccaggacagcaacarggttttggccctgacctaaaagctctgacacctgagagaggagcaagagagccagaaccattgttgccagttctcaaaggggttgtgacccagtcagccctggtggccatggcagcctcctggattggggargctcctggagatgggrtctgagctggagattgaggatccccacctggcagccttggacagaaatgggggaatgacttttgtcttcagcccaggcctagggggagcctcagctgcctgcctgtgctgtggggtcctcatgaggtgaagcacagggccaggcctgtggaggaggctgggcaggtgggykcatatgggctcgtggaggccctggacaggagctgtgcctcatactgttggcagtggaacccccaaaaaagggatttgctcaggggagctctttggtctaatcggcttctagacacccacttactgcagggagcccagtggctgtgagtgtggggagccagactgaaggcagagggacgctccttagaggacagctgccatcacccagctcagaggccagggagattcctggggcaggagaagaagggaggggactgaggactgcagaggaggtagaatgtgggaattctggtgatccattggatgtgaggggcataggaggtgatagcactgagatgctgccttgctcttgaactggtaggacttagggctagtaagctttggtatgtaaaatatggaaaccccagagagaggcaaggccaccatcataacttttatctgctatctgctgcccttcccaactctccaagctttcttgcatctcccactgtcgttgcatgctgggtttgtattgggtttctttgttttttgtattttgcctcccaaaatttcttaagtccttgcccttctgcatgtctgccatgcaggagggagctctcccactttggagtgaaggtgtctgtgattgaacctggtcacttcaggaccagtatggccggctctgagaggcatttacagaacctcaaggagctgtcggactaggccagccccgaggtcaaggagacgtatggggagaagtttctgatatcccgtragtgagctgtggacagtggggagataaagaaatccttgtctagaagtctgggtccatcattagtgcctccaacagtatgagaatctgtcctccaaactctgcctccccaacaaagtgaggacatttagtccatttagctgtgtggtcaactggtcacctaaaagaagaattgaagctcctataattgaaaccactggctaatctgaacctctcgttattttgaagaggaaactaaagccagagagggtggacacctgtgggctcatgggcagctgggtttagagacagctgattttcatgttcttaggctgttagtagagaccttcaatttatgcagtccagatatctcaggaagagaggcagagggggcttagtgtggaacaggttttgctgcagtgagggttggggcactccctggggaatatgggtggattagacttgaggcatatcattgaggggcccagggattcttagacactctccttccaattcagagctctaaatgggaggggagggatgtgctagtacattaaggatgttttctcattctgaacaggcctcagaaaagcacctaggagcctttggtcaaaatgcaatacaaatctatcattggtgactgactgcatggagcatgtgctgaccgcctgccacccctgcacttgctacacagctggctgggacaccaagcttctctacctccccatgacctacatgtctaccttcctggyggatgccatgctccactaggttctccaaggctggccaagggcctgtgaagccaagactcaggtgcatgttttcatggatttggggtatgccataaggggcgatgtatcatggggagagaaataggttacccctgtcacagaaatagacctaaggacaagccagcaaggagatgtcaataaggcactggcaggccccaggtcccttccctggggcaactgaagcctcctcccctcacctgtgccctctctgtggccctcagtgaccggcccttactttaaagtcattgcactttccctgttgccatccctcaaggtcccccaccatatcccaacacaccccctcctccagtggcagggagtgaaagtcacgtctggactcatctttcttgttttccctcccttkgttgagcccctgctgtgtgctggagagaaattatcttgaattacctagtcctcatcctcagtgtcttcggtgttctgatgatgttgcaagtgtgaactcaacagagaaagcattaggagaaaggggtacagattcctgggctcagtacaaattgtagttacagggtaccgtctctggtttctcattttactgatttcaggttaaaagtccaggatatggagcctttagagagccctgtgtcattgaacaaatcatgttcagtgtaaaaacaggtagtgaggtcagatgttgcagggccaccgaatttaaaacacgtaatgaggctgggtgtggtagctgacacctgtaatcctagcactttggtaggccaaagcgggtgaattatctgagctcgggcattcaagaccagcctgggcaacatggcgaaacccaaactctatcagaaatgcaaaaattagctgggcatgttggtgcatgcctgtagttcagctactcaaaaggttgaggtaggaagatcacttgagcctgggaggcagaggttgcagtaagccaagatggcgccactgcactctagcctgggtggcagaatgatactctgtctcaaaaacaaacgaagaaaaaaaccccaaacaaacaaaagacatgcaatgaggagaggatggagaaagatggtggaatagaaggcttcacaaatccttctccactccccacccctaccaggacaacaagttaacaactatctacacagaaaagaacaccttcatagaacgaacaatcaggtgagcactcattttacctggttttaatttcatattgctaaaagaggcactgaagagatagaaaaaaacagtcatgagtcacagacactgtccctccccaaaccctggctgcagaggcatggtgctgagagtgcctctgagtgctgggggagggagaacacagtaattgtgaggcactgacctcagggctgtcctgttagagcagagaggaaaaccacaccaaactcagctgatgcctgcctggggagggagcatttaaaccacccctagccacaggggaatcgctgatcccagcagtcctaacttgagtgcccatgaacctcgccaccaagggctacaacattctgtgtctccaagtaaacctgaaaggcagtctatgtcataaggaccgcaactcctaggtgaggcctagtgcagaactaggcccagagacagtggattagggggacatgtgacatactgagacaccagctggggcagccaagggaatgtcggcatcacccctcccctaactccagtctgcacaacctgaggctccaaaggagaccccttttttctacttgagcagaggagagggaagagtgggaagggttttgtcttgcatcttggataccagctcagctacagcaagatagggcaatgatcagagtcatgaggcccctgtttcaagtcctagctcccatatgacattactagacagaccctgggccagaagggaaaggacccaatgctaacagcattcatcacctgctatctgaagagaacttgggccctgaataaccagtaattcctaggtgctaatcaaaggccttgggtgagcctctgaaccttgatggcttcaggtgagactcgggacattgccagctatgttggctatggagagagactcctgcttgagtaaagcagagagaaaagtaaagggactttgtcttacaccttaggtgccagcaagaccacagtggggtagagcaccaagtgggctattgtggttcctgattctgggacttgactcttggatgacattttctggacataccctgggccattgggaagcctgctgacctgcagggtgagttccaggccaggcagcattcaccacaagctgattgaagagatgttgggccttaagggaacatcgatagttgtctggcagtactccctgtggcctggggtggtggtggctgcaggttgaggctcctctgcctttggaaaaggaagggaagagtgggaaggactgtgtcttgtggtttgagtgcccactcagctacaatttagtagaatatcaggtacacttctaaggtttttgactctagtccttgactcctgcacagcacttctggacccatatggggtatggggtacctcaccatcctgaagggaagggcacaggcctaactgactttgctacttgctgactgcagagccctagggccttgagcaaacacaggtagtagccagggaccgggtacagcaggccttgggcgagacccagcactgtgctggcttcaagtctgatgcaatgcagtcatagtggtggtgacacaggggtgcttgtgtcactccacccccagctttagatggctcagaacagagagagagattctgtatgtttgggagaaagtcagggaagagaatgagactggtattccagagaattctctcagatcttgtccaagactatcaaggtggtacctctaccagtctgcaagaaccatagcattactaggcgtggggtgtcccctaaagcagatacaacttggatcacaacacctaagtattttcaaatatttggtaagccttcccaagaatgacagttacaaataagcccagacagtgaagactacaataaatacctaagtcttcaattcccagacactgaagaacatctactaacatcaacaccatgaaggaaaacttgacctcaccaaatgaactaaataagggaccagggaccaatcctggagaaacagatatgtgacctttcagacaaagaattcaaaatacctgtgttgaggaaactcaaagaaattcaagataacacagagaagaaatttagaattctatcagataaatttaataaaaagattgaaataattaaaaagagtcaagcagaaattctggagctgaaaaatgcaattggcatattcaagaatgcagcagagttctttttttatttttattttttattttgctttaagttctgggatgtgtgtgaataatgtgcaggcttgttacataggtatacacgtgccatggtggtttgctgcacgcatcaacccatcatctaggttttaagccccacatgcatgaggtattgtcctaatgctacgcctcccctagccccccaccccctgacaggccatgatgtgtgatgtttccctccctgtgtccatgtgttctcattgttcaactcccacttatgagtgagaatatgtggtgtttggttttctgttcccgtgttagtttgctgagaatgatagtttctagtgtcatccatgtccctgcaaaggacattaactcattcttttttatggctgtatagtattccatggtgtatatgtgccacattttcttttcttttttttttcttttcttttttttttgtgacagaatctggctctgtcgcccaggctggagtacagtggcatgatctcagctcactgcaagctctgcctcctgggttcatgccattctcctgcctcagccttccgaatagctgggactacaggcgcccaccaccacgcccagctaattttttgtatttttagtagagacggggtttcactgtgttagccaggatggtctcgatctcctgacctcgtaatccgcccacctcagcctcccaaagtgttgggtttacaggcaggagccactgtgcccagccatgtgccacgttttctttatccagtctatcattgatggacatttgggttggttccaagtctttgctattgtaaatagtgcagtaataaacatacgtgtgcatgtgtctttatagtagactgatttataatcctttgggtatatacccagtaatgggattgcaggttcaaatgttatttttcattccagacccttgaggaattgccacactgtcttttacaatggttgaactaatttacattcccacaaacagtgtaaaagcattcctatttctccacatcctctccagcatctgttgtttccttactttttaatgatcgcctttctaactggcctgagatggtatcttattgtggtttagatttgcatttctctaatgaccagtgatgatgagctttttttcatatgtttattggctgcataaatgtcttcttttgagaagtgtctgttcacatcagagttccttaacagcagaattgatcagtcagaagaattagtgagcttgaagacaggccagttgaaaacatatagaggaaataaaaaaaaacacacacacaaaacaatgaagcatgccctcaggatctagaaaataaacttagaagggcaaatctaagagttattggccttaatgagaaggtagagaaagggataggggtagaaggtttattcaaagggataatagcagaggacttcccaaacctagagaaagatattaatatccaagtacaagaaggtaatggaacaccaagcagatttaacccaaagaagaccacctgaaggcatttaataatcaaactcctaaaggtcaagcataaagaaaggaccctaaaagcagcaagaggaaagaaataaatgatgtacaatggagctccaatatgtctggcagcagactttccagtgaaaaccttacaggccaggggagagtggcctgatatatttaaagtgctaaaggaaaaaacttttacccgataatagtatatctggtgaaaatatccttcaagcataaaggaaaaagactttcccagacaaacagaagctgcgggatttcatcaagaccagaactgttgtaccagaaatgctaaagggagtacttcagtcagaaagaaaaggacattaattagcaatacataatacctgaaggtacagacctcaccagtaattgtaagtacatagaaaaacacagaatattgtaacattgtaact

SEQ ID NO: 93858 - DNA, 13087 bp, Homo sapiens
ctatttgtctcgttgcagtcagtacatcttcagtctgttgttaatatgaagggactcagccctaggcagataatcccagcctctgcttctgatgagagctacagagataagcatagtgggagtgtcagagcacataaagtgggaggggaggagtgcaggaacacatctgctggctccaaactcgcaggggctcttagttatcacaatttacatggtagtccccaacacctattcatatacacataagcacagtcaacacacacatacacacatatatgcacatatacattcagagtcttaaaggcacactcaccaggggcccaggaacaaaaatgtggagcgtgccaacattttaaagaattattttctcaaagattgtgcacattttaaaggcttctcctcccccaatcttcagcaccagtccttctctagaagtgctggctagcttgcccctgactcttggcagagatggctgacctggaatgtctaaggcatgaacagggaacccacttgtaggaggctcctgtgtgcatgtgggagagcagtctttcttctctgctcccttccaactccctcctgaactgatgtatgcctgactttcaagatatatttctgttgcttgacccagatgccaaaattatctgttatagctctgcatctatccatatacacccgcattgacattcacagtcacaaacatgcagtcacactcctacacactcatgctcacacacacacactacatacccagagccaggcctcctagccatatggcttggtttgaaggctaatgagaaagcctcctgatcctatctgctggtcacaagcctctcaaagattccaccattaaatatttatcattttgggagtactcagctaagaattaagacctccagtcaaggcaacacaccataaagttttcatccaacattttggcagaagcccacctctacccagaaacttctttctccttgactagctgactcttactcattcttcaggtctgacccaacctcccctgttcagccccgaccccttactgttgagggatggtaagttcccccattatccatgctcattactctctgtcattttccttccttgcactgattaaacctgtaattaaatgattatttatgtgatcacatttatatggtttgtggccccattagaaagagaactccagttggttaggagttgcctttctctctgttcttcactatacaccaagtgctagcacaatgcctggcacagaattgatgttcaataaaacttaaatggctgggcgtagtggctcacgcctgtaatcccagtactttgggaggctgaggcgggtggatcacctgaggtcaggagttcaagaccagcctgacaaacatggagaaaccctgtctctactaaaaatacaaaattagccgggcatggtggcacatgcctgtaatcccagctactagggaggctgaggcaggagaatcgcttgaacctgggaggcctaggttgcggtgagccgagatcacaccattgcactccagcctgggcaacaagagcgaaactccatctcaaaaaaaaaaaattaattaatttaaaaaaaatgaagttgaatgctttggggaaaggacattagagaagaaggaaaacagacagaaaatgtcagaacagataattccaaatccttctgatcttgggcctctgactatcaccagtatgttcctttctcacctgccagggtgacaccatgtaactctcctggggcatgttaagatgcccagcagaggccgggtgcagtggctcaagcctgtaatcccaggactttggaaggctgaggcaggtggatcatttgagatcaggagttcgagaccagcctggtcaacatggcaaaaccgcctctactaaaaatacaaaaattagccaggcatggtggcatgcacctgttgtcccagctacttgggaggctgaggcacaagaatcgcttgaacccaggaggtggaggttccagtgagccaacatcatgccactgcactccagcctgggcaatacaatgagattccatctcaaaaaaaaaaaaacaagatgcccagtagaactacacagggacagcactaggattgaagcagacagaaacttctcagctggaggaaacaggcctgaggggcatcctggcctggtctggctctgcacttwtccagaatgtgactaagagttcatagttctagaccaagctttgtgtgaggaaccttctattccagatgttttctggtaattaagatgggagatgtttgttgccgagaacatatggtattgataataataacaaaaatactatcagctaccatttatagaaagcttactatatgccaggcactgggctaagtactttatatatagttacacataattaattaatcctcacaaccatcttgagagaaaaatgtaccactatttccattttgagaataagtaatttgcccaacatcacacaactgggaagcaactgagccaggacaggactctgaggccaagctttgaaccagcaggataggctgccttctatttaagccccgaggagataccagaccacctcatactcactcaacagatacaaagtagtgccctttaatggacttgggatttatttgcaatcttagaagctgccactattcccttgtcttagaaccaccaggatctggctcctgattcctggagtcacagaagagaggtgccaaaacatctggaattgcagaaggaagcaaatacaggcagctgggaggcacctgatccttggccttctacagcaaaatactcctgagtccctggccctcctgcttggaagatgggaccactttgaatcttttccctctgtatttctcttctcccagtggtgatcctgcgggctcatttctgaatgatgatggtctcgaggcaggtgacaagtaagccacaaagggccacataaaccataaccagccagtgtgagagagaagctgccactgaaggtgggccctatttacttggggctgcactcgcggccttgtgtacagccacttgcaggaagtgagagctccaagcttttgacatcaggtcatggtgtcttctgttcccctctcttccctgtggcactgacttcagctttgtccctttaatgattctgagtctgacctccatggcttcaaattaagtctggaatcattttaagactactatggggtggatacggtggctcatgcctgtaatcccagtactttgggaggccgaggctggcagatcacctgaggttggaagttcgagaccaggctgaccaacatggagaaaccccgtctctactaaaaatacaaaattggctggtgtggtggcgcgtgcctgtaatcccagctactcgggaggcagaggcaggagaatcacttgaacctgggaggcagaggttgcagtgagccgaaatcacgccattgcactccagcctgagcaacgagagcaaaactccacctcaaaaagaaaaaaaaaaaatggtccctgactcgtgccacttaaactcggtctgaaacagatacttcctggctcatcctttcaacctgcatttattgtggtgttatctctctaatctgtggactcctaaagggcaggtttgtattgaatatggtcatttggcatgcatcctctattcttattttcttctaatgtgttacagggaccgggaagctagaatacatttctatgactcccttacaattaggcacacttgtatgactgtaagacagaaaggaggaagatgacttctttctgctattttgggctttctgttggcaagcaggatcctggagacatggggttctcctgcaacagccattcagcttcctgatctctgctttctagttcctggatggcagatctctgacaatgtgttctttaactcaacagttacagtggtggccttttgattccccatcttactaatcatggcaaacatattcgctctcctgttgcagtttkgggaagtccattccacaactcctttcaatgattgtgtaaacactaattctctacactaagttctcctcagttcaaaatacctagagtagtttctgttttcctgcactgaactaggccctcaaatagttgtgaaatgactgactccttggagaaacaaagaaaaaaaaagtcagtgttgtgttggagagaaaagatttattttctcatccacttctaggttcatggccaagattccaataataaaaaacagattaagaagagaaaagtatgcaaatgtatttaatataaggtttacatgacacaggagccttcataaggaaatgaagacccccccaaaacaggaaaacttgtgtatttatttaggcttaggtttgaggaagagtagaagtggtcactcatgcagaagtatgataggacaaaaggggtgtgatctaatggtaataaactggtggtaggggacttagcaagtcctgttcagattcttctgccttcaagaacaaggaagtcccttttcttcagtatagggagggtatctctggaatgaggatttcatgacctacttcaggaaagaaaggagggagaaggtcagagagtaaccttcccaggtttttttcttttcttttttttgagatggagttgcactctgtcgcccaggctggagtgcagtggcgtgatctcggctcactgcaacctctgcctcctgggttcaagtgattctcctgcctcagcctcccaagtagctgggattacgggtgcccaccaccatgcccggctactttttttttttttgtatttttagtagagacggggtttcaccatgttggccaagctggtcttgaactcccgacctcaggtgatccaccagcttcagcctcccaaagcgctgggattacaggcatgagccactgcgcccggccaaccttcccaggttttatggcctgcttccgggaagaagggagagggaaaggtgagagtggttctcctctgctgttttttcaaatgccaagttgccatattttggagtacggtatcctgaaccccatcattctcctgtctgaaactttcccaagaggcctcacagcccaaaaactgagttggaagattattgcataacccattgaaccatctctcagttccaggaataactcagtccagttaaatagttaacagttgtatcttattccagttgttagggggtattgcagtcaggcttctaccaaagttaggcctctatgtagtgtaatcaatcaggcatttaataagaggcatttccagacaaacaatagaaaaacaaacattaacaattagagcaatccataaactcagtttttgagtccggaagacagccagtcaaaaaaatttctagattcgagctcaaagcatcttgagatggtagaatgaggacaagtagtgacaagctgatagattttcctggtttgcagtttgcatgaggtgttctggggaactttctgagtagcacatagagcaacacgtacaaaaattgttcatatatggctgttgtgatttctctaaagtctatatgaagttgtccagctttagcttgcagggctttggaaaaagggcagttttaatttttagtgattctcagtcataaggtgggagaaaaattggaaattgtttggagagtgataaccagatattggaggaaactagaagaatttaagatccagtccagattataggtagataacaaaacctcagggccgggtgaggtagctcacgcctgtaatcccagcactttgggaggccgaggcggctggatcacgaggtcaggagatcaagaccatcctggctaacacggtgaaaccccgtctctactaaaaaatacaaaaaattagccaggcatggtggcgggcacctgtagtcccagctactcgggaggctgaggcagaagaatggcgtraacccaggaggtggagcttgcagtgagctgagatcgtgccactgcactccagcctgggcgacagagcaagactccgtctcaaaaaacaacaacagcagcgaacatggcgctgtgagtggtgcggagcgtgcgggccctgctctgcaccctgcacgcsgtcccgtcacccgccgcgccctgcccgccaaggccctggcagctgggtgtggacgccgtccgtacgctgcrcactggacccgctctgctctgggtgcgtaaattcacagagaaacatgaatgcgtaacaacagaaaatggcattggaacagtgggaatcagcaatttggcacaggaagctttgggagatgttgtttactatagtctgcctgaagttgggacaaaattgaacaaacaagatgagtttggtgctttggaaagtgtgaaagctgctagtgaactctgttctcctttatcaggagaagtaactgaaattaatgaagctcttgcagaaaatccaggactygtaaacaaatcttgttatgaagatggttggcagatcaagatgacactgagtaacccttcagaactagatgaacttatgagtgaagaagcttatgagaaatacataaaatctattgaggagtgaaaatggaactcctaaataaactagtatgaaataacgcaasccagcagagttgtcttaaattagtggtggatagacttacaatagmaacttttarcattaccgatggggaagaaaaaactactgttaacactgctaatgaaagaaaatgccctttaactttctaatgattatagataaatagaatatgcgtctttttcacaatatcctatgatttttagactaggctctagtgttcagaattcatgaaattatccatggtaaaaactagttataaacattacaaaattcaaagataacattgttattcttaagctttaataatattgtaacttgcatgtatccatacctggatttgggatgaaatacttaatgatctttccattggaaataactggaagtgaagaggtttttgttgcttgtacagtgtcagatgaggaacaccactatcttaattttacaatacactgaattttttggtggtgctatttttatacagtgaagcaacagctttgcagcaaaataataaaatacttcttcattaaaacaacaacaacaacaaaacaaaacaaaacaaaacctcaaaaacatgaacaggactagaattcaataatagataaactttagttttcttctgaaatgtaatttttaaacctacagtcacctctgtttctaccaaagatgatcaaaataagatgaatttgtttgcaaaataggcccaatctcattaaacttaacctgattatttgcataagtgcagcaaaatagtgattgccctaaaggctcatttaagtttgctttgctggaatttttcataaggaatctcaaattggacttttaaaacctgactcaagtctaggaagccaaaccaaggatttctcatcatactttgcctataatacctatagatttgggtgaattcctctcttttttttttttgagagggagtgtcgctcttgttgcccaggctgaagtgcaacggctcactgcaacctctgcctcccgggttcaagcaattctcctgcctcagcctccccagtagctgggattacaggcacccgccaccatgcctggctaatttttgtatttttagtagagacggggtttcaccatgtttgccaggctggtctcgaactcctgacctcaggtgatctgcccccctcggcctcccaaagtgctaggattacaggtgtgtgcgcctggccgaattcctctcttcttgaagtccccaaataccctgagtttcctgggcctgtcgaaaagtggcattacttacttacctgtaaggcaaccacataggggaaccatgtaagggaaccatgtatgcagactaccaagccagtttttcctaagaggctttactagatcaataaagtcagccttagttctttaaagtattctggttatatctgaaaataggcattccagtcaaagccttggtaatatagccaataattccaatgtgttctgctacaaggggaacagattctttttgaacgtatgcagataactatattgccataaaaataaggatactcactaatagtttctgaattctggaggaatcaggaggtaaggagaaaaagtgatgacttcaattcttattgaaattgaataaagtatacttataaaagtatactttaccaagtggctgtaagctatagatagcttaaaagtgaaaaaaaaaaaagttttcttaaatatggaaaacaaaacattaaagaaccagcaatgtttcagccaaaaagtcatcccccaaaatcatcctcattagtttattcagtcccatgtaatcaaatcttgttctgtttgatcttgcttagcagtttcatgaatttatcagtttcttcattagagttttgaaaattcttacccagtgcagtggtatgatttttaagttatcagaaacctgaacctgcattctattccagggtacttgtcaaaatctttttcatgaatgtccttgaagaagaagcaattttggacaatagttgattgcaaatactttcggacaagaataatagtaaaacaactgtctgtgaataacaacaacaacaaaaaaaactggccatggttaaaaatatgagagttcattgtaataataacaaaattgatgaagaaaatttttttttttttgagacagagtcttgctctgtcgcccaggctggagtgcagtggtgcgatctccgctcactgcaagctctgccttccgggttcacaccattttcctgcctcagcctcctgagtagctgggactacaggagcccgccaccgcaagtggctaattttttgtatttttagtagagacagggtttcaccgtgttagccaggatggtctcgatctcctgacctcgtgatccacccgccacggcctcccaaagtgctgggattacaggcatgagccaccacgcctggcctgatgaagaaatttgattattcctgtgggataaaacattttaacataactaaaattatgaccgaaaacattatatgagaacatatcagatttttaagaattttatacagtttttggaacacacattaataatatacccatacagatataattcaaagaacgttaaacatcatttcttagttgacaatgtttcccgtgtaaatttaacatgtcaaataagccaaattatggctcacgcctgtaatcccaacactttgggaggccgaggtgggcggatcatgaggtcaggagatcgagaccatcctggcaaacaaggtgaaaccccatctctactaaaaatacaaaaaattagctgggcgaggtggcgggcgcctgtagtcccagctactcgggaggctgaggcaggagaatggcgtgaacccgggaagtggagcttgcagtgagcccagatcgcgccactgcactccggcctgggcgacagagtgagactccatctcaaaaaaacaaaaacaaacaaacaaaaaaacacaaataagccaaattagtttaatatctctctttctataaggagagaaaataaattattttgagatattccagaggccctctaaaagctcccaaatttagattgaggtcaaaaagatttaatttagaatttgatttggggaagtttgtcaacaatatcaaaaggtgtaaaactcttgattaaatcaggttatttgttatctatttaatcaaagtggcaacaaaatattttaaaggcaagtacagaaggttacatagttttaaaaacaaacctttagttcttttaatagagagaactccattttcttaagtaatcaaagacctagtggagaccatgtgaagcaccaaaaattattttgatagctcacaaaacctttgttttctatgccaattacttaaaaggtaatgaaaaaacttttcataatctcttatcaaaagcaaaccaatataccccccatcaaaaaaactttgtttttcttttctttttttttttttttaatggagatttattcttgctgcccaggctggagtgcaacggcgtgatctcagttcgccgcatcctccgcttcccaggttcaagcgattctcctgcctcagcctcccgagtagctgggattacaggcatgtgtcaccacacccggctaatttttgtgtttttagtagagatggggtttcactgtgttgcaggctgatctcgaactcctgacctcaggtaatccgcccgcctcggcctcccaaagtgctgggattacaggcgtgagccactgcacccagccaaaactttgtctttgacagaggagaccaaattctagttttgcatcagtgtactattaatgctaaggctaattttaaaaatgtcttctgaataaatctatcccgtctcagatagctttgatcataccagataagactcctttcctaagatttccttcctcaaacccattacaaccatttaaaaatatccatcaagccggccgtggtggctcatgcctgtaatcccagcactttgggaggctgaggcgggtagatcacaaggtcaggcgtttgagaccaacctggccaacatggtgaaaccccatctctactaaaaaaatacaaaatgagccgggtgtggtggcacacacctgtagtcccagctacttgggaggctgaggcagaagaatcgcttgtacccgggaggcggaggttgcagtgagctgagatcatgccactgcactacagcctggatgacggagtgagactccatctcaaaaacaaacaaaaaatatatatatatatccatcaacatttctttccctacatttttctctttctcattctgggaagatcagtcattctactttatggcagaattaattactcgtttttcccctaacagaaaaacacatcctcatgccttataattttccttaccaacaatgtatcttattttccttgcattatttgcatacagagttgttacacttataatttctaatagttttaattccatatattaatttgaattttaaattttagtatccttaatttctagtgaaaactaagaagtaagcaattgtgaactgtcacataccaacattctgtagattaacaccatttcataatttctagaaatacatgcatctccataatacaatttttcaatgtggcacagaacatttttactgagacccaaatatatttcgttcttctgaaataagaagcaaaagtagataaactcatgttcagtgattaatgtttcagcattatatcttacatagaaatgacccatttgataaatgtttgttactcattttaatttagtataactttaagcttgaagttgccaaaaaaattttggaattatttttaactggaaatgttttataaaacgtaattgttgttggaaaagattatttataagcttttatcccacttatatctcatttaattcacttgttcttaacaattatgcttgaattaaattactcatgaaaatttcatgagacattaaacaaagctagccaccatcttaagttatttttcttgttgacaaattaggcaagtatcaaaaataccacagaagcaaagaaactaaaagttaaatatataagtggagataatataagcttgtttgactagtaaacccaagtggaaaaaaatgtatgcctgcattatatttaatgctaacaattctgaagacgtttctgattttcttttacgaacaatttaaaaactaatcttatttcttgaaaatttacccaagttggcgaggcgtggtggctcacgcctgtaatcccagcactttgggaggctgaagcgggcagatcgcgaggtcaggagttcaagaccagcctggccaacatagtgaaaccatgtctctactacaaatacaaaaaattagctgggcttggtagcaggcacctataattccagctacttgggaggctgaggcaggagagtcgcttgaacccgggaggcagaggttgcagtgagctgagatagtgccattgcactccagcctaggcagcaagagtgaaactctgtcaaaaaaaaaaaaaaagaaagaaaggaaaaaagaaagaaagaaagaaagagaaagagagagaggaaggaaggaaggaaggaaggaaggaaggaaggaaggaagaaggaaggaagaaaatttacccaagtcatctaaactcaaaaaagcttggggttagtttctgtttctttcttttttttcagagacagagagagagatgaggccactatgttgcccaggctggtcttgaactactggactcaaggaattctccaagagattctcctgcctcagcttctgaagtagttgagactgcaggatcatgccactacacctggcttagactctacatttctgagagttttaggaatactttatacaagcactcatttatttccagaccaatttgagtagaattcctttaaggaattttataaataaatgtgataatactatccagaggtaggaaaaataccagctatgcataacatacaaatacatatacatatgtaaacatatggacagatggcaaagatcttacaggtttttttttttttttgagacgaagtctcgctctgtcacaaggctggagtgcagtggcacaatctcggctcactgcaacctctacctccctggttcaagcgattctcctgcctcagcctcccgagtagctgggactacaggcgcatgccaccacacccagctaatttttgtatttttagtagagacagggtttcaccatgttggccaggatggtctcgatctcttgacctcgtgatccgcccacctcggcctcccaaagtgctgagattacaggtgtgagccactgtgcccagccgatcttacagcttttaacatgttagccatgtgccaggtacaataattcaaaacacactaatttataaaataaacggctagatctaaattgtgtttttggcaggtataacaagttaagattaccttctcagttgtctaaagttttttaccaatatttgtgggaaagacttttaagattttttacttacctggtttcaaatagctcttttttttttttttttctgatgacaattccctccctgaagtttgtatttcccaaaggtaactattagg

SEQ ID NO: 93859 - DNA, 12968 bp, Homo sapiens
ctaatattatctgttttattcactcttgcatttatacaacatggtcctaagcaataatatgcataacattatggactaatgtgttaattattcactcccattaaaagaaatgcataacagtgaacaatttttactatttacatgtactttctaacatcagtaacttcactttccacctgttgtacatatttcataattttgtgttcagtttcatctatggctgtaaattaaacaattctaccttggaaaatattttcacagaagaataaaggatccaaggacagtagaaaaaaatgaagctcaaggtcaatgatttggccaagttcatcaaattctgtataaaagagactaaatcatgcaagtactgcatttttatcatgaaaaggtgctctaactgtttgctaagacagttcctcaaatttaccaccaaattgatggaaaacctagttttcatgatgatctagttccctttgttctgacttcacaactaaatgcaagatgttaaaacgtgatttcttctatctcagattgggaagggtccctgagaaacagcggccctgtcaaaatgacttgctgtccacctaagcagcacttgatcaaaaggagacaaaaacctgagctctagttctaatgccttcactatgggaaataaggaaaggaaacaagcatactgtctcatcgtaaataccacagagaagatagcgcagtaatggaaactacgctaacaccttgatgtataagactgatcgtcctcatcaagacttttttttccttttgcaatgttttatgctacatatttcattatttcatacatacacacacacacaaattaccacattaaacttcccctacaaaccaatgtatgtgttgttgtattttacaggttataaaacagaggcatagcaaggatgaataaccgtccaactcttttgttgttgttgttgtttctttttaaagagacaggatcttactctgtctcccaggctggagggcagtggcgcagtatcggctaactgcagactctgactcccaggttcaagtgatcctcctacctcagcctcctgagtagttgggattacaggtgcactccaccatgcctggttaatttgtgtgtgtgtctgtgtgtgtgtgtgttttgtttgtttgtttgtttgtttgttttgagatggagtctcactctgtcacccaggctggagtgcaggtgatctcggctcactgcaacctctgcctcctgagttcaagcgattctcctgcctcagccacccgagtagctgggactataggcccgtgccaccacgcctggctaattttttgtatttttagtagagacagggtttcaacatgttagccaggatggtctcgatctcctgacctcatgatccgcccacctcagcctcccaaagtgctgagattacaggcatgagccaccgcgcccgacctaatttttgtggttttggtagaggcaggatttctccatgttggccaggcaggtctcaaactcctcgcctgaagtgacccctctaccttggcctccgaaagtgctgggattacaggcatgagtcacagcacctggccctgtacaactcttatagtaagagcctcaaatagaaaatgtcagagctggtatctggacaagactatacaaaatctatacccgacatcgctgtaacacaaaacttatataacaacttcatttaaagagacactaacctatataataattcattttgtgtgagctctgaaatcttagcaaatgcatctgtgtgctcaaaatgcaatggggatgaacagaggatgtttaaggggtacaaatataagaaatgatataagaaataaggcctagtgtttgatagatcaggaggatgactatagttaatgataatctactgtatgcttcaaaatagctagaagagaataatttgaatgtttctaacataaagaagaggcaaatatttaaggtactcgatatcccagtttccccgatgtgatctttacacattatgtgaatatattaaattatcacatgtaccctgaaagtatgtacctctattatgtatcaataaaaagaaataaggccaggcgccgtggctcacgcctgtaatcctagcactttgggaggctgaggtgtgcgaatcacctgaggtcaggagttcaagaccagcttggccaacgtggtgaaaccctatctctacaaacatagaaaaattagctggacgtggtggtgcacgcctgtaatcccagctactcgggaggctgagaaaggagaatcatttgaacccggtaggcagaggttgcagtgagctgagatcttgccactgcactacagcgtgggtgacagagtgagactccatctgaaagagaaagaaagaaagaaggaaagaatgaaagaaagaaagaaagaaagaaagaaagaaagaaggaaggaaggaaggaaggaaggaaggaaggaaggaagaaagaaagaaagaaagaaagaaagaaagaaagaaagaaagaaagaaagaaaaagaaaaagaaagaaagaaagattttaaaaatatgcaatgggacacgaatgcaattttccagtttcttaggaaacacactttatttcatccctcctaagacacacctctccataattccatcggggctctattcccatttcttccctttccagagaagtaaaggacttgttatagttgaggaaaaaggagaaggcttacttctttcctctttcatgccagaaacttaatcgaaggggtcagatctacttattcaatggctttcagaggagacatgcaggaggccccacataagagggaaggcctagggccacctttctgaggtttaagagaccaggaagagctcagtacaccaaatatctttagaaattaggtaagtaaaatattactcaatttggtgcaatttaacctgcaccatattattatgacaatcttgtattacttttaatggcaaaaattgcaattactttggcaccaacctaataaatagtgtgcattgtctttcccatagatagccactgctgcattagggaaatctgtgtgcaggaaggtatctatggtttggtacctccctgtcagcaggttaagagcaaatattgcaagggtaccctggggctgaagaaattgcaagtgttaaacattatatttttgcacataaatgctatgcaaaaagtcattgatcaatgcagtgtactcaacagtggtttttaccataaatggagaagtctttgtctgggacaatattttacaatgttcatcggtttccaaaaaatgacttaatactggggcataattctgactattcctctgagtggaagtgtgcattgggtctgaaaatgtgtcgttaaattaggctgcaagacaagttatgctaataaagaacccgggagaagtggcttgtgtctgttcaagacaaaatcatgctgaagtcacagagaattttgtttacygttggyttatactttattattcctgcttcatataaaacagtcttctcccaaagctcgtaaatatcaaagtagatcttttctaaagttctgcaggcaaatgaaagtagttggaaatgtacacaggaaatctacacaagggagaatcagaaaaatcttatgagcatgttctcaatacaattttagtgatcaggagtggtggctcatgcctataatcccagcactttgggaagtccaggggggcggatcacttgaggtcaggagtttgagaccagcctggccaacatggtgaaaccctgtctctaccaaaagtacaaaatttagccgggcattgtgaagggtgcctgtaatcccagctaatcgagatgctgaggcaggagaactcgggaggcagaggttgcaatgacccaagatcgcgccactgcactccagcctgggcgacaacagcaagactccatctcaaaaaaaaaaaaaaaaccacaattttaaaggatgaatatggttgcaaattgggcaggttatgtatggtctgagttatttcttaagacactgcaacaagtctgatgcgtcataagcacagatgtctccagaagccaggcaggtgtcattactgaacagacaggatgaaagtcaggaggcagagatggagtcagagaacagccccgagctagagccccttccacagaggcagctttacccagctctaattgataccacacagcaacggagacacagtgcaccaaccaacatcatgtgatttttaaagataagacagtaatgaaaacttttagtgaactattccaatgtcaaactttaccttccaaaccaaacattataaatagcactgtatatgctgaaaagaggcactgtttagccaagtacctgccctggggctgcagtctatgtcttttgcctcatactatagacacttgagtgcaagtctttctacccagtgtgtctgtcagcatcacagagcggatactctacgtatcattcacctttacattctcatcacctgcaaaaatgatctccacacaatatacatgaaaaaagaatttgcttcatgataaagctgctaatgaatgtcggccagaagaggacttcaaggcagagcaatattagctgcgcattgagtcctcactgggtcaccattgtgtccacatttacctaaggactccagtgataaaattattgcatttctaaatgacaggaaaattggatggtagtaaaaattatgtagattaactgttggaaggtatattatatcatttaagggtctaatatcaattttctaatctgaaagctagaccagatttaacatctcttagtactcaggtcttaccactgcaattcacttcccacctctgtacaatttccccacatcatcccctgtgcccagaatgctcatctcttccctaaagtccctgaaaactccctgcttatcttttagggccctgctgaaatcaaacttttttttttgaagtcttccttgtccctcaagccaagtgatttccttcaccctcggcgtccccatgaaaccatgttcacacaagtgtaatacaattatgtgtctacaattactttcctgtatgtctctgagggccaagaataaatgtatgctttgtgtatcaaactgtacacttgacctctatactttcaggaatacagtgctctgtccttaaatgttcatttgtaaatacagaaccattttcttgttaatatcacaaaatgaaacttaccaggaagatgaatgacaaccccagaacacagtgttttgtagaaaataccataggctgaaaagatcacaggaataccgagtgctaggttggaatctttcatgacaccaaatgttcattcattctctgccagactttacaactgtcctcggtgtgtttttaggttgtgtaactttacacaaagtggaagcaataatcagggcaagacttaagagaaagtggatccaatgcaagaggagcaaaggaaaaaatccctcaagtatgtgtagcagattgttttaattatctacagaatcttgtgccctaagaaattaatagctcaagtttccagcaagagtggtggatgagatggagagcatttgtgtgagagagaaccaaggatattactaaaaatgaaagggaagctgggtttctcctgggcaaacagccctcagtggctctatttgttctaactactatgcctgccttcatgtactttggtcatttagtggcctgccagaggacagttataaaatctgtggtcattctgcaggcagcatatagttttcatccagagtttggatctaaccagcaaaactctgtcttacacaggatgacttggaattagagtccttatagcagaaagagcagcagggctgtccttgggtatccgttgctcagccaagtcatcaaataaaaaggatgattgcacaagtggactatgtaccaatctgtgggtttctgcatggccaagagccagaccctccctctgggctctgctggcccaacccaccaagggatgctttatttaaacagttccaagtaggggagaccagctgcccctgaaccccagaacaaccagctggatcagttctcacaggagctacagcgckgagactgggtaagtcaacgatccccagagctgggacagaaggggcagcaatggggcagcaactgagggagaagagagctgacgttagtgcttaggagacgttscacactttgcrgacaggaagtaaaggaaatgggaccccagagtggccrcagaggggcctgtggggtaagacactacagtgtgtgtcataaccaagacccratcagggagtagttacttctcttcttttcttacaggaaacatggttccaaaactgttcacttcccaaatttgtctgcttcttctgttggggcttctggctgtggagggctcactccatgtcaaacctccacagtttacctgggctcaatggtttgaaacccagcacatcaatatgacctcccagcaatgcaccaatgcaatgcaggtcattaacaattatcaacggcgatgcaaaaaccaaaatactttccttcttacaacttttgctaacgtagttaatgtttgtggtaacccaaatatgacctgtcctagtaacaaaactmgcaaaaaytgtcaccacagtggaagccaggtgcctttaatccactgtaacctcacaactccaagtccacagaatatttcaaactgcaggtatgcgcagacaccagcaaacatgttctatatagttgcatgtgacaacagagatcaacgacgrgaccctccacagtatccggtggttccagttcacctggatagaatcatctaagctcctgtatcagcactcctcatcatcactcatctgccaagctcctcaatcatagccaagatcccatctctccatatactttgggtatcarcatctgtcctcatcagtctccataccccttcagctttcctgagctgaagtgccttgtgaaccctgcaataaactgctttgcaaattcatctgaaagtgtctgtgtgtcttcattagccgctctgctgtcatttagtgacaatctactctagagatttttcttcctctaacctgagacttccgggaaacagagagatttgaagataagagacgctttctgtcatgaaacagcacagtcttatccctctccctgctttaggctgagaagctgaggtctcaaccgatatctagcaactgtcgaagactcttgctttgatcaagctttagtcatctcctctaaaccctcttcacaactaggtcatcctgttgggcttcctagtccttccttgtagagtcatttgtatttattttttattttattttattttattttattttattttattttattttatttattttattttttgagacagagtcccgctctgtcgcccagactggagtgcgtggcgagatctcagctcactgcaaactccacctcccaggttcaagctattctccttcctccgcctcccgagtagctgggattacagttatgcaccatcatacccagccaatttttgtaatttttagagagggggtttcaagatgttggccaggctggtctccagctcctgacctcaggcaatccgccctcctcagcctcccaaagtgctgggattagaggcatgagccaccagtgccagacctaaagtcaggtttaacagaagtcctcctaacttggtttatcatgagtctctcaccctcaatatttgaccaaattccttaattcccccatcatcctccatgtgataactgattcctgacctaccttcaaaaaacaaaaatccaattacatcaacttagcattggtctccctagccttgatatctcctctaggtaattttccatccactgaccccttcccgacaccaacctataacgagtatagatctccacttgttttagttgtatttcacaattgagcccaatttgatactgaggtcctatatgatgctctatggttgaagtctggtttttattgacatgatttctatcccaagagatataggggctgcagtgaaaaagctgaaaatgcacatgtttcattatgatttatgaatgataaattttgataggattgaatgttacaatagaaaacacaaaaacagaaagtagaaaaagtgaagaatgctataaacatggtgaaaccaagataaaaataagtttagcctcagagatattccttttaaatgagcacatcaaatctccagctattagcaattgtactagaggtacaaccagggtttgagtcaaatgtgcaattagataaattgttcagacagcaatatggacagattgtaatgctgcctggaggagaggtggacatctttcccaaaacttccatactgggatactcataatcaatccctaatgactaataaccaatttttgataataataaactacataatcaaatattatacacaaattcattgatagtgttttctgccagcctgtaagtgccacacctaaaaaacttcaaactttagtgtagttcccattcggatcacctgggggaatttttgcactatggattcgtgggctccattccggatatactcacacagaacatctgcacatggagctcaggattctgcattttcaagcatttcctcaagtggttctgaaacaacctgtctccagcccaactttgagatccattttttaccaaactctggcttcagaagtcttcaagtacatcagaagtaatctcggtgtggggaaattccaaagcacaggaagcgatgataccatttgcattattacccagacaattttagccacacacacctattatccagcatttatgtcttgatttgaggcttctattcagttgaccctattgatatccaagtgtacacaactgacctgtcaggctatagcaacactcttcacttatatgtagggagaatttgtacagggcttagccgaagttcatcatggggtatgaattgacttggtctcattgctgtaacccttgggttcagaagacactgaacaaacgcttaagaaactgttttaggttaatgcatgaggagatatttaacgcctcagatagccaaagaatcatggagaaggggttgaggtagatggcccaatagaagtgtccattgattgcacccccacacataccagcagaaacaccacatttaacaactatctacacacaaaaaagcacctacataggaaatgaaaatcaagtcaacaatcatagtacctattttaacttcatatcactgaaagaggcactgaagaggttaggaaagacaattttgaatcactgaggccaccactcccccatctcccaacagccgccacatggagctgagacagaatctgagagcgtgggggagggacagtgcagcaattgtggaaatctgcattgaactcagtgctgccctgtcacagcccacccacagaaggagcatttagaccaccttagcaaaaggggaatcgcctatcccagcggtcagacactgagtttgggaaagccttgccacagtaggctaaagtgctctggggtcctaaatatatttgaaactcaatctaggccacaagaactacaactacaaggcaagtcccagtgctgtgctgggctcagagccagtggacctagacaccactagtgtgacacttgtcagggcagctaagggagtgcttgcacaactgctcccccaaccccaggcagcacagctcacagcaatgaaagtgactccttccttctgcttgaggaaaggagaggaaagagtaactaggactttgtcttacatcataaagatcagctcagccacagtaggatacagcaccagtcagagtcatgaagctgccattccaggcactagacacaccctgcaccagaagaaaacccactgcctagaaggaaaggacccagtcctgccaggattcatcacctgctgactgaagaaccctcaggccctaaataaccagcagcaatacccagtagtacactccatgggccttgggtgagactctgagatatgctgacttcagatgagacccaccatattcacagctggggcagtcatgaagggacaattcttccgctcgagaaaagcagagggaaaagtaaaggggactctgtcttgcagcttaggtagcagctcagctacagcagggtagagcacgaagcaggctcttggagtccccaattccagatcttggctcgtggttggcatttctggacctgccgtgggtcagaggggaacccactgtcctgaagcgtgagtcccaggccaggcagcattcaccacaagctgactgcagagctctggggccttaagggaacattggcggtagcctggcaatactccccttgagcctgtggtggaggtagccacagggagaggctcctctgcccgtggaaaggtaagggaagagtgaaaggactccatctcatggcttgagtgcaagctcagccacagtacaacagaacagcacgtaaacttctcaggttttttactttggtccctggctctcagatagtacctctggacatgcctaggcctagaggaactcatcatcctgaagggaaggacacaagcccgacgggtattgtcacctgctaattgtagacctctagggccttcagtgaccataggcaatagccaggtagtagttacagagggccttgggtgagccagagctatgctggattcaggtctgacccagcacagtcccagtggtggtgaccacaggggtgtttgtgtcaccccaccaccagctccaggcagctcaacacacagagagaaacatcatttgtttgagagaaacatcatttgtttgagcgaaagtaaggaaagaaaacaagagtctctgctttgtaatgcagagaattctgaaaaaattctggagtttaaaatgcaatcgacacactgaagaatttcatgagaatatcttaatagtagaattgatcaagcagaagaaaaacttcgtgagcttgaagatagatgagttgaaaaatacattatcaaaggacacaaaagaaaaaataatgaagcacagctacaagatctggaacatagccttcaaaagggcaaatttaagaattatttatcttaaagaggcagtagagaaagagatggggtagaaagtttattcaaagggaaaataacagtgaacttcccaaaggtaccaatatttgagaaagataccagtgtttgagtgcaaaaagattagagaacaccaagcagatttaacccaaagaagactacatcaatgcatttaataatcaaattcaagaagtcaaggataaagaaaagatcctaaaagcagcaagagaaaagaaacaaataatacacaatggagctccaatatgtctggtggcagacttttcagcggaagccctacaggccaggagagagtagcatgacatatttaaagtgctgagaaaaaaaaattaccctagaataaaatatccagtgaaaatatccttcaaacatgaaggaaaagtaaaggctttcccagacaaacaaaagctgagaaattttatcaacattaaacctttcctataagaaatgataaagggaatacttcaatcagaaagaaaaagacattaatgagcaataaataatcacctgaaagtataaaactcactggtaacagcaagtacatagaaaacacagactattataacactgtaattgtgatgtataaatcactattatcttaagtggaaagaaaaacacgaactgatcaaaagtaactacaacaacttttcaagacatagtacaataagacataaatagaaaaacaaaatggtaaaaagtgagggaatgaagtatagggctttttttttttttttttttttttctgagacggagtctcgctctgtcctccaggctggagtgcagtggcgcgatctcggctcactgcaagctccgcctcccgggttcgcgccattctcctggctcagcctcccgagtagctgggactacaggcgccctctaccgcgcccggctaatttttttgtattttcagtagagacacggtttcaccgtgttaaccaggatggtttccatctcctgacctcgtgatccgcccgcctcggcctcacagaagtatagggtttttattaattttctttttgcttgtttatccatctgtttgtttaagcaatcagtgctaaattgtcatcagtttaaaataatgggttataagatattgtttgggggcctcataataacttcaaatcaaaaaacataaaacagatactaaaaaattaaaagcaagaaattaaatcatacaccagagaaactcaatttcacgaaaagaaagacaggaatcaaagaaagaaggagaagaccacaaaacaaccataaaacaaataacaaaatgggaggagttagtccttacctattaatagcaacattgaatgctaatggactatcctctccaatcaaaagatatagaatggctgaatggtttaaaaaaaaagactcaatgatctattgcctacaagaaacacacttcacctataaagacacacagagactgaaaataaagtgatggaaaaagatattccatgccaatggaaaccaaaaaagagcaggagtagttatatcagacaaaatagatttcaagacaaaacctattagaatagacaaagaaggtcattatataatgataaaggagtcattcagcaagacgatataacaattgcaaatatatatgcatccaactctggaacacccagatatataaagcaaatattattagagctaaaaagggagattggccccaaatactggatagctgcaacaccccaatttcaccattggacagatcttccagacagaaaatcaacaaagaaacattgggctaaatcttcactatagaccaactgaacctagtagatatttatagaacatttcattcaatggctgcagaatacacattcttctcagccacatggatcattgtcaaggatagaccatatgttaggtcacaaacaaaatcttaaaactttcg

SEQ ID NO: 93860 - DNA, 28892 bp, Homo sapiens
gcagactccttcttcacactgcccatgatgtggcatctaaacataaatctcaatcctggtgcttcctgtttagaacccttagagaactgcctgtggctctgtgaccctcatcatttagcctcctgtaggtctactggctctaggatactgtgataacagccacgtatatgtataaaaggcacactttatgttattgtgctttgctatattgttttacttcgcagatattttgcaaatttaaagtttgtggcaactatgtatcaagcaagtctattagcaccattttttccaacagcatgtactcacttcatgcttctgtgtcacgttttggtaactcttgaaatatttcaaacttcttccttatctattatggtgatctgtaattactgatctttgatgttagtgttattaagtgtcttagagttcaacaaaccacacccatataagacaacaaacttaaatgttatttgtgttctggttgctccaccgactggctgttccccatctctctccttctgctctagccttcctattccctgagatacaacaatgttgaaattaggccagttaataatgctgcaatggcctttaagtgttcatgtgaaaggaagagtcacaaatctctcactttaaaacaaaagttagaaacgattaagcttagtgagggaggcatgttgaaagctaagatgggccaaaaagtaggcctcttgcaccagttagccaagctgtgaatacaaagaaaaagttcttgaagaaaattaaaagtgctactctgttaacacacgaatgataaaaaggcaaaacaggccaggcgcggtggctcacacctgtaaccccagcacattcagagaccgaggtgggcggatcacctgaggtcaggagttctaggccagcctgaccaacatggtgaaaccctgtctctactaaaaatacaaaaaaaaattagctgggagtggtgtgcctgcctgtaatcctagttactcaggaggctgaggcaggagaaatgcttgaaccagggaggcaaaggttgcagtgaggcgagatcgtgctgctgcactccagcctgggcaacagagagaaaactctgactcaaaaaaaaaaaaaaaagaaagaaagaaagaaaagaaaaagaaaaacagccttattgctgatatggagaaagttttagtgacctggatagaccaggccatccacaacattcccttaagccaaaacctaatccagagcaaggccctgactctcttcagcactatgaagcctaagagaggtaaaaaaagctgcagaagaaaactctgaagctgttagaaattggttcatgaggtttaaggaaagaagccattttcgtaacataaaagtgcaaggtgaagcagcaagtgctgatgtagaagctgcagcaagatccagaagatctagctaagatcactgatggagataaccacaggaaacaatagatttttaaaaatgtagatgaaacagccttctatgggaaaaagatgctatctaagactttcaaagctagagaggacaagtcaacacctggcttcaaagcttcaaaagacaggctaactctcttgttacaggcttatgcagctgttgaagcccatgctcacttaccatcctgaaaatcctaggaccctgaagaatgatgctaaatctagtctgcctgtgttctataaatggaacaacaaagtctgggctaagaaaaaagaagatttctttcaaaatattactgctcattgaaaatgtacctggtcactcaagagccctgaggatgaagatgtacaaagagattaacattgttttcacgcacaacatgctgcagtcatcattctgcagtccacgagtcaaggagtaatgtccactttcaagtcttatttaaaaaaatacattttataaggctatagttaccataaataccgattcctctgacagatctgggtaacataaattgaaaaccttcttgaaagaactgaccacactagatgctattaaaaagatttggtgattcatgggccaggtgcggtggccacgcttgtaatcctagcactttggaaggctgaggtgggtggatcatgaggtcaggagttcaagaccagcccggccaagacggtgaaaccccgtctctactaagaatacaaaaattagccgggtgcggtggcagatgcctgtaattccagctactcgggaggctgaggcaggagaattgcttgaactggggcagcagaggttgcagtgagccaagatcatgccactgcactccagcctgggcaatagagactctgtctcaaaaaaaaaattggtgattcatgcaaggaggtcaaaatatcaatattaacaggagtttagcaaaagttgattccaactcacatggatgactttgaggggttgaagatcagtggaaaaagccattgcaaatgtgaggaaaacagcaagagaaccagaattagaagtagagcttgaagatgtgactgaactgctgcaatctcatgataaaacttgatcagatgatgagttgcttcttgaatgaacaaagaaagtggtttcttgagatggaatctactcctggtgaagatactgtgaatattgtttaaatgacaacaaagtctttataatattttataaatttggttgataaagcagcagcagaattgagaggactgattccaattttgagagttcttctgtgagacaagtgttatcaaacagtgccttctgctactgacaaatcttttgtgaaaaatttctgcaaaaaggaagctgggattttgataggaattgtgatgaaacgctacatcaacttgagtattgccatctgaccaatattgacttcaaatcattaaataagaaatgtctatttatttagatctttagtatttccaacaatatttaatacttttcagtgtacaagtgttacacttattttgttagatttatttctttttgatgctatggtaaatagaattgttttcttaatttattttcagattattcattgctataatagactagagcatatttttgtatattgattgctatggactatgtcccccagatttcatatattacagctctaaacctcaataaaatggtatttggagatggaatctttgggagataattaggtttagatgaggtcatgatggtaacagtggccttataaaaagggacaccagagatcttgctctccaccctgacccaaccccaagcacacacgaaaagaggtaaatatgagcataccatgagagggtaaccagtataagccaaaagaaaaagcctcagaatgaaatctgtcttgctggctttggtcttaaacttatcagccttcagaactgtgagaaatacatttctgttgtttaagccacctcatccatagtattttgttatggcagcctgagctgaccctgatagatcatgtataatgtaactttgctgaagttatttgttttaattgtatgtatgtgtgtattccttaataatcctatataaaagattatgcaactgtgaatagagatagttttactttttcctgtctcttctggatgacttttattcattttattttcttgcctaattcccttagctaatatttccaatatattgttggatagaagtggtgagagtggaaaaatatttgtcttgtgaatgatcttagcagaaaagaattgcctttcactcttaagtatgatgttgtggggtttttctaagcatctttatcaggttgaaaaatttctcttcttttcccagcttgttgtgtgcttttatcatgaaagcatgttgaaatttgtccaatgctttttctgcatctattaaaattatcatatagtttttgtcctgtattcaatggtacattagattaattgatttggggatgttaaaccaactttgtatttttgaaataaatatcatttatttgtggtgtataatttttttttcatatgctactgaatttggtttgctagtacttttctgagtattttgtgtttattaataagggatattggcctgaagttttattttcttttttctttccttttttttttttttttttgtgagacggaatcttgctctgtcacccaggctagagtgcaatggcccaatcttggctcactgcaacctctgcctcctgagtttgagtgattctcctgtctcagcctccagagtagctgagattacaggcacacaccacaaggcctggctaatttttgtatttttagtagagagaaggttttgtcatgttggccaggctgtctcaaacccttgacctcaggtgatcctcctgcctcagcttcccaaagtgctgggattacaggcatgagccaccaggcccagccgaagttttcttttcttgttgatttctttgtctggttggaatcagagtccacacctggctgaagtttttgtttcttgttgatttctttgtctggttggaatcagagtaatacttgccttatagaattagttgttaattgtttcctcctcttctatattttggaatagtttcttaagtgttattctttaattgttcagtggaatttaccagcgaagccatctggacctgtgcttttccttctggataggtttttttttttttcttgctaattcaatttctttaattatgttagatctagtcagatttttctttatgccttcttgagttgatttaggtagtttgtgtttttctaggaatctggccattttatctactttatcttttttaagcatagttgttcatagtattccttcttattcctgtttatttcagcaaggctattagtgatggttcttttattcttgcttgtattaaatcttctctcttttttttcttagtttcactaaaggtttgccaattttgttgatccttttagggaaccaattcctggtttcattgattttctttattgatattctgtctccttcttttctaatctttaatatttcctttcttctgtttgcttttggtttagctttcattttttctagtctcatgcctctaatgaaaggcctcatctcttccaactcattctcttcaactgttgcctaagttgtttgtatatctgaaacataaatttgatggtgtcacttagaagcttaaaagtcttctcattgttcccattccttaaaaagtaaaattcaaattttgtataatggcaaacaacacctttcataatcttaaccagtttaccttaacaatcaaacccacctttccaatcacataaaatcacctggaatttatatatacatttttaacctattttcctttgtacttgtgttttctcaatttgttcttttctcctactgactttttagaaagtcacccacgctttttagttatttccttttccctggtaccatcacactttgcatcaacttcttttagaacagttaccaaattatttattaatacacgccttcttcattattctttgaattccaggatgtgaaatcccattttagaaattatgtcccagtaactgacacatagtgagtggtcagtgtttgtggaggtaggaaaaagtggtatggtctgatatcatttcatctggaaataagatgatgtatttcagccagtgaaatcgaaaagagcgatggaaaatgacctcacactccatagggctttggttcgtaagacacagagaatactgatatccttgtgcgaagaactaacttgctgttgagagatcaattcagaggatgctcaagctccgttatcactttcattttactaaactgagaaaggaaggttgaggaatgcatcaacggttaagcacagtgcaggttcctacagcgactggagttttttggtagttgggagtgtttccctcaatctttgggcaagccgtcagcagtggcaggaacaggaacagacagctgggaaaccctttctttccccaatcgtcttctagcttagctttaggcttgtatgcccatcgcgcatgcgtcaatttttctcttttaagatgggcggggcagagtctttgctcctttggcgatcctgaaggggtggagctaagctgtttccagggtgacagagtggcgacctcggtggtcgattgagcaggtctgagaattgttcccaaagggttgtgcgtcaccgagtcgttggcrctgtcatggcgggtgtgctgaagaaggtgagacgaatggaggtcactgttggaatttagactgtgggggtagactcagtccgatagccctacttcccgcgggtgttgacccctactgtcgcgggctcggcggtgcttttcggggactcgttctgcatgccttaccgggtagggcaggttagtggttccgctccgagagtcaggaaaaaagctccaaacaagcgagactgagagaccagtagctggctttagaccagttttagccgggggattcgtggttttgtatttccttagcgkgctggatgtatggaaaccgtagtaaacagcatgaatcgtgttttgtttttgaacagaccactggccttgtgggattggctgtgtgcaatactcctcacgaggtatgtacctttgttctttyttcgttcttgaattcccaaggaagactaaattcctgtcactttgcttattgcagggttaacgggatacagatgtttcaagcccttaattacaagccgcgtgagctcttgagacacgggcgctgtccacctacttcgttgatccgatgtcacatttttatttatttttgccatgacctctttattaagccagttttcttgttgactttttccttgacattttcatggcttcacttgtgcttgcttctgtcagcgccatctcaaatttatatctccgttttccatcttttctccttgccttaccgtttctgcttaggtgcgttggattacatatatttaggcttactaaaggtactgcccccttttccttctgttaggtcttttccatctgtattcacgaatgttttcatcaaaaaaacccacaaaatttttttattcttcttgtcccttctataatcacaccatttctttgcttcactttacagataactcaaaagagttatctctattttctccaatttctttcttattcacccttgaatgcactcagtcacccttggcgtttttcaagttcaccaattatctccatgctgccaaatccaatggtcagctcatatttctcaccttcattgacctaatagcagcgttttttgacacatttgacactttttccatcacgctcttttcaagttcaccagttatctccatgttgccaaatccaatggtcagcttatgtttctcaccttcattgacctaatagcagcgtttttttttttttgacacatttgacactttttccatcatgcgctttctttactgggcttcaggactcccccagtctcctgattttttccccctactctttggctttctctttttctggttatttctcttatgcccacttttaaaatttgagttagtcaggatttagttcttggaccttttcttttggacctgtactctgtcaccaagagagagcaaatccaaatagagaacggttttaaataccacctatacactgacaacagatttccatgtaaagcactgacctcttcctttataaaagtcctgaatatttaattgcttagtgggcatctctatttgtatgtgtcagacaggcaacccaaacttaacatgtccaaaatggggttcctgatcttctgcctaaaacctgctcttctctcagtcttgctcatctcaattaatggcagctcaattattttgactcaggtcagaaacttgaaatcatctttgattccttcctttctcttacactccacatttgttatttcagtaaaccctctaggttccaccttcaaaatatatcttgattttgacaacatctcactacctcctctgctactaccctcttcctcagtcaccatcatcactgatgtggataattgcattcacttcttaactgcctctcaatgcttgtcacagcctccatttggtctttttttccagccaggctactagagttagtctgttaaaatatgaggtaggtcagatctctcctttccttaaaactaatggctttccatttcactctaaataaagacaagtttcttactgtgaccctctggttcactattctactgatttattttgttatgtctctactagaatgtaggtttcatgaaggcaggratttgtaattgtttcactgctagaactctgtcacatagtatgtgctcagtaaatagtgttagttgaatgagtgtcttgcacttcctatgatttcataataactttattgtcattgatgtaaagaactgaactcatggtttttcccttctaaatatatttcttcctctgtgggctgtatttttcttgatagtttcagatctttctactccctaggctgggaatttggacatcatagttggtatttctcttatacttgtactctcatattcattccaatgatgatttttatttttattttttttgctgatccttttctataacagctctccagtctgacttctgtttactatttctattgttactaccatagttcaggtccttgttcttgtttagagaattgcaacaacctccttactggcctttctgccttgtttctccttcagtccttttaactcactacaatgaagctaattttcctaatctaatcatatgattttcctaaatcttttaattgtccacagaataaagcccgaatgctttaacttggaatgcagaaccacttataatgtgacattttctctaactttatctcctatgcatttccttatgtgtcctgtacagcagtatattccaaaatccccagtggatgtctgaaaaccacatatagtaccaaactgtatatatgctatgttttgtttcatacatacctataataaagtttaatttatgaattaggcacaataagagataagcaggctggacgtgctggctcacgcctgtaatcccagcactttgggaggctgaggcgggtggattgctttagcccaggagtttaagaccagcctggccaacatggcaaaaccccgtctctacaaaaaatgtggaaattaatcaggtgtggtggtgtgcacctagtcccagctactcgggaggcagaggcagcaggattgcttgagccccagaggttgaggctgcagtgagctgtgatgatgccattacactctagcctgggtgatggagtgagaccctgtctcaaaaaagaaaaaaaaaaaaaagagataacaactaataaaatagaacaattataacaatatactgtaataaaagttatgtgaatgtggtctctttgtctcaaaatatcttactgtactgtaccaccctcttgtgatgaagaaaggatagagtgggatagtgtgagatttcaccacactactttgaacggcacatagtttaaaacttataaattgtttatttctggaatttttcatttaatattttctgactgaggttgactattagtaactgaaaccttggaaaatgaaaccacggatgggtaaaggggagctactgtattctaaccaagtgctggccattaaaaacataatgcgagccttaaatgtaagccatatttgtatgtaatttaaaattttctaggactaattttttaatgaagaaaaaggtaaaatttaattattttatttaccctaacaaatctaaaatattgccatttcagtatataataaaaaaattaatggtattttatagtgtttttcttcatactaaattttccaactctggtatgtatttatacttataacacatctcagtttggactagccacatatcaaatgctcagtagccatatttagctagcatctactgttttagacagcacagttcaagaaaatagaactatataccacttccttatgtttgctgtattttctgccattcagttctatgtattctgtatgtaattgccttttccaatatcwtttaagtttctatgatctaccatccctctgggtctatcttagatgccacctttttgaaatatgaatgcttctctggtctcagctgaagtgaattcttcttctgctatagaaaaataatgctaatacttagtgaaacttaatgtgtaccaggtactgttctaagttgtatataccctatgaggcagtattattcccatcttacagatgagggatgaaggcacagagatggaaataacttgtccagtgcacctaaggagtggagccagtgtaaactcaagcagttatgttctggttagcacacccttaaccgttgctaagtattataatatctctttgctctatgtatttccccatccctgccaaacacacacttattttttctttttatcatttttattatttttcctcttctgtagcttaccctgtgatatggtttagctctgtccccatccaaatctcatcttgaattgtagctcccataatccccatgtgtcgtgggagaggaacctggtgggaggtaattgaatcatggggtgggtttttcccatgctgttcttgtgatagtgaagaagtctcgtgagatctgatggttttataaagggcaggtcccctgcacatgctctcttgcttcctgccatgtaagacaagcctttgcccctctttcatcttctgccatgattgtgaggcctctccagccatgtggaactgtaagttcattaaacttcttttcctttataaatcacccagtctcaggtatgtctctattagcagcatgagaacagataagtacactcgatagtaccttaaacatattggagtgtgatccatgtccagtctatctttatacgcaaacagtgtggtattgtacatggaagtactgagtatattttttcgcgggtagcgactgtctggggctggtgttgcgtggtggtaaaaataatttaccaagacatttgaggtaaagaaaggcagatttattagagaaagtatgaaaatacattgcaagaaagctattggcaagtcagcaaaagaggagctgaatgcaagtagcaaaggcttgctggggatcttaaaggatggtgcttgtgctgtgggctgaagagagctttgtgcagtactgataacacctaggttgcaatgagctatcaggcgagggtctgatgatagctgggcacaggaagattgtgagttatttgtggaggaggactgtgtgtcctggaccatgaagaaaggtggacttctagcttatctgcttttttatttttgctttaccctgttcccttattaggactgcacacaattttttttttttttttttttttttagttatactttaagttctggggtacatgtgcagaacgtgcaggtttgttacataggtatacacgtgccatggtggtttgccgcacccatcaacccgtcatctacattaggtatttctcctaatgctatccctcccctggccccccacccactgacaggccccagtgtgtgatgttcccctccctgtgtccatgtgttctcattgttcaactctcacttatgagtgagaacatgtgatgtttggttttctgttcttgtgttagtttgctgagaatgatggtttccagcttcatccatttccctgcaaaggatatgagctcatccttttttatggctgcatagtattccatgttgtatatgtgtcatattttctttatccagtctatcactgggcatttgggttggttccaagtctttgctattatgaatagtgaggactgcacacattttttttttttaattgaaaaaaaaggttgctctttaggagaagggtttgtatacttgtaattattgagacttactcctggagtgatcatgtcttgtttgtttcaactgttctggttcatacctgtgttttggcgtaatgattaataggtatcttttcactgttataagtgtccaagtttggatgataaactaagtgtccaccctattgataacattttttcttttattctatattaatagtcccctgttctcatctgtatttctctagacwctgatacatttttgtcaggaaagatgaaaatttaaaacctgaattttagatcatattaaaacttaattaaaatgctatattaaaaactaatatatgcattatrtatttaaattggagaggatcaacttcttactgatttctatactgaagtttaagttcagtgtgcttcagtacatgctatgcattgactcaattctcttgctactttttcggttgagccttttatgcagactttatgtcgtaactcattcataatcagaagcaagaacactgaagtattatgaccgtatttagttaaatttgatcatacagatgtaatgattatatgtgtttatttctacagaaattcaaataagaaaaattaaaaaaaaaaatttgcagtgcttcggacctcactttgaaaaatactgattcaggctgggtgggctcacgcctgtaatcccagcactttgggaggctgaggtgggcggatcacctgaagtcaggagtttgagaccatcctggccaacatggcaaaaccctgtctctactaaaaatagaaaaaatagccaggtatggtggcgggtacctgtaatcccagctacttgggaggctgaggcaggagaatcacttgaccccaggaggtggaggttgtagtgagccaagttcacrccattgtactccagcctgggctataagagcgaaactccgtttcaaaaaaaaaaaaaagaaagaaagaaaaatactgatttagtaaatgacttgatttccaaaaaggtcattagcaataagttgttttgtttctgaccagtctggccaacatggcaaaaccccgtctctaccaaaaattagccaggcgtggtggcggccacctgtaatcctagctactgtggaggcagaggcaggagaatcgcttgaacctgggaggtggaggttgcaatgagccaagatcatgccattgtactccagcctgggcaacaagtgaaacttcgtctcaaaagaaagaaagaaagaaaaatactgatttggtaaatgattcgatttcccaaaaggtccttagcaataarttagttttgtttctacttgttatcatacctttgacttatctagaacttgttatacacagaaaatacagaatgttcccatgtttatatacaggtttttcctaagttataaagggtgtagatagggcacagacataaagaagtcagagcaaagaagagttaaattaaaaaaaaaaagcaaaaaaaaaaamcagatgtgagttttgtttgttttgtctttgagacaagtgttccattaagtctttggtaatattttaacctatggaaatttgtatggtttgtcttttcagaggctaagaatattgtacacaaagattcttgatgttcttgaggaaatccctaaaaatgcagcatatagaaagtatacagaacagattacaaatgagaagctggctatggttaaagcggtaagtagctaagtcagttttgttgtcttggatttgtggtatccagtgtaacatttaaccaaaaaagtttagttccttattttttatatattcgacacacttttcttctattctccttccttgaatgctcttttcccatcattcctcccttttattcagcaaactcttgtttattgagtgttttctatatgcaggcctctgttacatactggagtttgagactaggatcagatccttccttgaagtaacattgtagctgttccttttacctctcttcactatttagtcctttattgatcttttgctttttatcttggatatatcaatcttgatctcctttttctaatcttagagaacaataaaagcaaaacaaaaaagggcatttttttttcaaagaaacctgtcaaaaagactagactgttattaagtagcagttaataaaagtctagactgctgattcataccaaactatattgtactattgttaaattttcacactagcaatcattaaatggactttatgtaattatctaaaatagtgcttagaaactctgaaggtaatttatatacatgcataagtgatcctagtcacatatatttcttcttattagattaccagactatatagttcaaagagaattcctatctttcgttaggtatgcaacaaaacaatgcagtttgtattatatcgtattttgtattgtattatatgatgggtctcactctgttacccagtctagagtgcagtggcacgatcacagctcactgcagccttgacctgccagtctcaagcaatcctcctacctcagcctcccaagtagctgagaccacaggcactcaccatcatgcccagctaatttttaaaattttttgtagaggcggagtttcactgtgttgccctagctgatctcaagctcctggcttcaagtgaccttcctgccttagccttccaaagtgctgggatcacaggcatgagctacctgcacccggtgcctcacctattttatcatcatctttcaaatagcctcaaatgtttttagcttgttcctatcttaaaaataaaaaaaactgtatgcttgtattttcctttacttattgtcctatttttgttttctcccatagccagtttcaaccaaagaagagtttactctcatacttctttacttactggttccaaaatccttttctctgctatttaaactgccttataactaattgatctgtttgtacttccattatacttcattacatgctccaccatacagccaataatagactgatttttttttcaatatgtaaatcttgtgatggtacagttgtcccttggtatccatgagggattggttccaggattcccatggatgccaaaatacaaggatgctcaagtcccttatataaaatggcatagtatttgcatataacctatgcacatcctcttgtatactttaaatcatctctaggttacttataatactacaatgtaatgctgtgtaagtagttatactgtattttaaaaattgctgtattgttatttttattgtgtttttttgaatattttccatctgtggttggttgaatccattcttagttgaatccacagatgcagatcctgagggccaactgtgctgtcttgcttaaaatcttactgtggttttctgttcagtgtttctcaaaggctgagtttaaggatttatgttgagctggttgtatgaagcttgcttagctacctttatctgcatgattttgatgtgtggccatgtttgggaaccactggcctaacagggtaaaaacatggtatagaaggccttctaagttctggctcttggttattttctcaatctgatcctgttgcttcctgttttatactctatacttaagcagtaccaaactgctggcagttctgtggattccttgcatttttatttttgtgttcatttgtattttctcatttcctggaatgcctttacgttgtttggtagttcttactttttcttcataaatcatcacttcttctgtgaaaccttttcttactttcttaagtagagtttgacaactttgttacctcctttccattgtaccttcatgctgtattatgtctccaccagccataagctacttgttaatgatattggattcaactttgtatccttagactctagcatggtacctggaacataaggttccttagaaatgtgtctttatcccaaaggctagatataaccccaaacacttaacagttgtatctctgattcctgtttttggtaaaattatcacagatttttaaccctgcatacagccacacacaaaatctttagtgaatattgccattattataaaatatctatttactaagcctaaggtggaaataaaagtaactttttttttcagattattactagggagatagtactattttggtgaaaagcgttgtttgtgtccctgtccaagattttcatcttagttctaatacttatttgtggagtgacttggcatattgctagttttctckgtctcaatttcatcatctataacgtgggtataataatacccacctcgaacactttttgttagaaccgaatgaggtaatgcacgtaaaagcttaacatagtcccaagtatatagtgagcattcagtacatggtaccttatcaagtttaatagcattatgccattggtgactaaaaatcacattattcactatcggtaagacaaattttgaactgttcacctaacacaggctttttctgaaatgaaagtgtcgttgaactttccttgccttctttaccttcactctcctgagtctcttataacagtgaccagcttccctgttttgtttttgatttttggtctctcatatgagttaattccctgttaaataatctgtcttaaacatgcttattactttttccccttttctccccctttcagctgttttttatgtattcacttctttaaccaagaaacatttattgaatgccatgtatggttctaggcatggaaacttgtgcctagttggcacaaaacagataaaaatcctttccttcttggagattacatgttagtgatgggagaccaaaagaaaaaaaaaaagtaaaaactgagtaaagacgtacatagtgtgttagaaaatagtaagtgcagtgaaggaaaataaaacaaggaaaatgtgtgccatggtggggataggggatgttacactatgtattaatttcgtatggctgctgtaatattcccacaaacttggtggcttaaaacaatgtaagtttattttattagacttctggaggccagaagttggaaatcaacatcagggacccaaatcaagatggtgttgtcagggctgtgcttcctttggaggatattgggtagaatctgttcttgcctctttcagcttctggtggcttttggcatttattggcttgtggtctcatcactgcaatttctgcctttgtggttacattaccttttccttttctgtgtgtaatatccctctgcctctctcttataaggacacttataattgcagttagggactatatggataattcaggaaaatctccccatgtcagcatccttaacttgatcatatatgtgaagtctttgctgtataaagtaacactcacagtttctagaaattaatacatgtatatcttttgtggtatttttcagcctatcataatgcaaattatcagtagttaatcaataagaaggtgttatttgagcaaagatttgaaaagtggtgaagaaacaagtgatgcagataccctgggccatccagcaagataccctgaggcagtaacatatcacgtcttgtgttgaaaagcaaaatgtattattttctccctctttattccatttattggccagaaaaacaccctgaaaagacaaagccttatttacatatgtgggtatatttacagagcatgatttctggctcaaaaagctcagtttactagaaaataactaaatgtcattgaatgttctaggtactatatttattaacattttgttcttaaaaacttctattaaataattatatacattacaaatgtgtagaaaaaaaggacttttccagaacaacaaaacccttgcctcttccccttcaatttactacttgtaaagttaatctctatttggacttctttttgcctgtttttgaattttatataaatgaaatcattagtatgtactgtcttatacatactgtactctggcttgtgcttaatactgtggttaagagaatcacctatattgttgcatacagtttattcattttcattgctgtgaagtattatatccaaatattataattaattgatccattctattacagatgatcatttgggttatttctagtttggggctataatttgtgctgctgtgaatattctcaaacatgttttttaaaaaatatattatgcatttctgtttggcattatgcctagaagtgtaatttctgggtcatagagtagcatttatttctaattctaatgctctcagaggaaatacaggaaatattaagaaagcaaagtcatattttaaaatctgttttaggaagactgaatttgacattgtatttctgtcccttgatcagcatgtcaataaacatttagcacttttcaatattaagacagaaaagcaatgaaatagcagaggtgaaatgaattttcaccaaatatttagwaaaaagagtatgatgaaagaaaagttgtatttttaagtgtttttatataggaattttaaaatatataggatattgaaacmttcagttagtatgcttctttaattttttttctccctgaaattataggaaccagatgttaaaaaattagaagaccaacttcaaggcggtcaattagaagaggtgattcttcaggtaaagaaaaagttgactatttaggtgtttggtttcatagagacacacaactgacgttctagaatgaaaggaaaactaaatttccttgtttatatcaactcgtcaaatatgtaagactaatcacatatagaaaatgtggtgcttctcatgtgtatgttgattatagtatttattgttgattatagcatgaatttatgagacttctgttagaagcctggagtttgacactcttttaatttaattagcatgttctccttggcctaaccttagtttaaattggtagcacaatattactgttgttttaatagttgtatcttattttaagagtgtggcatatttttagtagggaaaaatacagacattttgaattataaaattaaaatgtacttttatttttatttttggttcttgagcatttgagcaagttaaaaaacaattgcatagtatatttgagagcttaattytacattatttcccaaatactaaccctgacaaataatattgagtagtaaaatgtaagcatgattatgaagagactgagattagaaaaattattaacattattaattacatttagaatatttaaatcttaaattattctattgggaaattttcttctcctctcactatacctgctgcttatacaagagaacaaacaccrcagtttagttttatttaatctgaattttaattcttttcctttggtcatagttaggttatagaaatagataggttactgatgtaaataggctggaaatatactattttgagtattccgtagttggttttttaaagcatctatgggaaaataatgataactctttttttttttttttttttttttttaagatttgcatcttttttctccaattgctagtaaggttaaactttaaaaatatgttcttatattttataaattatgtcattaatatttttactgkgtcatttagtctgkgttatttatacatgagtgtctttttataataaaagatattaaccttaaacttttctgacattgtctgcacatactttttctagcctgcttttgcctctcaaatggggtttttcccccatatgtagaggttttcaattttttttttttttttttttttgagatggagttttgctcttgttgcccaggctggagtgcagtggcatgatctcggctcaccacaacctccgcctcccgggttcaagcaattctcctgcctcagcctcctaagtagctaggattacaggcatgtgccaccacatccagctaattttgtatttttagtagagacagggtttctccattttggtcaggctggtctcgaactcctgacctcaggtgatctgcctgcctcggcctcccaaagtgctgggattacaggcgtgagccaccctgcccagctcaaattttttttatttggtgaaattttgttgttccacacccctacaaccctcatattataggtttagaatgtcttcatcttataagtgtctgataaatattcaattgtttcatttaattttattttgttgcatcttttttcaaatgtaaccctttctaatgttttcttactgttgattgaaggacagataaaaggaaatattggataatattggagattagggaggtatatcaccaacagacatgatataccaaatcaaaagaattgttagatggctctggaaaaagaggaatatagcattcagacagctttctatgaatgtagactgtttcagttattcaaaggcctgtttacctggcctttatattcgtcaggttggctgtggtactagatacagtgttatgggaacttgccgcaaaccttatactgttgccctatacctatttctcttttctgtaccacctgatttcactttgatcatgactttatttagttgatacatcaatttttcatggaattaagttttaaggcatattaagtatttttaagtcagctgtgcagttccccatgttttcatggtcagtattaagggtaaattaattttagtatttttttaactcagtatatgtagtatattatttaaatataatcataaaaatattgagatattttacattcttttttatatgaagtcatcaaaatctggtatgtattttacactttgcagcacatctgaatttggactagctgcatttcaagtccccagtagccatgtatgggtagtggctaacatattagacagtcccatttctagatggatggtatgatggtgtgtcagaaaggaggaaataggcatcaggggccaggtgcagctgggtccaggttcctgagatagggctgattctcaaggatgaatgaggcctaggtgacctcctcatgccctataatggctgggggagattgagaaagcattggatgttcgtgagacccagggcaaccttaggaaatattttatcagtatttaaattattttctccttttggcattagtaatacctctacccctgatttccattcatctgctctttaactcattgttttttatagttgcttgtaaacatagattgacttttgggaccgctgtcatagatggggtattatcttttaactgtgtaataataattaccttgaatataatctgagcgcttattctgtgtttgaatttcttttctaacatcctgacaggtgtttaatagtattcatcttataagttggctagagttgtcataaatattgtttgttgtagaaaaaatatgaaataaaaagctacctaaaatgtgtgtgttaaatataagttgtgtttgaaaggaaaaattaaatgaaacataatttgattaaggaatttactcagttagtaaatattaattatacatgtattgtgttctacattccatagatcactgttttataaactctgggtctcaagtgactgtgggtcatggaatcagttagttggatagtgattagcttaaaaaaacacaatagaaaaaagaatatatcactgccagtaaagataataatttaaaaagttttagttatatgtttgtattgtggaactcaaaataaaacatattttcttactgtgggccatggtaaaataaagtttgaaagccactgacatagatgaaaagacatacttctgatgctcaaaaaacttgtgaaatattattaagataaaaaacctcaccagctaaacttttaaacactatagcctatttcartcaaatagaagataacaaaagatatcctttcttactcctgattatgtagatgtgagaattaaggtaatttaattacttaatattcaacatttgatggtggaatagattatgagatattaaatgaaagtagtaactaatagttaaatttcagttgttctgataaatatctgttgaagagtaaaatccaatgatcttttaaaaaatttgtattaacaggctgracatgaactaaatctggcaagaaaaatgagggaatggaaactatgggagccattagtggaagagcctcctgccgatcagtggaaatggccaatataattattaagtgactttggtgtgttcatgggaaactgatgtaattaaatattctgttatattaagagcgtgttcttattactgacattttgtaatcaagaaaagtgatatagaaaatatgtaggagactgttaaaattggtgattatggtaatatggtcatgtgaatcaatttttgatttataaagtactcacacaagttgtttcaaagatgatatttctgtgaacagagaggccatgggaagatttgaaaattattaaagaaaaattcctacagattttcaatgcagagaccataatcaaaaagtaaactttctttagtagtatgttcaatacatcatttaattttttaagttatcctgaagaaggaaaggtccttaattattatagtctaaacaaatttatagattactgtttgaagtaaataatacgagtgaatattttcaaatgtgataaaatagcacaagtggctggtgataaaatttgaaattatggttaacctcagctgtgatcttatgtatgtaaagtgaaatttaaatagataattataggttgattacaaaatccatagtgtcattttattttagtcattattgaattataccatttactctgttttcttatagtcttaattttattatattttgttgttactgtattatatttgaaaaccttcaaattagaatacattgtacagttaaagaaattgacttggtacttaaaagaaagatttcccattgcatacaggttattggagaaattttccytttgttgcatttgtggaagttagttttctggcccgtggcctttaattttcttaatcaacctaattacatcaggatagaggtagagtttctgtaaaagaagagacattaagagttcctgaaatttatatctggcatacsgataggcttatattcaaaacatyttagtcatacgaccataaattaaaagtggagtcactaaatagtttgcagtacgtttytaatataagtgtasgtgggtatcaaaacaagacaaatgctgttcagggaaagaagttggcaagcttaaggttaaacaaaaataaaattacatgtgttttcgccttcctagctccctgtcattcctaaatacttggttaaatttaacgtggtatctctttccttcatagatagtactatactcttgtggggttttgtgtatacgtgtgtgtgtgtgtgtgtgtgtgtgtgtgtgtgtgtgtgtgtgtkcacgcgcatgcgcacatttgctcagaatgagaaaaaaatggtatttttccttctttccagtatatttctcccctcatagagctgtaacatgaatactaaataaatattaaataaggtggattcttagaggttagagtgcaagaaggctccttctggtggggaagtgttagagggggagttagaagcccagggtttctcattctcatggttctagtgttgttaactcaatgactacattgaggcaagtttggcctgtttctcagaatggcctatttctaatgctgcaaaagaaatagaatatgatttataacaacattttcagttctaaacatttcttgaatatataatatatttattaaaacatgatgctgaagtgtgtttgcatgggtactttcaaggtaattttctagccaaccattatttttcaggtcctttggacaacacagaaacaaagatggcttgctgtgtttttgtcatattttcagtcccgtatctgccatgattcttgggcatcttttatgtttcaccaacagtgttactgaacttttttgctaaaaggggaccttactggtgtttgcattagaaatgctagttgcagaataatagtcattgtaaaaataatattataacaataatagctaatgtttgttgagactttaatatgaatgtcaggcactatcataagtacctgactaatttcactcattaaacctgcactacaaccctaagagtgatactacaaattatcttcattttccagataagaaaccagaaccctacgtgagtagttttcccctgcaattatgcaacttggggccttggggacactgaaaccaagagatgatttaataacaaatccaaggtcacatagctagtaagatgtgaagctgaagtttgaacccaggcagtctggttctagaactgatgctcctgttatattattatttatgaatatgcttgggatgttgtgacttcttcctgtgctgtatgggctgtaccaaatgaaactagatcctgctctctttaccttttctgtcaaaattatctgtaaagaacaaatatgagcagaagtagtaaacgatttcattttctgcaaagagctgcatataggttataggcagattatgttaatgggataggtatctaaaaggtattgcaatttggtcattggttctttctcctgtctcaattgctcacagaactttacacctgatcgtttttactccttcagtcttttcccagttgcttcctataaacatccaggttaagtctcctgatcactttgcaaatgattcttttattcagagatcttcagtgttttgagtggctactaaactaattttaataattttcagaatggcctatttcagttctcccatgggtttcattctagttaatcatcatactgcagatacttcaaaagaaagagaagctaatcaatttgagctttgctaagaaagaagaaatggcaacaaagttgatgccccctttctcccacactgggacttagtgcagacgattccaatttcttggcattctttcctttgggatgaaaatggcttatatttaggataactataggataatttatcattccacttggaatgattttgagtgaaaataattacataaggataacagatgtacaccatgactgtcctgggcaaacaagatataggggggcaccctactggagtaaggctcaggtctcaaggttgccatctttcccacaccagtaggatcaactagtctgtcattggaatagaatgaattgatgccagcagtagtagtcatcatgtgcaatcaggcctcaagttttattgtatcctttcactctccctcattctcccctccccctccttttccctcagaattgggggatggaagaaaagagagcttatattttattgtcaattttctaatcacattcagaggagcgaagctaattaagccaataacaatgtttatgaatgtatcttttttaaaagggagatgacaatatataggaaaattcccacatgtaggctaatagcagctttttctttttcctcccatcctctatgattatgtaaacatacagaagtctaacaccctacacaagtgtattgtggggtatgggattaagtaccaaattgctgaacatatcactagtattttggatttgctgagtgcagtcttcccattaaaactaagtgttcagtagggaggcgtggtggctcacacctataatcccactactttgggaggccgaggtgggtggatcacttgaggtcaaaagttcgaggccagcctggccaatatggtgaaaccccgtctctactaaaaacaaaaacaaaaactaagtgttcagtgagattgtagcctatgctacaacaatagtaatgccaattgttttagagaaaagtaaatgagaggctaccagttgtgtttagaggaggtcgacgttttattttagacaaaattcacaggaaatcacagtgggaatgtgataaggggtttgaatgattgatggggacaggaagaattcatttgagagactagagatgagtcagtattctagatcgtgaagtaaaatagtgagtcatgtagtgacttagcatgggttatccttaaatcccagtgtcttaagtgtattttttattcatactgcatgtctaaggagggttggcaaggagtgctcatagacccacaaggaatccaggctgagtgtggcaccatcaacatatatttccatgaccatagtggtggtggggaattggaacatggtaaattacacataggaataaaaaaaaagaaacaaccaaggttaaatttttttttgactgtgccacaaaatttatgaattgaacttgccatgcatcactaataattttcaaattggtctttaggtttacattagcagctaattttttgtggtacacttaaatgtaatttatgattggcatctgtatataattaaatgaaaagcattgcaaagatttctattttggtatttctcatgatcttcaatttttttttaggtgaatctattaggttttctaaagataactatttttttttttttacaaaatattggcattttaatctctctataactggagggtgaattatttttcaccagagtaaaacaggtccaaagtcccttatctaaattcctaatttcaaaaatctctgaaaacaaagttttttcataactcatttggcaacaaaccccacctgaattacatgaggctatttgtggtatttatcgcacttcaatgtgaatatgaatatattttgccacagatgtatcaatatatttgattctaaactgcttcctcagaccctcttaatgtgttacataatgtaaagtatatgcccatatttcctttcaaaaatctgaaaaattgtgaatatcaaacacatctgtcttaaaaggtttcagaaaagggacaatagacctatatttccattctcttaacaagttcacaaagtggtattatgatccaaatttaatctaaataatttccaaaacaaaaattttcaggtccttagttttctaaattattttaatattaaaaatattcattattcattttaacctgtagtaacaacaggagatactttgaaatgcttgattttatcaagccwctaggtggcatctttgtaaaaataaaagcacatcaaaagaaatgtttattacataaataaatgctgagatgaataaaggtagatgtttcatgagaaatacgaagtcgtttggtggaataaatcctgagaaaatgcatagatttatcatgaaaaggaaaatggaaaatggtattgtaaaattactcwttcacttttggaattgagaagctttttcctattggttgttttcattaagtttgaatataaatttattatgtaaccaaactacatttgtgtgtatgtgcgtgtatgtgtgcgtggacaggattttgacatgctaataacttttccatgctccacagactacccaaggaagcctaactaagttaggttcctatttaagattaaattgtataaagtcatcctcacagcaaactacaaaaaaaaatgaatagtggctatcaagtcacatttaacactgtgagacacttaagttctctcctaccagtttttcttcccccatctcctgactctattcctaaacctactgtttgcataccgtctctaacattgagaacagtgaatgacaaattttaaagaggagacccagcaaagtgaatgtttaaaaccagtggaatgtttattagtagcagaatgtaagataaattatgattttggagatgggagtgtatgagtgtttgtaaaatcttatctgcacacctccacacctggtctacccatccaagaaagcctaattctagtggttacctctatgcccatttttcccctttacttttcatgaatgtgtggaaatgattaaaatgaatttacttttactgatcattattaaaacaaagccaattttatctgaatatatatttcactattctagtaaaaatatattttaaaatgggatgactgaaaaaaatggcattggatattacaaagttattggggagatgagagtgcaatttcagcagaacagtataaagaaataaatgaagacaatgaacatttatgaataagggaatggacctgtattaattttattaatccttttaacatatcaaatcaaattaaacagtactgtaatggttaaaaaatctgggacctggagttagattgcttaggtttaatcctggttccctcattaaactttgtgtgccttagttttctcatttacaaaatgggtctaatagcagtttctccctaataaaatcgttgtaaggattaaattagaaatctatgtacggtgcctcatgacaatgaatacttcataaatgttagctgctattatgagatagcaacatgtagtttgttactaaatttccaagaggaacatacttgacttgacctccaatactatcctgtggttctttaaaagttttcttattcattgataggccgggcgcggtggctcactcctgtaatccccaacacttttgaaggcggattgcttgaggctaggagttccagatcagcctggccaacatggtgaaaccccatctctactaaaaataccaaaattagccgggggtggtggcgggcgcctgtaatctcagctactcaggaggctgaggcaggagaatcgcgggagccagggaggtagaggttgcattgagccgagatcgaaccactgcacttcaacctgggcgacagagcaagactctgtatacactagaaaaaaaaaaaaaaaaaagaatttgttgttagacaaaatttagtttattaactaatttagtgattaacaaaagttcttctaagcagaattatttgatagctactatctcccttttctctttggctgccaggaagctgagagccaagttgttagtttaacaaaagcaagtaggcacctgacagtttctcgcctctgacttcatcgtgatgatttctctgactcggattttttttatatctgtaaaattaaactgctgtcagtgtttggtttagagagctgtgccgtttcacaagtgtaaaagatcttggagagaagttagtgtcctgattcacttggatctaggtagccagttggtaacagcctccgcctctggctcctccccttctccctgccgcgtccctcctccccgccccttcgcctctgsscccgccccttctccctgccgcttccctcctccacgcccgctcgcctctgactcctccccttctccctgacgcgtccctcttcctgtctcttcgcctctggctcctcccctttctcctgccatgtttcttctccccgccccctcgcc

SEQ ID NO: 93861 - DNA, 33228 bp, Homo sapiens
ccatacaagatcctttttcatgcaaaattattctcttttctttataacctgagttaccaaaaaatatatcttcatatccataactttatgtctctctctctcttccctacttactggttctttctcactttgtttcataagtaattattttcaagttcataatttgagttgacctttagataacttctgaatttgacaaaatgattctttttctcaataagactagatcccaggaggcttttctctgcaatcctgtccagagagatgccaaattaaataacccaaagaacaaaaatcatcaagatcagaaagaaaatggtagctattaacttcagggcatgcaagcataggtcgacatccatcactagtgaggcacagacagcaagtatgcaacagaaaaaggggacaagggggaccaagaagcagtaggtgctgacaaatatctctctgtacctcaaacactttatccgtcagggagacattgcaaccctagacccctaaaggctgaaaaaccctgtccaacagggtggcagccgacctggaggatcccataactccaggctcctcagcagacgtggcccaaaggatccaacaaccagggacccctaacccccaatccctggggaataaaaggaacgtgggtatctcagtgtcttcttgggttcagaaggctaagcagagtgcaaaaaggaaaagggacaagaaagggaagagaagggacaacaaaggtcactcactcatccatgaatccagaaacttaggaagcaggaaatcctgaaatatttgtcagatgttagcattttatagataaaaccattccacaatttcagaaacatcttttcccatatcataaactttcttaattggaaatcacccagacatccaacaagtaatccaaagaaatatgtaaaccaaaactttgggtaaagtggtctttggtgggggtttggtttttttaaaaaagagcttttttgcctttttttttcttcagtttcaaatgagtttctaatgttcacattttagccagaattggttgaactctacaagaaaaacaaaatctccaagtaactttgaacaataagctttatctcaatgccagtagcctaataacagcagattcaaaacaggcagaaagaaaagagagaaacagagaacttcagatgtggtaatcagatggcaagcatgaaaagtgaaagtagtgaagcgcttgcccagccatacaaggccagcatagagctgcagtaaaagcaaaggcatcaagctggaaaatgatgagaactatagcttttccatacctggcaaaggggatcaggtggattaatccaaagcacacaatggcaaagatcttgcaaggctacttccatttttattataccccagggactctaacctcatgtgcctagtctctaacctgaatatcagctttgcctaaacctaatagaggacaccaagatggacccaacttaccagaggggccaatgagtgttgtgcagactgaatttccttggcattaggtaacatcttaaggtccttttatagtgtccccagaagatgatgctagaaaggggtcttttcaagatccagaccccaagaaaaggttcttggatctcacccaggaaggaattcaaggtgagtctcagatttctgtgagaagagatagtttactgaaagccactctgtcacccagtaaagcatcctcaaaatgaaagcagaggaatgcactgtctttaagtttttcttatataggggtcttgcctatgtaaagattaaactaagctgtgcctatgtgcaggtgggctgacagcatgactaaatgtattattctactgatttaaagaaaactatccttgatatcttaatgtgtaagtccatcgaagcataactatatcttgaaagcatatattgttataggtgttgtaacatctggacttttctgttgtaggactttgtccttgcaggcattaccaagctgcttccttagtggtaaacatcttaggaccataggtcatgactggcaaggaatatgccttgctagttttaagatagagcttatttgaaaatgatgttactctggctctcctaggctcctgctgccctaacatgtccaccacttttcagcatttcagcattttcagcactctccagcattattagtccctttcaaggaatgtccagaataggcaaatcaatagaaacagaaaatagattagtggttgccagaagctaaatggaaggaggaattagcacatatggggcctcttttgggtgactgaaatgttctggccgggcatggtggctcctgcctgtaatcctagcactttgggaggccraggcaggtggatcacctgaggtcaggagttcaaggccagcctggccagcatgatgaaaccctgtctctactaaaaatacaaaaattagccaggtgtggtggcaggtgcctgtagtcccagctactcaggaggctgaagcacgagaatcgcttgaacccaggaggcagaggttgcagtgaaccgagatcacaccactgtactccagcctgggtgacaaagcaagactccatctcaaaaaaaaaagaaatgttctagaactagtagtcgtgatagttgcataacattgtaaatatattttgaaaacagtaagttgtacaccttgaaatggttaaaatggtaaattttatctcaatttttttttaaacaggaaaaaaagaaacagtgaggaaatgaaccataatgtagaagtgtagggtgaaaaagacaaatgggccaggaatggtgacttgcctgtaatcccagcactttgggaggccgaggcaggcggatcacctgaggtcaagagttcgagacctgtctggccaacatggtgaaacctcatttctactaaaaatacaaaaattagctgggcatggtggtggacacctgtaatcccagctactcaggaggctgaggcaggagaatcgcttaaacccaggaagcagaggttgcagtaagccaagattgcaccattgcaccccagcctgggagacagagcaagactctgtctcaaagaaaaaaaaaagacaaatgggtgaaatgctgaggaattgcaatctatacatttttacaaatactctaccttatcagggctaagacatcaattgtcagatatgccataattttatgtaccattatgaaagaaaaatggtgctaattaaactatgacatgccatcaatagtaagaagcaactgattacagagattttaacatgaaaaggaaagttttagaatctaggagagatgtcattagatgtagaaaataaacaattattttaaaaataaggagaaaagaggctgggcacagtggctcacgcctgtaatcccagcactttgggaggccgaggcaggcagatcacgaggtcaggagatcaaggccatcctggctaacacaaggtgaaaccccgtctctactaaaaatacaaaaaaaaaaaaaaaagctgggcatggtggcgggcacctgtagtcccagctactcgggaggctgaggcaggagaatggtgtgaacccaggaggcggagcttgcaatgagccgaaataacaccactgcactccagcctgggtgacagagcaagactccatctcaaaaaaaaaacaaaaaaacaaaaaaaaggagtggttggtgcagaaacccaatgagttcaatttgaaacatcttgggtttcaaatgtgctatttgggtattcaagttgagaatgatggaatattataaaatattattatttatgctaatataatgggagagaaattatatttctaaaggtatatataacattgggaattttgaaaacatctagaagcccaaaaatgaaaagtcacaaaaggtaaaaccattctcataagaagaatccatgattttctttttttccattaggagaagccctcacattcaaatgcccaggatttactattctgaaacctcttctcccttctcctctcaaaacaattctcagcagatcctttgatatttatagaaaggaaaagaccatctttaccttcaaagaagtttatcaaagtgcagcacagaaggaaagaccaagaaaagacagatatcaagcattcagaaaagagtgttaattccaattgtgtttccaaggtcattattcaatttgaccagcatttagtaatcacctagtattttttcggggctctgaagtatactcttcaggatatgaaatgtaaataaaatacaatctctacagttaaggaggctacaggtaggaaacaggttgtcaaaaaaggcacaagtaacagaacatgagacaaaatgaagcaaaacttactttgcttcatttgcctatttatgtataagcctgaagagtcatgcaaacacgagtgctacagagattcaaaaagggaaaagaccatatccaaatagaaagagtggggatgcaagataggaacctggagacacaccttaaggaaatataaggggttagttggccacagtagatgttccaatcagagcaaactaaaaaaaactcatgcattgcattggggaaaacagtttcaatagaacaaggagatggaaatcaaacaagttgagtgaaatgtggttagtgaaaaagtggaaacaaagagtataaattacgctttctaaaagtttaatagaacaactgaaatatttaagagatggtggaatactaggggactattaaaagaaataatgtagataatgaaaacacactgccagggaaagatagtaaaaatgtcattaaatttcttaaaacacatggaacacagaatacttgcatgcacgtaatatcaagcttcaagatatgtaaagtaaaaaaaagtactctcagaaattaacaaattcataataatgatgtatttttgtttctttttatttttagttattatttaaaataattttattgttatttattcatttttatttttaattttaatatgtacagaaagaattgtacatatttgtgaagtacctatgatacttcagtacacacatacaacgtgtaatgataattagagtaatcataatgatttctaaacatctctcagtagttaatagaataagcacaacaaaatcagtatgagctgactccagtacaggactggtgcttatccttattaataatcagatcaatacaaattaaaaacagaattagatatctttacacacgaccagattaagaagatttttaaagtctgccaattccaagcatgggtgaggatgtggagcaacgaggactctcatacactgctgctggtaggtgaagccattctgtgaaattccttggccttgcctattaaagttgaagactttaattccactcctagtcaaaaaatatttaacaaccagtacagaaaggaaactccatttctcacaaatggccatatacatgtgactccaggggagttctgacccacagcactggaggccacagccacaggaggtcagatggacactaggtatttatctactggggttccagggactactctgttttagggggacagccagagacccagaaccatcagggctggttgatggactcacacatcaggtgggacaaaaagagtagctccttagcagtgactaaataggggcccccagggctgcaacagagttgaaggggaacttggggatttgggatagtgactttttaccaagctgaataaaaatacttcaatattttgataattggcatggccttcatagtgggtactggctgaatatcagctctgaattttctttaaggcaactcaagcatatgtgcaaccaagtacatgaaaagaatttgtatgtaaccactaattcatcataagcaaagaggaaaaaaaacagcaaaaaggaaaatggatgaataaattatgttcaattcatacactggaatattctagagtaatgaaaataagctacagccacaggcaatgtgaatgattctcacatagagtagaggggagaaaaaagacatgaaacaatacatacactatgattccattcataaaaagrctttgctagattaaactattggatagagaagcttaaataggtagtaaaccactaaatatgcaaggaagtgattatcagggttgtgaaggagaagaacaggtaagttaaatgggcgattstgaggagtagaaatttcctttacttcataattatttgttaattcatctttatatgtttaatgggcttttctctattattttatatttttcaataaaagaaaaaagaawttaaaaaatcttggagctcactgggagcaatgdggtttgcagctgaagtccaatagtacaaatgatgtggtaagaggccggcagggctgtgaattacagcaacaaaggagaaaaggmagtgattggagaattaagcaacatgaatggtatttattcaaagacagctcattataggacacggaactccctgggtaggagtttgaagctttcttaactcagaaagaaacttccaacacagtttcccaaagaaaaatgggcaccaagggcaaagtaagcaagtaagctgtatctttgttcagtttgtgcttttctgtgtccttgtatgtttggctaaaaggagcttccttcaggaactcaggaagcagtgacttacagttgatcaaaaggatatgagtgacccctatgccaggaatttattctagggaaattaactgtggattgccaaaatgtttattagaagggtgttcagttaatattaatattatttaaatggccaaaagaagagagatttaagtaactgtgctgtaaccataaaatataatatgcatatgttacaaataatgttgcaggagaatatgggaaaatgttcacagtatattaatagtagaaaaagtatattacaaaatactatggacaatgtatcttatttggggatactcgaagaatctgcatcaaaagcataaagtgggtgatgagcttacagatgaatcttattctattttttgtctttaaaaacttgataggccttggcattttgaaacttcctgttaattaatatatacttcatttgaaacaaaataaataatattcaaaaacataattcaaaattatgtaactattgaaaaatatacattaatgtggtcaaagactttgggaaaagtataccaaatgtaagcatagtagtgttagaacagaagattataggtttgtttctttctactttctttcaatgttgcttatatttgaaattaaaaatrtaatttgaggctagaaaaaattggggttatagaatcctaaatatttaatttctgttcattcatctttacccaaattcttacaattagatgaaatttttatttaatttatatcctacagataaatttaataatgatgtaagcctcatttctcagacttttaatgaattctctggggatattgttcaaatgcagattttgatttagtggatttgaggcagggctttcatctctaacaaattcccaagtgatgtgaataaatgcttgtccgaggaccacacttcgagttgcagagatgtaaaacacatctattctccagcaattatctgactcaggtaattcagagctgatttcaaacagttcactcaatagatttttataggccatctaccttattcaaactcmataaatctattctytctgttatagagggaaaaacttgagacattatatcaaggtaaactttaatacacctgtttttttttcaagaaataaaaaatgtaatgactataatgtagaatttaacttcttatttttctttaagatcccttgtctttaaaataatatctataagatccagctacaaactctttaactctttgtcatgaaattacagtatcaatatattctaattttttctcatgatctcctctctcctacccccaaccctgtcaaaatctctatctctatctccctcttccttttctttctctctttcaggttattaaatgcaaagcagccatcgcctgggaagcaggcaagcccctttgcattgaagaggttgaagtagctccccccaaggctcatgaagttcgcattcaggtaagtggagactttccttgggtgggaacagacagggccccaagtggagacctggcttctgtcaggtcaatcctctgtgctatgattcagaggccttggagtttctagtacagggaagctgtatttttagattcagtcaaaaacaggcattatcccaaaaaggaataaatcatccattattttagtaattttcaaataatgggcttaaaatttaattgatcttaacattaatcatttaccctaagaatcagacaaaggaattcactttggatttgaattagttaggttttctttttgctttccagttgctaattatttgaaagtgttattaaaaggaagatagacaatttgatcgaaaacaagacagaagaaaaaacctgacgtgctgccctaggcagccgaagggtcctgggtatccagaggaagggacaggagtaggtcacagggagaagagagtgcatggaatggagtgagatcactgatggcaagtttggacaatttccccatttttcccaagctgaccaggcttatattttccttgaggacccccacattaagagtctgtacatgagagtgaatgggacattctcactgacagaaccttaaagaagaatataggtatacattggtaattaattcagacaatccttgayttgatattgttctctcaactgtaaaaggtrtattacctcaacttcatttcaataagccctattacctttgattttttcctctcctggaggcaataattgccaatcctatctcttttatgattttctgacaacagcaaaaggtagaaaacaaagatgcattataagaggaaaataatctaacccagtatatttttattggttcttttttcaaaaggtgattcttttattgagttctagaagtcttataaagttttaaaatgatatcaagcctaatcttatatgtaacatccagcccaataatatagttgcagaaacacaattaaagtctgtgattgccttgtagatcattgctacctcyctgtrccatactgatgccactgttatcgattctaaatttgagggcctagctttcccagtgatcgttggccatgaggctgcaggtattgtggaaagtaytgggccaggagtgaccaacgtcaaaccaggtattttattttattcmgaaaaaatggaaatgtcacaatatttcagagataattattgatagagtcctggcttggcatgctataattgatctctatttacaaaaggggaccatcttttccaaagtaaaacgagagacacaatttatcacagtctagcaataggacrgaatatttgaaatcagaattgtctaataaaatctaggaaatgtggtcactttatttacayatagcactgagaaactgtcccatgaagcaaagttaygaggttagctctaactgaaacttccatgtttaacaaatgacaccttataaaagaacaagatcatgtcctttgcagaaatatggatgaagctgtcagccattatccttagcaaactattgtaggaacagaaaaccaaatactgaatgttcttacttataagtaggagctaaataatgagaacacatggacacaaatggggcaatgacaggcacaytgggtcctacttaaggatgaaggatggagggaggagaggctcagaaaaataactatcgggtactatgtttagtacctgggtgacaaaattatctgtacaccaaacttccatgacacaagtttacttatatagcaaacctgcacatgtacccctaaatctaaaattaaaggtgttgtttttcctttttttttttttttgagatggagccttgctctgtcacccaggctggagtgcagtggcacgatctcagctcactgcaacctccgcctcctgggttcaagcaattatcctgcttcagcctcccgagtagctgggattacaggcatgtgccaccacacccggctaattttgtattttcagtagagacggggtttcacyatgttggctaggctggtctcgaactactgacctcaggtgatccacccacctcrgcctcccaaagtgctgggattacaggcatgagccaccttgcccagacttttttttttgttcgaaacagagtctcactctgtgccaggctggwgtgctgtggcacgatcttggctcactgcaacctgcacctcccaagttcacacaaatcttgtgcctcagcctccagagtagctgggattacaggcatgagccatcacatctggctaatttttgtatttttrgtagagacagggtttcaccatgttggccagrctgstcttgaactcccaacctcaggtgatctgcctacctcagcctcccaaagcactgggattacagatgtgagccactgcacctggtgtaaaataaaaggtttttaaatgacatgttataataacttctatataaaaaagcaaactattttaatattaacagcaaactatgtaaagaatgaggacttagaggtagctttagtgagaaatattatatatatgtcaacgttagctgaagtgtttttttggaagtttgtaagataaagataatacctaaatgaagcacmccaatagctgaaattatttactccacattttacaacagatcctccagatactggaatatgggctatgtaatcctcatttggcaggccagatgaaccgtgccactcttttctcttttaatgagaatgctccaaagttagaggtatattagtatctttccattccaaaaaagaytgtacaaacaaattgcttcccaaaattttgtgtcaatgaaggagtctggccaatataatccctttagccccagctctgccacttactggctatgtgatcttggccagttatgtcacttttctgtgattcagctcagatttctgttttctatagtgtgaataaaaatagggctcgtctcaaagagttgctctgagaattaagttctgaaataatacatgtaagtagttataatggtgtgtggtatgtattaaatgttgaatgaatgtgaattatcatcattagacctcaggcatcgaagcacagaagtcactattaaattggaatttattaaaaagtggaaaaatgtggaatttgaaagtgaatctaaaggtgaaacatagcaatgatataaagtttatacctagcctataattgtttacctctcctattatctaaggatgttatgtttcgtacatggtgtttggaaatgtaataaacaatagtcatgatgcagagagtcacaatgacagcaaagtcccagagttctgtatctgaygatatcaacatagatttgttgctgractgcctagcagagtaatttttwaaaaaatacaatatatgcaatacgttggggaatctgcagtcttgtaaggtaatgaaatactgtagccacctatactttccactgaatataaaatgtatactataaagaaaaggtgttttccactgatttatctggtagaagctataagtaacaccttaggcaccatccaacatatggcctttctttctaggtgacaaagtaattccactttatgcacctctatgtagaaaatgcaagttttgtctgagtccactcacaaatttgtgtgggaaaatcaggtaagcactctacactgttagtattagtataaatttgaatgaatattttggaaagcatattgacattacctaaatggccttgaagaggtgcaaaccttccacccactaattctaatcctaggtgtgtacaagatactattgcaagtgcacacaaagaaacatgtgctggaatgttctttgtaacactgtttattagagtaagcaatttaaaacagcacaaatgtccatcagaaagagaatgaattttaaaactgctatgtagtagcacaatggactactacacaacaataaaaatggctaaacttgagctgcatgtattaacataaaataatctcacacacataatgttaagggaaataagcaaattgctgaaggaatatttagtaaagtgtcatatacaaaaasaatactatactttcttatggttatttgtatatgtagtaaaagcataaacaaatcactgaaataataaatgccaawttcagaataatagctacttctacagggatgagagagggatacaataaggcacagtaaagtaatttactccaaggcaacatagttataagtcttagagccaggtttttaacccmggcagtatggctctggagtctaaaatcttaatcatcttgtttttgctttamtagactacagaaggatcctttcatccttaacactaattgaaagcagttatttaagaagctaaaattgtactactcttacatctattactgtgcctcaattttttcatctataaaatgaggagcaaaataatgcctgcttcatagacttgttctagatattcaaagaactaattttttttgcaaagctttaatgaaataatggatttaggcaataccaataaattctttctaataaatgttataaaaagagataatcagatattccaaatgaaatatacgataccacctataaagtattaccacaaaaatataaaatctgaatcagatcaagtgtttagatcaaaaatactaatttatgaggggatgcagggatagagaaatatgttcaaccagattacaggaatgttatgagcaaaattcagaatgagaaaaactctataggacaaatgattcaatttcttcaacaaataaattgcaaggggaaaaagagagggagaagggatctataatttaagataattaagagacaacaaaaatgtggacctaaagtaatcctttagagatatatggtaatgtttttacagatgaaatcgtgatatctgggatttgcttcaaaatattccaatgtgggggagggagcagatattgtggaggaataatagatgaaacctgactggccatgagttgatggttactggagctgggacatggacacataagggttcattatgctattccttctacttttatacatgttcaaattttccacaacaaaaatgttttaagagttaatacatgtaaagcccttaaaagcatttctggtacacaaaagcattcaatraaagtttgttccctggccgggtgcggtggstcatgcctgtaatcccagcacattgggaggccaargctggcagatcacctgaggtcaggagttcgagaccagcctgaccaacacggagaaaccccgtctctactaaaaatacaaaattagggccaggcgaggtggctcacacctataatcccagcactttgggaggctrmggcgggtggatagcgaagtcaggagttcgagaccagcctggccaacacgatgaaagctcatctctactaaaaatacaaaaattagccrggcctggtggtgcgtgcctgtagtcccagctactcgggaggctgaggcaggagagttccttgaacccaggaggcggaggttgcattgagctgagatcgcactactgcactccagcctgggcgacagagcaagactccgtctcaaaaaataataataataataataatacaaaattagccaggcgtggtggtgcatgcctataatcccagctactcgggaggctgaggcaggaaaatcgcttgaactyggaaggcggaggttgcggtgaacggagattgtgccactgcagtccagcctaggcaacaagagcaaaaactccrtctaaaaaaaaaaaaattgttccctgcactccagcctgagtgacraaatgacaccctgtcactttttaaaaaattgttgctgttatttttwaaatttgctgttattcaacaaactatattttgtgaaaagtcttgttgtttccctaatttttctgtcttgtaaattgtcatcaaaaatatataatgctcaacatattttgtaggaaaatgatcagtgttccatttattataacttctctttatttgtatcactcttttttttaattttctagtaatctcaaaagtcctgctagtgatcaacaactaatggaagacaaaaccagcaggtttacctgcaaaggaaaaccagtttaccatttctttggaaccagtacattctctcagtacactgtggtgtcagatatcaatcttgccaaaatagatgatgatgcaaatttagagagagtttgtctgcttggatgtgggttttcaactggctatggggctgcaatcaacaatgccaaggtaaatggttaaacaccagtttgtgtaaaacagaagttactaggaggcagtgtgatacagatgaactagagttagttatcttcaaactgtggctgtgtcatttattacctctgtgattttaagcaagttatttaatccctctagaataatatctactacaaatacttatgaggataattgaataatattatatatgtaaaacatctggcccagtagcctacatataattgacccagcatatgttcttatactatactaacatattaggttatagatcttccctgatttaaatacagcctgtttaaatatgtctcctaaggatgaatgctcatcctaggacagctgactcagtcaaagggcaacaaaaatgacagaaactcacttccatcttcacacaaccacccctgtcttctccctgttgctacagatttatctccctccatcagtagtaattcatttctgctactcatcatgtccctttgtggcttcaaaggagggtctctggtagcagccgtaatgttgaccagatgtgtccctggaatcccatgttagaatttagaaactcttacaaagcatctgatctagaactagagagacatcaaagagggatctcacaatyggacatctcaacctgcttatctgaacctccctgacatcaatctttattcctgactcaaaaccgcaaaatgcagccagagtggtctttcaaacaacaagtctgaagattttatttttcctgcattatttcatttttccctcagggtgagctcaaattcctcagtaggctacagtgacttcctacttctccctttccactgtgcactcactgttcccttggctccactctgagtctccaggcttcagtcactgtggtctctgggctttccacacttggcttccagcaacaatgcagagaagactgccctacctccttcaggctgactccacttatcacttcctctcagagatctacttcaggctctcagccatgctttgggtatccctcccagttttcaccccaaatttttttcttttttgagacagggtctcactctgttgcccatgctaaaatgcagtggcatgatcattgcttactgcagccttgacctcctgggctcaagtgaacttcccacttcagccctccaagtagctgggattacaggcatgcaccacgatgcctggctatttttttaattttttatagagacagggtctccctatgtcgcccaggctggtcttgaactcctaggctcaagcagtcctcccacttcgacctcccaaagtgctaggattacaggcatcagccaccaccagcctctgtcttcattcttatcacactatagagaaatctcccatttatttttttgtcctattgtactatttgttccttgagggcaagaactctctgttgttcattgtgatagctccagagcctggaattgtccctggcacataacaggagcttgataatttttcaacgaatgaataaataaaaccaggtgcataaaacatcctggtgaggcctggtcctcggctttgtaatccagaaagtccttcttatcaggttacctagagttgttcagtgtcaaggaaacaaagtcagcctcaccacaataagaggttgatctagtagccaagataccaaagtatgactcttcattgagaattttatctgccacatagacaaaaatgctaccctttgctatcaacatgttatctccctttaaaaatgtatttacgcacacaattactcattaataaaaaatttaaaaaattgtgttagaaaccaaactacaatcagagaagggtactagtagctgggtggagttgacagcagatgtgcacatggcagtcaaagcctrttttctgctgtatggygctagagacttagggaagaagtatcactcttcaagtcttcctttgctgggctccatgcagtccatcctcttctactactccagtccttttaagggccatcagcactagaggttcagctacagctttcttttttaattacttatttatttttaattgaaaaaaayttatacatttatgaagtgcaattaacgttttgatatatatatwcactgtagaataattaaatcaagctaataatgtatccatcacttcatatacttatctttttgtggagagaacattaaaaatctactatcttagcaattttcagatatacaatacattattattaattatagtcaccagagcgtacaatgaaattccagaaattattcctccactctatccgaaattttgtaacctttgaccaacatcctcctattcgtcatttatccccccagactctggtaaccaccatcctagtctctgcttctgtgagcttgtcttttccacatataagtgagatcatgcagtatctgtctttctgtgcctggcttatttcacctgacataatgtcctccaggtttatccatgttttcaccataacaggattttcatttttttaaaagcataattagtactccattgtgtatatacatatcatatttttcttatctattcatctatttgtggagcaaaagccagaggtgtgcatacctaatattattgataaataaggaaaacattgcagtttacctgttgcttagtaattttgtttccaatttagaatgtattaaacttaccttgagcagattttctgttttccttttgtttaaggattggttccacattttggctattgtgaataatgcttcattgaacatgggtatgcacatctcatttcctttggttgtatatacagaagtggaattgtacagctttcttttaaatccagtcaaagtcgacctaaatttccaggagttgttcttcccactgttaaggaagagattctagctgctaagccacctcatgagatcctcagagagaaatgaatctgataggaagaaattaaggaaagtgaagtatcagtaattctgcccaaaaggcaagagctttagtaaaatttaacttacttctgggaagaaaagtgaagcaacttctctgtataattattgagaacacaccaacatcaccagaacccctctttctttttgatgtgcttgtatcctttactgccaattaaacaacattacacagagacctttggaagtgtggaaatgtcctctaacagtggtacttgcagatagataatcatctactgtgtgtagactcacttgcaaattgtgggggcaatttatagtgaccccacctaagttctgcaaacaaaggcacttttacacacaggggtccagttgtataatacaagtaatgcagcatattatatttatacactgttgtgagctagcctgagaatccaactactagttacattgctgcaatgggaaaaatgcatttccacttcctaagagactcacaggctccttttaactgagactctggagcaatatattaagaatcatactgaacacatgccacaacattatagtaaagaagccatcataagaacaatattcttactatttgcaatatatatacatatttattatttcctctgagtagcaaaagccagaggtgtgtatacctaatattatagtaaataaggaaaatattgcagtttacctgttgcttagtaattttgtttccaatttagaatgtattaatacttaccttgagcagattttctcttttccttttgtttatgttttaatcctaacagctttgcatcctcattaggaaatattaagwatytctctatgtagtatttttctatcgctatartagtctgtagaataacatattccagttacagcatcttttcttaccatcttatctattatttccatttaatgcaatgaawcaaatatttattaaagactcaatatacagaagactctttcataataatrtggaatttaaaaagtttctgccttcataaaatttacggtcttttaaagaaacacacatacacmcacaatcaaggcaggttataaattatataataaaagaaaagcaaaaagacaggcattgatttctgattgaaaaatcaagaaaagtttcatagacagaatgtcttggaagtcaggcctaggagtataggttatactttaattaaagaaaataaggttaaaagtacatcagtctgagggagcagcgtcaactacggcatgagaagaaagtgcaacaatctgttcgcagttcttgtactgggaatatcatggggatgaagctggaaggtaaacagaggtcagacaataaaaatgctttcatgccatgcaaaacaaattggacttcattccaaactggtgatttggagtgatcaagtaaatcactgtaatattaawacaaccaaatgaggactattygaaatatagatgtcaaattaatagtgatccaattttaaaaggaaagcaataaacccttcagaatgtgtgggttttcaaattttgttcagataacactgaagggaaaaagtaaaacaagggaattatttttacttgggtttgtttcttataatcttaatgaacactaaataattctccaaatttargtagtaatgcatccattttcgcattggcagatttcctccattggctatatcatagagtttaatagmaggctgtctttaattcatatgttcatgcccccacttcctcctgactcttaaaagaaaaaaagtgggactggctgctttagaagttactttataattttcctgcttgcaggtcacccctggttcgacttgtgctgtctttggcctaggaggtgtgggtctttctgctgtaatgggttgtaaagcagcaggagcttccagaatcataggtattgacatcaacagtgagaagtttgtgaaggctaaagccctgggagccactgactgcctcaatcctagagacttacataaacckatccaggaagttatcattgaattgaccaagggaggtgtggattttgcccttgactgtgcaggtggatctgaaaccatggtatgtatattttgttcttggatcatattttcaatgtattctttggctgtcaaataataggggaaagtggattatgtttattatggtacttagtactttcaaatggatgacagggkggtagaactataagccacaaatcatttcccattccctcagctatactccatttccttcaatgcccatgaatgtgtccccccaaatgccagtactatcttggtgagttcagtcttctcttgtgataagaagccataccagcattatttgtagatgctgatttttcttttgagatccctttaaaaagctcaatattatttgtctggagataatattttctaattttgttttctatgataattccaattcctattccttggagacaattttaggggttttttcatttttaattagagaaatgttccttttgactattaaatcaaataaaatgacaagtgcattaactagacagcattctttagccaaagatataaagggatgaattaactgcaatgcataaataggaataaacacctattttgtttagctatcttatgcattatatacattattaatattaacatttgttaatgtagaatcttttctttaacagtatataatatttaaaattaataaacaatatgtgcatgtgttgttatatttaatattaacatattctcaacactagctatatgttagaatttcctgaggggtttttcrttgttttgttgcttttttaataccaatgaatgggccaaacccaggatattcttgtgtgctgggrgcccactgacaacattttaaaaattaatttctcaagttgagaaccactgacctaaaarttagcatcttctattattaagctgacttattataccatgaaagtcattttcaattatggaacagaattatattagagaatccaaayggaaagagaargatttatttaatcaccaaaagatgagttacctactctcccaccaaaagtttctatagctaggaaaagcttctatagaaagtttctaggttccaatgacctctaaccctctaaaccaagggtcaacaccctgtagcttaccagcacaaggattgtttactaacaccwgctaaggacccttttaaggagctgaatgtagtgatactggagtctatgacctgactggaagctgtagaaagattttataaccttgcagtgattaattttttagagctttgataacccccagcaataagtcagagacttaatttagaatttaattttgaaagtgtttgtcaaaaatgttaaaggcctcaaaacatttgattaaaacagaaccacaggtcattgtaaaacaatagttacttatttagccaaataratcatcaaaagactttaaaggcaatacatgaggatgtatggatgtaaaaaccttaacactatttttttaagcaattaaaaacctaatgtagacaacatgggaattattttgataaaatgtaaaatgttgtttcttaagtcagttaccagaaatggaaagaaaaactggtagtgtgactgcttctccttatgggaagcccatttcaataaacctgaygggaaaagtgcttgaatttaatcagacatgggaaaagtgtgttcaggattatgagtacagcaggggaatacataattcttagtaactgcatgagaaattttctggttacattsaaaaatttaaacatatcaagaaaagccaagagtacagaatcaagttgtactggaggaaaacattcactcctagacctttaagataaaacattttagtatcaggccataagaatagttagaactggaggaaaaaaacttataatagctgatgaaaaagctaaagaaaagagttatctctgtccaagggkagacaaagctgaaagcagggagacatagcaaaaggtgaactgacatatgattttgagaagttttcaaaagaaacaggttataaaactaaaagttaagtttcttttaattgtattaagagcaaatcaatactgtaaagagactttgttttaacataggggaataatcttagaaagactattctaaataatccttttttaatcacagcaaatttaatcacatacaaaatttttttataaattcctcttcatgaaacttaytatgacttacacagatgatctatgacatgcttggacttctgacttatcctaattttttccttttaaataataagtcattttattttaggacaagattttaccataagattcttttttayatgaaattattcttttttaataacccttttattaaaaatacatttttatatttataactttatatttctctcccctacttactttttttwatctttttaagtaaataactttaaaataatttccaaattatgtaaaattattctttaataagaatacaggccaggcacagtgggtcatgcctgtaattccagcactttggaaggctgakgtgggcagactgcttgagcccaggagttcgagagcagcctgggcaacatggcaaaaacccacctctactaaaaatatgaaaattagtcaggtgtagtggcacacgcctatagtaccagctacttgggagggtaaggtgagaaaataacttaagcccaggaagttgaggctgcagtgagctatgatcacgccactccactgtagcctgggcaacagagtgagactgcctcaaaaaaaaagataatacaattatatatttatatatgaattagaattcttattcctagtaaccttaaattttcatgaaaacttagaaagcaagaaatcctgaactgttagatgtaagcattttatagatgaaatcatttcacaattttagaaacatgttttcctatatcataattttttaattggaaatgactcacatatccagcatttattatttaatttaaaataattttcagattttatattacacaaaaagtccacttataagcatttatttcatttacatatactttttcatttttaatagttatctagataacttttgataactgagatattatgcagaactagccattatttaaagttatttccttgttaactttttttttgagatrgagtctcactctgtcgcccggtggagtgcagtggcacgattttggctcacygcaacctccacctcctgggctcaagcaattttccttcctcagactcctgagtagctgggactacaggcacatgctgccatgtctggctacttttttgtatttttagtagagacggggtttctccatgttggccaggctggtcttgaactcctgatctcaagtgatccacctgcctyggcctcccaaagtgctgggattacaggcgtgagccaccatgcctggcccttgttaactaaagtctaaacattaggtgaaaacctaagtaagaaccatamggttaaacacataggtattttgctgataaattaggtgattcagttgctgttattgacctaacaattttaaattagtcttatttgtcaaaaaaaaaaaagtcacacaaygatagatttggctgggtttacagtctcacaacctttgtcccaaaccctgacactttaaacatttagcagaggcaaatataaaacttatttacttacacacaaatgtatgctgattttttagacatctttatttttattttactaataattttttttttttttgagacagagtctcactctgtgacccaggctgcagtgcagtggtgtggtctcggctcactgcaacctcctcctcctcccgggttcaggcagttctccagtctcagcttcccgagtagctgggactacaggcaggcacaaccacacccagctaatttttgtatttttagtagagacggggttttgccatgttggccaggctggtctcgaactcctggcctcaagtgatccacccaccttggccacccaaagttctaggattacaggaatgagtcacctgcacccggactgtgctgaacattctatttgtaatggaacactgggccctcaaggctcaatctacaatgatactatgatgtcattagcttgaatcccattatcttacatgcagagttggattaatttttttctaaagcattgtacattgccacactggagttcatattctacttttccactgactcaagtattcttttatgctccatcacagaaagcagccctggactgtacaaccgcaggctggggatcatgtactttcattggagtagctgctggtagcaaaggattgactrtttttccagaggagctaataatcggccgtactataaatggaacattctttggtggtcagttttttttttcttcatagctttaaattcttttcctagtagttctgaaattcttagagtgaaggttattgaaaagaaataaaaataatttattcaaccattgaatccctagagcatatccaaatactacataaaaactattaatgacttataaataatttatataaaaaggtaattataatttgcaaattgaaatttaatttgcatttgaatgaaccaacatggaggaacaaaaaataaacattgaccttattgagataatttcttatatagagtggaaaataatcttaaatttttcttataaagaaaaattttaaaatagatataagtacagaaaattaaagatggaaggagtttaatctatttgaagcaaaccaaatctgacctaataatttcattcattcagcaaatgctgattaaactacttygtgtcaagtgccatgtctttattttgcattttgtccacattacaggttggaaaagtgtagattctatcccaaagctggtcactgactataagaataagaaattcaatctggatgcaytggtgacccataccctgccttttgacaaaatcagtgaggcatttgacctaatgaaccaaggaaaaaggtacattactaatagatgactgaatgatttaaaaaacgtttacaatgattctatcttctttttgatgttaagaagcaaccagcttgttttttctgacattttccacatcccaggtactagatgtgcttaaaagattaaatagtggtcatttcagaggggaaaaccttccatttcaataatgcacatctgtacactgttacaatatagaatggtggcataaattgatacaatttccatttcacaaaccattaactcagttgggsctgctccctagaaagagaggtttctgtgtagtataatgttagatccctctartasagtgtacccctgagtttagcaccgtggtgttctgcagtttgacacagagtgcctacyccagacccttcacaatcagaatggggtgaaaaccatgcctctgtggcagggatcagacatgtaaaggatgccccaactgtctcattctcttgctttgtcatggagttcctctaagataccttctgatccactattttagttatacagtgctcccatgtcagggatcccaggaactgatgcatagaaatgttccacctggaagattcttaggggtttgggggattagtaagactaggatcaatgattctaggtaaaatgttcaagcacagccttgatcaatagaaacaaaggtcaaaaacattaggaacaatgttacatagaggagacgcaggaccaagaagaaatgaaaagagaagatacaacaaaagagaggaggaaaagtctaaagtaaaattaaaataactgggatttgaagcagggaataaatgttgcagaagaagaagatagtttcatggtgtgaggacccagactacttcttggggaagaaacctgaggaaatatccccactgacatgaactccccaatttgcaaacgtgtcagtcacaacatatcagaaggaagttcaataaaaagaaaatacaagcattattttttaagctacaccatgtaaacttagtatataagccctgcaatgtattatacaacttcaatatccccataaggaatactcctcaagttaggagatagargttgaagtggggtttgagcctcacacccttctattcatatcctcgaacacaaaccttttctcctagaattctcaattatggaatacatccataaggaatgctaagtggcagccaggtggaaaatgctgcattgctttatgggcaagtctcccacattctcccaggaggcttccctggtaatcagcctaggggtagacaccagagtgaggcctcctgctccttctctggcccactgagaataccacctgactgcccacacagatggaaaggtggcaatgaggaaggcagaagttgggcctcatcaggtgtgtccaccatatgggcacaggaagcacaagagagggcaggccctcctaccacccaactgcaaagaagcaaggaagtggggggawggggatgggatacaatgactgactagcctgttgaggtgtagtgatcctgccccagagtgaggaaaggacacagagattctccttcyacaggtaggggtgtcttccagtcctgggtgaagaaaacatttatgcatagcaccctgctcatagcaggggttccacagttccagcagtaatgtttgagataargactgctctgtcsttgaggcttatccccctctttgtgtctacatgttggagttacccagaaataagaacatctgggttcttaaaaagtagcatcccaacacaccaactttgatgcccactccctccttcratgctcaactttgccctcagctataggagatccgagaacagtgactattccaagactaaaacctgactccctccttggtacattctaattctcctcaacagcaccactgagtaacaaggacrctgcctaaggtragtaagggtcctcaattccccccaagtttactagcacatgcataaaatattattaacaccatgaatggaagaggatgacgggataaaagaaattaggcttaataaagtgaatgtctataaaggaagaccagatcctgaaatgaaaaggcaaaacttatttgtgagctttggttaaatttatcatgaaaattayacttattaatgttttattgttattaacagcrtccgaacaatcctcatcttttgaagatgccaggagcaattcrgaatactatctgattgaatgtgaacctgyctggttaatttattacctgatttgatgaaccaaggaaagccatgmgtttaaacaaatatttacatttaatatgggaacataaaagagctttaaatattatagactttgtacctgttatatatatgaatattccctaygttaaataataataataactagtgtttatgaatagaatcatatcatctttagaaattgtttaaaattagttctgggaagttgaaagtggggaatgaagagataataaataaaactagattggccatatgtttataatttttttagattgggtaatgaatacatggagtttcattatacttttctctccacttttgtctatgttgaaaattttctgggagctraatgatgagaacacatggacacatgatggggaacaacacacactrgggcctgttgagggcagggagtcggcagagagagagcatcaggaagaatagctaatggatgctgggcttcatacctgggtgatgagatgatctgtgcagcaaagcaccatggtacatgtttacctatgtaacaaacctgcacatcctgcacatgtaccctggaacttaataaaagttggaaatttttaaaaagaatgaataagacctggtatttgatagcacaacagggagactatagtcaacagcaatttaattgtatattttaatatgactaaaagagtataatggattgtttgtaacacaaataaatgcttgaggrgatggacaccccatattacatgatgtgattattacacattgcatgcctatatcaaaacatctcatgtaccccataaatatatacacctaatacccacaaaacttaaaatataaaatgttttaaataaaaataaagaaaagatttcccacaataaaaagatttttactggaaaaaaatcactrtatttcacatacatgtgtacatatatacattatatatatatatacactatatatatgaaatatatagtaattgtgattatgtgtgtatatatatattaatatatacacacatatatacataaaacattattatatactttgtgttccaataagccacaagctactttttaaaaataagttgctaaataattttctttttaacatctgctaatttcttttctcttagccccactctatcatattaactgcaatcacatggaaggagatatcagaatctatttaagtgaatattttaaaaagaataaaagcatatctactctctcaagtttctatctctgtaaaataactgccctttcatctttgataattttttttcttcaacttttaagttctggggtacgtgtgcaggatgtgcaggtttgttacataggtaaatgtgtgccatggtggtttcctgcagagatcaacccatcatttaggtatgaagcccagcatccattagctattcttcctgatgctctccctcccgccacccccctcaacaggacctagtgtgttgtttcccaccatgtgtccatggattctcattgttcagctcccattataaatgggaacacacagtatttgtttttctgttcctgcattagtttgctgaggataagggcttacagctccatccatgtccctgcaaaggacatgatctcattccttttcatggctgcatagtataccatagcatatatgtgccacattttctttatcctatctatcattgatgggcatttggtttgattccatgtctttgctattgtgaatggtgctgcaatgaacatacatgttcatgtatctttataatagaataatttatattcctttggagatatacttggtaatgggattgctgggtcaaatggtatttttgcctctagatctttgaggaatcaccaccctgtcttccacaatggttgaactaataatttacattcccaccaacagtgtaaaagcattcctttttctctgcaacctcaccagcatctgttgttccttgactttttaataatcaccattctgactggcataagatggtatctcattgtggtttgggtttgcatttctctaatgatcagtgatctttcctaatttttacaacacataatgttgagcttaatgatctgcaattggcactaattaatactattgatctgtaactggcactaattaatgctattttcaatagtcaattaaaagttacaaaaattgatgtacttataaaataatgtagtaagtaaacttttatagttataagatttaacagataaaaagatgtatacaaaaatagcaaaatggaaggtttcaaattattatactcgagatgttacaatgaacagtttaaaaggacaacatagaacctaaatgcccatcagtgatagactggataaagaaaatgtggtatatatacaccatgggatactatgcagtcataaaaaggaatgagatcatgtcctttgcagggacatggatggagctggaagccattaacctcagcaaataacgcaggaacagaaaaacaatcatcacatgtactcacttataagtgggagctgaactatgagaatacatggacacatcatggggaacaacacacactggggcctgtctggggggcaggagggagagcatcaggaagaatagctaatggatgctggtcttaatacctaagtgatgtgttgatctgtgcagcaaaccatcatggcacacgtttacctatgtaacaaacctgcacatcctgcacacgtaccccagaacttaaaagttgaaggaaaaaaaaaaggatcagataataatttagatcagagtaataaagactagctttcaccttggaccagaacttaaaataaaagttgaaggaaaaaaaacaggtaagatacataataatttagatcagagtaataaagactagctttcatcttggagcaatttctgaaacctatcagttttctttaaaatgatttaccacgtattgaattctgagagaagataaacatctttgaaagttttggctgaaaggatagtaattaatatctcaaagtagaaacttatattcttgcttatttaagattctctctcattagaaatggaagccagacactttatctgtaaatgctttctttgttggcattgtgggactaaaatgcaccccacaggttgttggcctttctcatgcaattccctatatcagttcttttctctctcctcatccctttcctcctttcctttgcttcagtgaatcctttctagattccatttcagacccacctctttttcagatctttgcagccacaaagctgttctcactccctgatctcctttgatgctcggcgtttttaatcaaaatcctaccacacgccgtttccattgctggtttttcaagtacatgtttgtaaaatccctgaaggcagaacgatctttgaatccatccctctatcagagatggtcgataaatatacgttgcttgataacaaaattctatcctcgtgtctgaatagttcatattcacccttttgaatggaatttttccaaaacattttctatatttcctttttttcctaattagataatcccaaatctaatcttaacaactcagaatagtcattattgaaatgggagagttccctgatccccctcacaggatgtgcaacaggggtgtgactcgcctgttcagtcaccattgctcaaacccctgacaagaatgcgagcatgcagactggcaggtgcaggagtcagggcgagtgcttcgggctccggccccacagtagtgtccaggggtgggtgcctgcagccccagtgttacaaggttcttttagccttgctgtccacagacaacataactgttaaccagctcaatggaccctctgcttttttgcaagggcagaggaccagtgtgacaactttctgtatcccaagctcttgcccagcatccaggaagaattaggttgcacacagacttgaaggatgaatgcagggttttattgagtggtgaaggtggctctcagcaggatggatggggagctggaagtggggatggagtaggaagattttcttcccctagagtttggccatccagaggccaaactcctctcccaccgcccccagcctaactcctcttggcgtttagatgttcctcctcttctctctttctctgccacatcattctgccattcatctgcttgtttcctcatctcctcatctgttcatctgcttctagagcctgaggttcagagttcatatgggtaccagatggggggcatagcaggtcaaaaggcaactttcagggcacaaaaacagaaatgcccattcccacttagggctgagggtctccagacttgagggtggggcctttgctggggaaccaccctcttctatccagtatttccctgtctcttgtccatattattatgatcattaatttttatgctaaattgtgattcagtagtctcagtctctctctactcccccccaccctctgagcaatcactgctgcagtaaatgtccctgtctctatcagtcttctaattttcatacctagttctgcgattcaaaaaaaaattctgattatccttggcagagctgttagaattatatataaaatcaatgagactgagcaaagtggcttacatctgtaatcccagcactttgggaggctgaggcaggacaatggcataagctcagatgtttgagaccagcctggggaacatagcaagactttgtctctactaaaaataaaagtaaaaatgaaaaatagctgggcatgtcagtgtgtgcttgtagtcttagccacttgggaggctgaggtggaaagaggatcacttgagcccaagagatcgaggctgcagtgagctgtgattgcaccactgcactccagcctgggcgacagagcaagaccctgcctcagaagcaaaaataaaactgagaaaccccagagtgagatatatggagtttaaggcttcacctccatcattccttcagcaacagaggctttttttctcctccatgcacccagttgaaattcctagtaatgtatagtataatttttgttttgttttgtttgttgtcgttgttactgtttaagacagagtctctgtcacccaagttggagggcagtggcacgatctctgctcactgcaatctccacttcccaggctcaagtgattctcctgcctcaggctcccaagtagctggaattacaggccgtgtgccaccacccccagctaattttggtatttttagtaaagatgggtttctgccatgttgccaaggctggtctcgaactcctggcctcaggtgatctgcccgccttggcctcccaaaatgctgggagtacaggcatgagccactgcacctggccaatagtataatttttcaaaatgcacatcaaatgcctaagttgctcaaatatatctctttcaaaatgaggaatgaatgctgaatctctatatgatactccagagaaaacaaaaatcatacatcaatgatgccattggcaatatgtagaaaacctccagttaagaactatgcttcaaaggcatttttaaaagtttgtaaactactgacagttgtccacttttcctgagtattctcattcattcttcacttaaagaatattgctttttgaaagagtaggggcaacacaaattaaaatatttcaaaggagtcaagccagtgaaataaaactggaatggaacttgacccctccaaaggaaaaaatcaaaagtggtaatttaaaggtttgatggatgatctaccttcccgtgttctaaacacttcattagaattaccgctccccctcccacaatgctctggaccaaacattgaaaatctgtccaaggcatataagccatggaccttcagtatgttaaagattattaaactttcaggaaaaaaattatattgttcagtataataagatacatgggtctatgtaaaaaaaaacttattttttggtctgaaattattacaaacatttaagaacaccagttaatacggtgcacagtagttgaatttcaaaggcaatacaatcacagtatattactctgagaagaaaaaataatgcagttttaagatatatttacaatgccttcaaagattccttttcaaatgctactacaaatgctactatagtgccctctggtgttttgttttgttttgttttgtttcggttttttttttttacgtttttccatctgctaaatcttattttctttgagaaaaagaatttgcaaagagataaaatagcatctttcacttatatcgtagttgacattttaagtattttcatacatattatttcatctgaagagcttcttgagggcaggactattttcatattctttgagaggcttgcagagagcaggcctccagcaatgcaccttgtgaagcaagcaagaacttcactgaatgaatcctgtattacagggaaaacaggcagtatttttcttactggtttatgagaatcatagcacctgcaagctgaacattatcttaaggatgaatgggaacagtaggaaaatgtctttgttcttaggggatacttgctgaagaagataggggtgaatttcatgagttttgcaacttcctttcaaacggttcatcaaaaaaaatgtgtgatcggggagtcaagatggccgaataggaacagctccagtctacagctcccagcatgagcgacgcagaagatgagtgatttctgcatttccatatgaggtaccgggttcatctcactagggagtgccagacagtgggcgcaggacagtgggtgcagcgcaccgcacgcgagccgaagcagggcgaggcattgcctcactccggaagcacaaggggtcagggagttccctttcctagtcaaagaaaggggtgacagacggcacctagaaaatcgggtcactcccaccccaacaccgcgcttttccgacgggcttaaaaaatgtcgcaccaggagattatatcc

SEQ ID NO: 93862 - DNA, 25483 bp, Homo sapiens
tatttgtagcatcagtggttacttgcagtgattccactaatttctctcatgactgtgacactggacaggtcaccgatgtttcttgtacctgtatttggtcatgtgtaaaacaaacattttagatataaatctatcacagtagagtgttctgagaaataaatgtaaatatatttataaaaatcatagcctaatgactagcatataaaaggcacgcagtggagctgaattactttcctgtcacctaatgcttcacggtctcaagtgtttaaacataaaatctaaggcagaaggcactcagcagtttggttatttttgtcttacagggtcgatatgtatatagaaggtagggcaggtttgagtgaaaagcttcttcattgctcattgcatccacctgaggaaaaagatgcaaagcttgccctgatcaaagagggaacaacaagccattattttcctgtctttgaaaccgtacctgggagcttctggataactaaacacatggagcttcttggagggtggcctgtccaggccttccccagatctcgccctaggcatttcttcagcttcttagtggctacgtgatttgagcttcaaaactacaatagagaattattcagtctgatatatggattaccacttaacaaggataaagtaaatctaaagtcacagtcaatactctgcctcaagtggaaactgtgatgtttctgtctggatcactgccaagtttgcagaacaagaaccaaaaatcaagagagaagaacttcatttggttttaaggatgacccacagcaaagtttgtacaaatggaaaggggtccaatgagaacctcgaacttaatgtactgtgaggctatcttgaaaaacaggctcctgggcctctgctcttatgctgcttcttttatgacaaacaacacctttagatcacatgacaaaaaacagtaacacaaaagactacaaaagaaatgaaaagaaaatcctgattctacaaaggatgctaagcagatgagaaccaataccaaaaccaaggaccaacctgagaataaagtcaaagagctcagtgcaaagagaaaagagttcagcccaggtgtgggcttaccacaagggataaggagcatttgtgaatactgaacctggttgacggctggggtccatggcaatgggcaacatagaccatgtcttgttgaaacctccagaaaaactgtggaagtgaagacaatccaaatgagaataagcaaaaggtgtttatacagagcttgctatagaaaggaagtcagccaccatcacttgcatttgtcagagattcagaggtaggcaggaaagtctgagagattcatggtagaaaaagttatgtcctgattgcaggttgctggcctagggatgctgtaagctggctaactagaagtgtggatttctatgggattagtcagagatccatattttgctttctgtggttggtcataaattgaaaatagaggcaaaaattagggaagctggcagttattgaccaatgctggtgtatttgactgttgtaagggtcatgatagaagctgtttagtctataagggcactaagaggttagaggatttcttagcagtttggctgcaataacaaaataccatagactgggtagcttaaagaacagatgtttctatctcacagctctgtaggctgggaagtacaagatcaatgtgccagcagattttacatctggggagcacctgttccttggttcatagacagccaatctctggctatgtcctcacatggcaaacatgccaagggagttctctaagatcccttttataagggaactaatgtcattcataagagctccacccccatgacttgatcatctcctgaaacccccacctactaatggcttgaaagaatatattttttagggatctcttctaaagatttgggggtcaggatctcaacatatgaatttttgggaaacataaacattcagtccataacacaaggcaacagaaaaataaaatagtacctgtgtatttttggggcattgaccttcacttccaaaaagctttccttgatgttaatggagcacctgactctcaaggcatggtataaaaatagactgtgaataagaatactacgagttctaccaaatagcctgtgatatgtgcatttgaacaatgtatattacaatataacattgaagttgttttgtttgtgtaccaagtcattatctatacgtttgtatgtatacatagtgtgaaaatgtatttgccaaaatattatcttaaatcaatgttgccatgttttctctttttattatttatgatgtcaatgtgctgagatattttaataaatatcatatatcagtcaaaaattgtattattaaaaatgaatacacctagtgtagtccaaagaaatgttttatgaacatatatacaccaaggatctaaagagcaaagttaaccttttatctttgatttatcacgtgtcagtcactccacccctgtttgcctcactcaaacacattattattattattattattattattgcattttraagtaagctgcagacatctttgcagttcaccccaggacacagtggcatgcagattataacatagtcaaagcagtaagaaccaccattgcaagaaagaggatgaattaaagttcacccaggcttatttcagatcccagagcaggaaatgaggagggcagatgaggagaaatgaggattctgaaatagtctactcgtgggagaagagtgctgtcatgaaggtggagtcgctgcccaagagagactggagagagagtgtgtagagccattgaacatcagggatgcacactgtagggcctggggcagacagaacaggctgcagcaggggataagcccctggcccatgtggaagttgcaagctgggtgggtgctgtggatgccatagtgatgtggaatgagaagagaaaatgggagcctgggctccaaacaaggagtgagcagagccacacttcttactctctcactgaatcaggtaacatggagaaaggtctggatctctgcacctgcccagtaaggaagcagaggtgggagagggagagtcagcctggacaaactcagggagaagcagaggccccagcctcattgcacatgtgttcctgatctgattcctctgattctccaggtgttgaagagccatgaacaagactacttcattggcaacaagctgagccrggctgacattcacctggtcaaacttctctaccacgtggaagagcctgactccagcctcatctccaacttccctgtgctaaaggtgacccatttcccagtcctcaagaggcagctcctcatctcccatcttgggatctagtatctgggcccttggactggccacattctgacctcagccttctccaggtcttcagggccccccaggtctccaaaatgagcttccaagtcctgattctgaggcatggaaatgccttcttgttatgccaaggaaatctgatgtgcatgctaccccaagaatatttcgctttttataatgccaaggacccagggcccagcatctctcctcatccctttatttcactgtggtttctgttcctgagttctctgtgatgccctttatcccaatatgcccttatcytcccacaccaagtgtgtctgagcagggccctttccatctggttccttccttatgctctggctcctgctgtcagataactgagttccttgtgcacagctctcccaacacgctgcccccgaaagctatatctctctatgggaaaaagtggccccatggtttgtctttaacattttctattttcatttctaactcaattttcccatatcttcacttcttctgcttagagactgatctgtgctgatatctcacaggcacattgttctttctcatcttctacaagagccatgaatctacaagattcatgtgtaaggaagagggtaggaagactgaactgaataaagtcttaaagacattttttgggaaaatgctagtgagctgcatgttcttcctcttatcttcatttctcacgtagtgtctctttctgcctccctactggtgctgatagagggaacttagttggtctttgtgtaggaggggctcagattccctgggttgtgttaatggtggtgtcagtccttggcttcactctgaggctgtgctttgtgcattgcgggccctgaaaatcagaatcagcaaactccccacagtgaagaaatttttgcagcctggcagcctgaggaagcttcccatagatgcaaaaggtttacaagaagcaacaaagattttcaaggtttgataaagcaggcatggatgccaagaacatgcaataccaatattctaaagttttgcaacaataaattgctttatctaaatgttggttgtggctattgtgaagttaataaactttttaaaaattgtatgctaattacatagtaaaatgcctatgaccagatttagttaaaattgatttcttttcattagtatctgatatgaaatcagatttccgaactgcccataaattttcttggaattaaaaatttagtaaaaagtacaatgtagactatgtggtttgtttgactttttcaagaattgtcctgcaacatttgtgaaattgcctatcaaaaactcatgtatagaaatttacttctgacattctgcacaagaaaacagttatcattctggggaatggcaaaatgaaattttcttttttccttgacatccattttatttctcatgaaaacactttttcttatgcattttcaaacaacctttctgtctgctatggatccctcagttttctaggaggtgaggaaatattgaagagcaaacagacccaccctctgctctcaggccaacttgtcatcccttacagtgcatgtgctcctggctcatcctcactctcctccttaaggctctgtggggacccgggcataagccttccctcagttcgttcagtgccactcaggcctggctgcgaagatacagatggtatatgtgaattacgtataagtaactatatttaaaattatttttccctggtgtgtcattgtgccagcgtgtttggattagaagtgatttccaggaatccttccctgcgtcttctagtttcggggggctcttggcctttctggactttcatggatcatgaccacatcactctaatttctgcctctgtcttcctgcacctcaccccctgtgtgttgtgtcttctcttctctctgctgtgaggacaattgtcattggatttggggcctatccagatataccaagatgatctcatctcaaattcttttacttcattacatctgcaaagagcctttttccaaataagatcaagttcacaggatctagggatttctatatggacctgtctttcttggggtccaacataaccccctacatggtgtagatgaagaaagaatatttgcaattgatgaatccaggtgatggatactttcatatttgttatattatgggcaatttgagtgacgcaaagaggatagcatatgcaaatagggttcccggatttgtcagataaaatgcaggatacccacctaaatgtgaatttcaggtaaacgataaataatatttcagtataatctggtttcataccgtgtttggaacatagctataactaaaaaattgttgattgtttgcctgaaattcacatttacatggatgtcctatattttatttggcaacccagtaagaaaacggtggcatcagcttgcccttcacagacatcctctcccagctatgctcacaatagggttttttcagttgccctagtctttgcatccaactcatgaaaaaaagcatctttaaaaagccagtttctgctgacttgcaaaaagagcaaaatctaggtgaaatgtattgtttaaactttgattaccaaccttgaaaaggaacatattaaccagtgtcttctgataagcagatcacttgcctcatgtcttagaatccagtaggtggccccttggccatgaaatgtgtgggagtggcttttccctaacttgacccttctttcagtgggagggaactattgagaggaacaaagagcttataaatacattaggacctggaattcggttgtccagccacaaaggtgacagcatttaacaaagtaagtactgatcttataaatctctctacattgcctcacaccctcctctctagcctcctagaaaaatacactaatatgtgtccttagcacaagaaaaagtttgtttttactcatatcatgccatcttggtgtgtttgggtgacagttcaagaactgtttatttcttttctgttggatacatctttacagaaatgtaaaaatgaagartttagaaaaccagggcctcagcatttaaaggtatgggaaacaatgacatgaggagaaaaaagaaatggtagcattttaaacaatctgagaataatcagtgctggaagaagtggcaatgtatgcaaaaatttctttatatatatagtcaacacacaattgtaaattgtgacactgtaattctatattggctgtgaaaattcaaaactaaggtttattataattagaaaaaattagtttgaatgttaggaggactagattctagttgagcctctgccactaattagctcgacgacaagtcatattctgtytctggagtactaccaaytcatggcmaatmtagagaatagctaagaaagaggctctgactgttgctgcgaactgtgtaattctttgaacggagatctgtcctgcccactctaggatatttctaagcatccctgaaggggtggcctgcccctccacacctgtgggtgtttcttgttgggtgggatgagagactgagaaaagaaagagacacagagacaaagtatagagaaagaaaagtgggtccrggggaccggggctcagcatatggaggacctgcgctggcgccagtctctgagttccctcagtatttattgatcattatctctaccatctcagagagggggatgtggcaggacaataggataatagtggggagagggtcagcaggaaaacgtgaacaaactcaygtctctgtgtcataaacaaggttagaaaatgtgctgtgttttgatgtgcacatacataaacatatctggtgcattaaaragcagtattgccgccagcatgtctcacctccagccttaaggcagttttctcctatgtcagtagatggaacatacaatygggttttacaccaagacattccattgcccagggataagcgggagacagatgccttcctcttatctcaactgcaaagargccttcctcttttactaatcctcctcagcacagaccstttatgggtrtcgggctgggggactatcaggtctttcccttcccacgaggccatatttcagactatcacatggggagaaaccttggacaatacctggctttcctaggcagaggtccctgcggccttccgcagtgttttgtgtccctgggtacttgacattactgaatagtgatgacttttaacaagcatactgccttcaggcatttgtttacaaagcacatcctccatagccctaaatccattaaaccttgagtccacacagtacatgtttctgtgagcacagggctgggggtagggttacagattaacagcatctcaaggcagaagaatttctcttagtacagaacaaaatggagtctcttatgtctacttctttctacatagacatagtaacagtctgatctctctttcttttccccacacatccctgccctctacctatctgatttgtagcccccctccctctctgcagatatarcaacccaaaatgtctctagaccttgctcaatgtcctctggagcagaggaacaaaatccccctggttgagaaccatgggactacatgacctcatggggctaagcaaggctgtgttaccgatgtgccccactgcttggacattcactgaaaacttcctgttaatccaggtgggctgattagtgaatatcattgacctctgtacaggagctaaaaagcaaagagagagagaaacagagagccatcatatgacagatttgatataagtctggattcatataaaatcttattcctactagagttctayggacaaaatatagagaaccagagaaatggatacaagayagataatagatgatgaagagacagattacagagagatagatacatagaacgattgatagataaaataatacatacatggatgggtagacagagattataaacagatacatrtacatagattgttggttggtaaaataattggtggatagatagatcaaagaaagaagatccatgggctactcaatgtgtccagagcctcacccatcttccaagcactgggacaagagcaaacaccctgtgttcctactatgatttttttctacattawctcatttaactttctcaacaaccctcaaaagtagaaataactatctctawtctaagaagagaaaattgaggttcagagattaaacaacctactgcatttatgaatctcataatggaaggagtcatggtttatctcattctcccttctctctgataagaaacagtgtcaytgggacaacctcagagacrtaactcctttaatttactcctggaaatatgagaccttatagtcctttcaaaacaagcccattttttaattgatgtaaattaattattgatgtaaagtaattacactagtcctcaactcactctggtttttaggttgtcaaagtagagaaaggcacacttttattagttttttcttccaagcaagcccctgaaaagttgctaacaggaggaactcaggaattagatgttcccctctcgccctctccttccaacatttatttggctaatatacattgaataggaaaatacaaaacaacttctcagacaggagctgagagccaggttatgaggtggagtggaaaagctccggacctgcaatcagaagttcaggctgacccaacactcaccacgtgtgcagcatgagacaggtgctttagctctctgaaattcagtgtacccatctttaattaggataataggagccatttcccagggttgttgcrgaaggtaaacacactccctagatattgactatgaatgaggagcatgtgtgtatgacccatggcaaatccttgagctctctggttctcattttctgttgacccaacaaagctcaatggtmacttatgtctcagtcttagcctgacccttggaaacctcacattgaggaagtgatatgttaattatcagctggagtgttgtgataaaatattatgtaagataaaatttcacttccttttgaaacatgatcctcratcaatggctaagagagtttattttggggattggaattatgacactgtgaactctagtacataacaattaaacaagcacaccctacgctttcatgtgaacttcactctccctttcattctgtcgaattatgctatttccatttcccaagttactttaatttactcctggagttatcatagaaagtacaatgtcaaaatatctaattacaaaacaggtgagttgattcagtatgatttcaaagaattctttactttccaaaggttaaactattgactcccatattttaaaatgtagacatttaaaagattttgatgcctaattttaatcatgcatacttttttagaaatacattagttgaggttgggtgcagtggctcatgcctgtaatcccagcactttgggaggctgaagtgagtggatcacctggggtcagactttcgagaccagactgtccaacatgctgaaaccctgtcttcactaaaaatgcaaaattatccaggtgtgctggcatgtgcctgtaatcccagctactcaggatgctgaggcaggagaatcacttgaacctgggaagctgaggttgtagtgagccaagatcgcgccattgcactgcagcctgggcaaaaacagcaaaactctgtctcaaaaaaaaaaaaaaaaaaamaaaaaaaaaaaaaaaaaacaaataaatacattagttgttaaaggcaagtatatttttgttccacactcaacaaccacaaaactttgcaagaagaatcttaatgtttaataacagagctgggggtttggtgataaaacgcaactattcctaagtcctggcactggaactccttctttcaatgagtcctgtgtctttccattcacattcatgatacaattagttgcatctgtctctgcagccactggttttcattctctgatactctgctacattccaccacccaaacagcctggcatagagcaagggctatcaaatttcactgataagcccagtctctaaccatttacaatgaccaagtgagcatgcacacatgcaaagatccatacacacagtatacaaataactgaaactaacaactcatgaaacattacttacctttcaacatgtcatgctcactgatattttctattcttttcttttctatttatttttwaaagtaatgggatttcacaatctgctgagagattaccatgcatatttgagaaacactaacatagaaaataagactcagtmtttggtttttaatagcagtgaccctggatcccagatctatcatttactctgagmaagttactttaaaaacctcagtatcctcaaatgtaaaatgagaataacaaccacattaaccttaggtaatttttgtaggataaaacaaagagaagtttagaagaatgatcagtgtgtgactgatgttgaacaaatgctagctccttccatattgcaaaattaatgcagcaacatctcttcttccagcttataaaacaaaatgcaccccatagagttagaatacagaattccaaaagaagcaagggatwaacaatctctgtctsttgaaagaatttggatcttctagctacagttaaacaagtctgaggcctaatttctggttttgatcaaatgcagtctcacagccaaagagctgaagagtgatttagctcccakccggtcctccctgtcagtgacatcctctggtttcatggccagttcatgggttcccagggccttcacccagctggcttccaggcatgatttcattttagtccttggtgtagatattcatgtccatcaccaaccggagtgtgactgtgaacattgtatttctctgatgttccatttcattaacgaaaaaatggagataatcatttcatgggactataaggagggttaaagatataaaatattgaaagggactagcattgaggaaggatcactaggaagttttcartaaatattagttcttgaattcttcctcttcccattaactcctatacatgtattattaccacatactctcacctcttaggctgccaagaaaattcagagttaaacagtgaaaacttgagactggtttgctggaatctgagggtggccactgctgggtaataatttgagccaagaaaacattccgggaactcctccaacaccgtcatgaagaaggcaggttcttcttcagcattgtttgtggttttcaaccatacatcctaaagtacatttttgattctatcrtttcaattattcattcattcattcattcattcactcaggcttagagaaacctccaggasactgctaccatggcagagaagcccaagctccactactccaatatacggggcagaatggagtccatccggtggctcctggctgcagctggagtagaggtaggttctgagttaggtcatcttaagtcagatttacgattgcgttatcacatacttttcccacagaaactatgagatgattactaactgaagcattgtgccttaaataaaaagggactgtaattaagaaaaagatgaacagatttgacctattaattcttaaaatttcttctcctctaaaagmatacatattaaaatacatttaagacactaatcacaaagtgcagaacttaagtggattagaatttaaacaaactgtaaaaaataatttatggcatttatacaacaattagaaacacaaatatcgattgaatatttgaggacatgaaataattattgttaatatttcatgtgtgataatgtactatggctgtctttagaatagttaatgtgttttaggaaaacacattgaagtatttaaggattaatcatatggatctgggatttccttggaattattacaagaggagaagtaggtgggcatatagatgaaaccatattggttttgattgataattattgattctaggtgagaagtataaggagaatcattatgcttttctgtttatatttattcatgttcataatttccacaataaaaaaataaaaatgcataatattaaaaaatgattgtaattagaggtaaaatgcaaactacaaatgagagatggaagggagtggattgtaacaaactacctattaaagattgactacattcacagcaattatttacttgagcacttattaattccaggttctgtactcggtcatggagatagtgaacaagacagacacagtccctgccctggggcagcctacgtgtctatgaggatgcagagaaataaacacgtggttaaratgaggggaggaggcttctrgaacacacaagcattccccaatgccacaaaaccacatcagaaaccagaggttttccttaaaaataatgctagtgtgggaccctaattcctttattaaattgagaattttaccctattgtgtctcacgtacttcagaagagaaaattacagttgcaagtgtgaaagctgtgcaacagyggcgacctatgtcacccttagcagggttcctgagaagtggggcgatacaaattacagcagaggctccttggtggcagaatatttgatggccattagcccatgtcatgcctcatgctggggacacacaaggttgtggtctgatctcacttggagacacaggctttcctaagmtatgacaacaccataactagaagaactgctcagtgccttttctccagtgatgtccctctcaaaacatgacctaatcatagacattcatatcaaggtggaggtgaagtgaactagaagattgagcagctatgtgctgtgacccatgcacttttctcaatgaattaggtctaaatttccaaatggccatgactagccccctctgtgtaccctgccaaactcagaaatcttatattctccaaatgatgcaccagatagaggccattcaatttcacaggtctataatagaatgaactaacaagaacatatttactgtttctgcttccagtttgaagagaaatttataaaatctgcagaagatttggacaagttaagaaatggtaagatcaacctctaagtttctctaatgagggtatctagtagaaggtacacggggaggtttgcgcagccggcaatgtctatgggtgtggggcatggtatttgtacatggtgcagagggagaaagtggttaaaatggaagggatgtggctccttgagcaagtctggcaactctctccaggytwaaaggaccagacctctcagagtatttgctagaggaacaatctcccacccctgagaaagccctttctttgttttcatgcttggggtactgtgagtgagcagtggtcatcagcacaggatcccatacagccctcyccatccaagcacatgcaagaacatgcattagacaaaaggaggaggaatagatgtggccactgtcttgagttttttctttcatggggggagtgggactgggtaacactgtagcaatatcgcagactttgaagagcacagaaagggacccttatataaaaacctctcagaacctgccttaaatatcataaacaccatgagacttactctgggaacatcctgttttaaatgacatcttgttgccagtactattgtaacttgtcccaacctcttcctaaaatatccatgaagataaatcaacacaaaaaattcaagagtcccactatgtatctggaggggcaacaaaaacatatatgaaataaatggataaaaactaaaaggaaacttcttaagaaaaagaagaactacaggaagctttataaacatattgtttggactgggtgcagtggcttacacctgtaatcccaatttgggaggctgaggcaggtggatgacttcagttcaggaatttgagaccagtttggccaacatggtgagacaccatctcttctaaaaatacaaaaattagccatgtgcagtggtgcatgcctgtaatctcagctatagagaggctgagatagtagaatcgcttgaacctgggaggcagaggttacagtgagccaagatcacaccactccactccagcctggacaacagaatgatactctgcctcaaaaaaaaaaaaaaaaaagttgtttcaagtgaactcttaccaggcagtaatttctttttcgttttacaaatttagtcatttcaacaaccattttttttcatcctgaaatggtgggtttcatagacayttcactctccttttttttcttccycttaaagatggatatttgatgttccagcaagtgccaatggttgagattgaygggatgaagctggtgcagaccagagccattctcaactacattgccagcaaatacaacctctatgggaaagacataaaggagaaagccctgtacggtatattttctgttcttccatccacagagaacatagagtgatttaggtycttccttgagtgggtgggaccatggcagggtatcaagaccagcagcaggctgggccttgggcatgcacgctgaggtccagtattgcagagtcccatggagatgagggaacagtgaacatggggagggttcaggcgagggtgattctagaagaggatgcagtccatggacacagcaccctgacaaaggtttccaaactctcataaacccaatgaactgaggaggatggggaatcatgtttccaggtgctcaggacttcagaggctggaccccggccaatggcttaggacaggcatagaatatgtgagagtctgtagatgaaggactggggagggaaagctgcaaagaaaccaagtctaaggtcccagtaattccaagtatgatgaacaggaacctaaattaccaaccaattatatcaactggaatacttgagcagggctagtagaggctggcaccaaggatactggagttaccttgacacatggatagaaggccgaaacagccagattgattcaataccagcaaagccaaggggtctccttgttgttgtgatgagactgcatgattccaaataaatcctgaatgaaactgctggcagctcctcaaaaactttaatatggtattaccgatgacccagcagttcctctaacaagtatatccccaaacaatcgaaaatacatccacactatatattttacataagtgaataatgcaaataacaatattcatagaattcaaaaagtggaaacaacccaaatatccatcaatcaataaatggaggagaaaaatgcgccttagccatgcaatggaaagatatttggtcatgaaaaggaatgaagtacgaatgcatgctacaagatggttaaaccataaagacatgttacataaaatacacgagacacagaaggccacatattataggattattttaatatgaaatgtccagatattcaaatccatagaggtagaaagtagattagtgattgcctggggctaaaggagtggggcttggagaaaaatgaagaataccgctaatggtacagatgtccttatcaaggtgacaaaaataattctgcaattagactgtgattatttttacagaattctgtgaatgcactgaaaaccactcaatagtataacataagaggtggcaattatagtatgtgaatatgcatcagtaaagctcttgttttaaaaagtattgtgaaactccagtttgacacaaaagaagaaaagtttgcactggttgtaactgtacagagaatttcaccagggaaggggttggctcttaagaaaggcacacatggctagagttgggcaacagcacatggagagggctgtggaaacgtttttcatgggtgtaattggaagaactgcaaatatggggcatagaagcagccctgggagctgtaaaatgatgagagaggacaaggaatatggctgagatggctgtgccagggactctcttaggattacttaggaagcaggtctttggccatttgactcacactaagttcatgcacagaacaaaccacaatggagatgataaatcctggcacagcatcagtgggtactggcagtgattccaccaatttctctcatgactgtgaccaccgatgatcttcttcctgtattaggtcatgcgtgtaacaaaatttagagagctatctaccttgataggctgttttaagaaataaatgttaatatacctgtaaaactcagagcataatgactatrtacctgtaaaactcagagcataatgactagactataaaaggcamtcattggaggtgaattattttgccatcacctgatactctactctcttaggtttttataaacctataaaatctaaggcaaaagatatttgaccatttggttgtttttgtctttcaggattgatatgtatatagaaggtatagcagatttgggtgaaatgatccttcttctgycctttastcaacctgaggaacaagatgccaagcttgccttgatccmagagaaaacaaaaaatcgctacttccctgcctttgaaaaagkaagtgaagctgttcagtgttttggggaactgagtttagaagccagtagaaaaatagtggctgggcattcctggggcactgatcttcactttcagtgatacttcctggacaccaatgcagcactctgactctcaaggcattttatgaaaatagacttggagaaacaattgtatcacttatacccaagctataatcttccagtaaaattttaatttactgaaccccaatatggaattatctgttcaacagaattttgtgttcataagtagaatgtgggctgtggaaggctctggaccacactagagttgctgttcagtctatggaaccccatggactttgaacaggggcatgatgaaagtgatccatcagaaaacattctggcaccatatgcaggaagacaggagaccaattgcccaaccagagaatattgcagtgtttcagggatcagtattttytaaaaggagagtgactgtgggatgcagaggaagattctgtaaaatgcattttatagtaagttgcagacatcagagcagttcactcctaaacgcttcagcttgcagattataacatagtgccatttaggaaccagagtcgatgctgtaaaaaagatgatgaattcaggttcacccaggtttcctacagatctcagggagatagagcagggaatgaggagaacagacaaggagaaatgaggactctgaaatagtctccttctgggggaagagtgttgtcacgatggtggagtcactgcccaagggagattggagcgggagacagcagaatgtagagccacatcctgaatgtgagggctccacactgcagggcctggggcagacagaacatgcggcggcaggtgctaagcccttggcccatgtggaagaagcaagctgggtgggtagtgtagacgccacagtgatgtggatgagaagagaaaatgggaggctgagctccaactgaggagtgagtacagttacacttcttactatctcattcattcagataatgtggagaaagctcgggatttctgcatccatgcagtaaggcaacagaggtggggaaagtcagggtggagaggctctgaaagaagcaggggtcccagcctgggtgggcatgtgttcctgatctgattcctcccattctccaggtcttaaagagccayggacaagactaccttgytggcaacaagctgagccgggctgacattcacctggtggaacttctctactacgtggaagagcttgactctagccttatttccagcttccctctgctgaaggtgacccatttcacagtcttcagagaggcagacccacatctcccatcttgggatcttgtatctgggccctgggactgagcatgttttgaccccagccttctccaggcctttggtgccccaaggtctccaaaatgagcttccaggctccaattttgaggaatgaaaacacttttgttatggaaaggaaatttgtagtgcatgctaccccgcaaagagtattttgccttttattatggaaaggacccagggcccagcatgtctccccatccctctatttcagtgtggtttctgttcctgagttctctgtgatgtcctttatcccatatgtgcccacattgagtcagtctgagcagagccctttccatctggtttcctccctgggctccggctcctgctgtcagacattttgttcctctctgcccagctctccagcactctgcccccgacaatgtatctctcactgagaaaaggtggtcccatggtttgtctttactattttctataacattttcctttccaactcattttcccatattttcacttctgcttagagactgatctgtgctgatatcaaacaagcacattagtttttcttgtcttatacaagagtcactaatctataggattaatatgtaagaagaaagatagggatgactgaactgattaaaatttcaagacatctttggggaaaataaagtgagctacatgttcttcctcttatcttcctttctcactgggtgtctgtttctgccttcacccaagtggaagcgactcacttggtctttggcaggagggactcagattccctgggtcatgttaatgggggtgtcagcccttgacttgttgttttagtgaggctgtgctttgtggattacaggccctgaaaaccagaatcagtaacctgcccacagtgaagaaktttctacagcctggcagcccaaggaagcctcccatggatgmgaaatctttagaagaatcaaggaagattttcaggttttaataaaccagccatagaggtcaaraacatgcaagaccagtattctaaagttttgcaamaattaagtgctttacctaagtgttgattgtgcctgttgtgaagctaatgaactctttcaaattatwtgctaattaaataatacaactcctatwcacccacttagttaaaattgatttcttctcattaggatctgatgtgaattcagttttccaatctcctcctagccaacaattttcttggaattacaaattcagtaaaaawggaaactataaattatgtggtttgtttgacttttccaagaattgccctgtaacatacaatttgtcatacaatctattaaaatgccaatgtaaaaatgcacctctgacattttcaggtatgcacaggagaagagttaccatcctggataatggcataaagacattttcttcttttcctgaacagtcattttatttctgataaaagcattctttctaatgcatttgcaaaacaacgattctgtctgctgtggattcctccgttttctaggaggtgaggaaatattgaagagcaaacagacccaccctctgctctcaggccaccttgttgtctcttacagtgcatgtggtcctggcttatcctcactctgctccttaagcctccatggggtcccaggcataagccttctctcagttccctcagtgccactcagacctgggctgccaagatacagatggtatatgtgaattacatacaaataactatatgcaaaatcatttttccctggtgtgtcactgtgccagagtgcttagattaggagtgctttctagctccacccccatactggtcctgtaatgctaatctctcccaggacacctgggcttctgcaatttgagctctcctcctcttagagggagcttccccaagttggcagaggtggttgagggagcagacagacacacaggcttcctacctgcagcttcactttgctctagtctcttctccacttacaaccagagtagtttttctaaaatgcaaattggaaaaaaaaaatcacagaattcttcagggaatcctgactgcatataaaatccatcctcacacctgtcctcactccttgatcttcagcccagtcaactctctgaacatggtgaggcctcttgccttcctgcctgggtgcatttgctacccctacctggcaagctccttcccagtggacacacttaacactacctcattgcttcccaggagcactgggctgtcctctgccctccacagagccccagtgagcctcttgtagggaaaagaaagagagatcagactgttactgtgtctatgtagaaagggaagacataagagactccattttgaaaaagacctgtactttaaacaattgctttgctgtgatgttgttaatttgtagctttgccccagccactttgacccagccactttgacccaacctggagctcacaaaaacatgtgttgtatgaaaacaaggtttaagggatcaagggctgtgcaggacgtgccttgttaacaaaatgtttacaagcagtatacttggtaaaagtcgttgccattctctagtctcaataaaccaggggctcaatgcactgtggaaagccacagggacctctgcccttgaaagcggggtattgtctaaggtttctccccatgtgatagtctgaaatatggcctcatgggatgaaaaagacctgactatccgccagcccaacacccgtaaagggtctgtgctgaggtggattagtagaagaggaaagcctcttgcagttgagatagaggaaggccactgtctcctgcctgccccgggaactgaatgtctcrgtacaaaaccctattgtacatttgttcaattctgagataggagaaaaaccgccctatggtgggaggcaagacatgtttgcagtaatgctgctttgttattctttactccactgagatgtttgggtggagagaaacataaatctggcttacgtgcacgtccagtcatagtaccttcccttgaacytaattatgwcacagattcttttgctcacgttttttgctgaccttctccttattatcaccctgctctcctactacattcctttttgctgaagtaatgaaaataataatcaataaaaactgagggaactcagaggccggtgctggtgcaggtccttggtatcctgagtgctggtcccctgggcccactatcgtttctctatactttgtctctgtgtcttatatcttttctcagtctctcatcccacctgactagaaatacccacagctgtggaggggcaggccaccccttcacctctaataacacctgagggccactgtgtttgctcccctgtactgtgagctcgtggtgtggggcttggcctgctggatccccagtgcttcatcaccaatggacaatgacatctgcacagacccatgcacagctctatgcaactccagaacctgggtatatgagattgggctttgagaactcacaaacccccacacactctgcctgtctctattcattcattaatttctaaaaaaaatggactcatatccctcaaatgctttgtaaggactttgcttgcatgctgaccaaaataaacaaactgctaagaaatttttatgggacacttacatgaactagaatgctgaagctttgatgaaattagggaattatagaattttaatatgataagagattatcatattaaacactatcatagtgtgattatgtttagaaaagaagttcttccttcctagagatgaatactagtatttacagacgaaatgatatgctgtctgggatttgcttgaaaagaatcccctggtagtggagggagtatgtgggagtttgtatcattttcttgtggctcctgtcacagattcctacaaactgggtggcttgaaacatcagaaaggcattttcttacaattctgaaggcgagaagtctgaagtcagggtgtgagtagggccacattcccctggaagtactagagaacaatccttccctgcctcttacagcttctggcggctcttggcatttctggactttcatggatcatggccacatcactctactttctgcctggggcttccagcacctcaccctctgtgtgtctgtgtcttctattctctacgttgcagggacatttgtcattggatgtagggcctatctggatataccaggatgatctcatctcaaattccttaacctcatctgcaaagagcctttttccaaataaggtcacatttacaggactcaaggatttggacatggacctctctttcttggaagccaacataacttaatccactgccaggcatagataaaaaaatgttgctggcaattgatgaatgcaggtcatgggtaccttcaagcttgttatattattccctctacttttgtatttgctagaatttttccatgtaaatttttaaactatcttattttaggagctcctatgatgtccatgttttgtcccagacaataaggactggactcaaacaagaaggctccgctctcaagaactcaaggtctaaggggaaatctgatattgaatacatcatgtcaaattaatgcagggaaagacacaatagagaaaatacagcaggaagtgaaagtagagtattccagtcaggacaaatgccatgtgcaaaggcccagaggccaggaagggtgatttgagcaatgcagagaggaaagaacataaaaatagggtggccagatttggcagataagatacaaaacagcaaaataaatgagaattttagataaacaagcaatacttttttagtataaacatgtttcctacagtgtttgggacatacttatactaaaaagtgactgatcctttgcctggaattcacatttacctgggtgccctgtattttatgtggcaacccagtgtcttccagagtgccatcagcctgcccttcacagacatgccctcccagctatgcccccagcagagatttctcatctgccttagtccttacatccaagtcacgaaaagtgagtttcttcaaaaagccagtttctactgacttataaagagagcaaaatctgctgaaatttttggttaaacttttattgccaaccttgaaaaggaacatattaaccagttaccttgtgataagaggatgacttgccatttttcttagaatctagtaggcagtcctgtggccctgaaacatgtgggagtggctgtttttaacttgaatctattcctttcaatgggagggagctactgaaatgaacgtgtagkttatcaaccacattaggacctcaaattaagttgttgagccacgagggcgataacctttaacaaagtaagtactgatcttataaatctttctacactgcctcacaccatctcatctaggtcaccagaaaaatatttttaaatgtgtccttagtacaataaaaaaaaactgcttaatactcacatcaatgccttctttgtgtgcttggatgacagtttgagttgtgcattcagctgcttttggatatattgtgtcaacttaataaacagaaagagactctttatatgggaacaaagttttgtaatgggtacgtgtgtaccatagtaaaccatgtatgtccttagggagataaaggaagaaaaagatttttaaagcaaaagaataagaaggattaagtaaatgttttgaaatacttatcattcactgcaaacatcaataacaagggtgacaccaggccaagtttgaacagggagttgctggacagatgccctttcaggagtattttttgtaaaaggttttgatgacctttgtgaaaggttgtgtcacaactgattttcctatttatattaaatacctgcatccactctgagcttctgatcaaattgagacagccttgttgctggctgccattccaaccaatgtctcttgtctcaggacaaggtgtaatttactccaaggtttaagttactggatgtagatcaataacaaagaatagtttcatcaatattagattgatttagatttttttaaaggatgacatgctgaaatagcagctatctctcaaacttctaataattagttatatttaatgagcacttactagagacctgctacttttctaagtgctttgtatgactttgcaatttagtcttcataccaacctaccaatctgtaccataggtaccacaagtatatccatttcatagattagaatactcagacacagagagattcagtaatgtgtccaaagtcaagaagccaatatatgaaaatggtgatattgaacccacaaaaccggttcagaaaccagagattttggttaaaaataatgttagtgtggggactctaattcctttcttaaattgagattctaccctatggtgtctcatttactccagaaaaaggaaattatagttgcaagagttaaagctttgcaatagctatgacctatttcacacttagcaagattcctaaaaagtggggtgaggtaaattacagaagaggcctcttggtggcagaatctttgatggccattagcccatggcataccccatgctggggacacacaaggttgtggtctgatctcacttggagacacaggctttcctaagatatgacaacaccataagtagaagaactgctcagtgccatctctccattgacatcccctctcaaaacatgacttaatcatagatagtcatgagatcggggtggagatgcagtgaactggaagacggagaagctatgtgctgtgacccatgccattcccccaatgaatctagtctaaatttacaaatggccacaaccagcccctctgtgtgcactgccaaactcagaaatcttatattctccaaatgatgcaccagataggggctattcaaagtcagaagtttataatgctatggaatgaactaacgaaaactcatttactgtttctgtctccagtttgaccagaaatttctagaatctgcagaagaattggacaagttaagaaatggtaagatgaagtctctaagtacctctgatgtgggtatctaatagaaggcacacaaggaattttgaacagcaggcaatgcccatgtgtgtgtggggtggtatttgggcaaggtggagagggagaaagtggttaaaatggaagggatgtggctccttgatcaggtctggcaactctctccaggctaaaagaactagacttctcagagtatttgctagaggaaccatccccagcgccctgagaatgccctatccttattttcatgctttgggcaccatgaatgagctgtgttgatcagctcaggatcccatacaggcctccccatccaaggatactcaaggacatagattagatgaaaggaggagaaatagatgtgaccattgtcttgagtctttgttctttcatggggggtgtgaaaaggtaatattgtagcagtattgcaggctttgaagagcacagaaagggacccttacataaaaacctctcagaacctgccttaaatgtcacaaatatgaggc
